United States Patent Application Publication US 2015/0354009 A1 - sequence listing, part 2

SEQ ID NO: 22 - DNA, 237544 bp, Homo sapiens
gtggtgatgagggcgacgaaggagggggtgtcattttctttttctttctttttttaaaaaaagtatttctctcgcgagaaaccgctgcgcggacgatacttgaagaggtggggaaaggagggggctgcgggagccgcggcagagactgtgggtgccacaagcggacaggagccacagctgggacagctgcgagcggagccgagcagtggctgtagcggccacgactgggagcagccgccgccgcctcctcgggagtcggagccgccgcttctccagtgggtgcagccggggtcccgacgggggtcgggcggccaccggggctggagctgcggccacggaggcttttgcgtttgcgccgcgccgagggcagggacagggactggggtgaggggctgtcccggaacgtccacagctggcgctggccctcccctgcctgacagcttcctggcccggggctcttggtgccgggctccgcgtcagatgttcggggggcggtggcatcgcccggagtcggcggggacggcgcggctggcttccagcctggcggagagggcaggctgaggagtggggcgttcagagcgcgcatcgcgcgcaattcgtgccgctaaaaaaaataaacccagagagctcgcccggggcttaggaccgctggggatatgggtactttgcgccgcgctcttctggcggggcccgggaggccgagggatcggccggggctgctgccgccgggggcctgggctttccagccagctgtggaccaaacggtcttcccttacccaaattaactgcgccacgcgcaggcggcgcacgggttgggcttgggaatggggaccgcgaggcttcagcatcccgatgccctgaaagtctccccgcctcggggatttgtctctgtgttgcagctggcaggggccgcctgaagtgggagcagcgcctggagaaggcgggaggagcccggcccgggggacgggcggcgggatagcgggaccccggcggcgcggtgcgcttcagggcgcagcggcggccgcagaccgagccccgggcgcggcaagaggcggcgggagccggtggcggctcggcatcatgcgtcgagggcgtctgctggagatcgccctgggatttaccgtgcttttagcgtcctacacgagccatggggcggacgccaatttggaggctgggaacgtgaaggaaaccagagccagtcgggccaagagaagaggcggtggaggacacgacgcgcttaaagggtaaaggaaccggttccctcctttggtgtgggtctcccaagtttcaagatccagaacaacgggcaggatgactctccctgtggaagactccttggcaagacctcctgggggcaccttagaggtgctagggttgtttagtccccaccccgttcgtggttaaactaccttgcccctactcccagagatttctgccccaaaggagaggacgtggttaaatggaatcttgggccattgttgaggcagattttgggaggcgagaagagttccttggggaagaaggggaggagttgcgagtgggataagaggagaagcccgttcctttccctgcaatatcaattctggttgtttctagaggaaagtactttccttggggtcatcttggtagatgctgtatttgaaagggggcaaggaaaggaagggattcccatgacagtcagaggagaaatcacacagtagttgactcttccgtaaattatgcttattaaaattacggattgggttttctgggcaatgcttcctttagatgtctacattggaagcagaacagggcaagtggttctgagaactggttttttgagttgtgtggggctctccgtttcactgcagcagtaaggctgctgtggccggccttaagggagtatttttaactagtggtgtttgtgttgtgtacatgcaactgaccatttcactggcttcccatgccgctgttacagatgtttcagccggaaaaattttaattagacttgactaagggttgtcattttcctgtattgaaggacagtgggaatacatttcctttaagagaaatttgtctgcagttgtttaagttaaagcctccatggaaacaacaggatggactgtcagtgaccccttttatcttcttggaggagcctgttaaataaattcagacagtatatatagggagattttgtattaaattcttaccattctcgctgatgctcttttcctgagtggttctgtagctttattatatagctctgggtcaccaagtgatggtatccacttggatatgtggctgttcatttcacttactctttttttgttatgaggtgttatagtcatgtatatgtagtaaaatttgtgtttgtatggcccagatatgagaagaaaaagtaaactcaccagaccagtttttgactcctagtctggagtaaggacaagatgattgtatgagccaagcacttaggctgtgataaaatagcacagaaaatagttatgattaattcggttccatcttggccttcgtggaaaataaacccagaattccgataatgttggaaggaagtttgcttatcatggtaaacctgaccttgatcagacagcagatgtttattgccctgtgtgcaaggcacatggcaagttcaataagtagactgaggctctgattttcatatgttctcaagaggacctcatttagtccagtatttttccttcaaaaatacatttctcctacataataatatcttaatatctattctgataggattgctcctgtatataaaggacgtggggatttaattctgtggctgaagatctgcagagaggtgtgaggcctggtcagacatttgtctcatttctctgggctgtcaccaactagtgtgttcccttgggaatgtgaaaaaagaaactaagctttactttgttgcttaacaggatgccacacttttactcacacttgtgctttttctctctggttttaaatttgtttgtgattatagagagatacctctctgtgctcctcacagtatttgatcattaacacagaccttatcctattgtaaactatttataaagccttcctaaaaacagggtattaatagaattgtaattatgtgtgttcctaattctcatgttaattataagattttataataagtgatatatatatatacacacacacacacacacacacatacacgggggtgaaaataataatttaaaaatatatacaattaaaagtatttccctgccacctttcagagaccattttcttgtgtatttttctataaatcttttaggcatatgtatacatgtacaaataaacacaaatatatatgtatacatacacatgtgtgtgtgtatcctttttaatacatggaatgtattgtacatgcaatattctgaactttacttactttttatgtatctttaatgcatccatctattaactcatatggatctacctcattcattttctttctttttttttgagacacagtcttgctctgttgcccaggctggagtgtagtggtgcaatcttggcttactgcctccaccttcccggctcaagcgattctcctgcctcagcctccagagtagctgggattacaggtgggtgccaccaagcccggctaattttttgtatttttagtagagatggggtttcgccatgttggccaggatggtctcaaactcttggcctcaagcgatccacccacctctgcctctccaaattacaggcttgagccactgcgccctaccccattttcttgttgtatagaacctcattatgtcactggaacagttccctagtgatggctctttagattacattgagtcttttgctattaccaactttcttctgcatacctgtgtttacatacacgtgtttatatgtggtataaattagtaaaaatagaattgctggatcaaagtctttcccatagattttaagcaaaccccaattcttatgttaaatttgaataacattttaaatttattccctctgcttattgccgttacagtctcatatgaataaatcctttaacggtgccctgctgtataaatcatcagaaaaagcagttatgtactacatttttccagttattgcttaaaatttctgtttttgtctgttaaaatattaccggcttcaaaactcacctctttgactacagtgaaacctgtttaccattctgattggagatgcacagtttatgaagtgaaagtgatttgtaacccccgagtctgcctgatgcccagttggtggcagcaactttcagcacctcactaatctttcctctagttaaaaggtaccttaaactcatcagtatctgctgtgcactggttccttctccccagcaaatactgccttcttgtttttctctgatgtggcaggtgactacaaaatccgccttggtattcttcaaatgcatatatattcctttcttgtcagctccctctcttcctagattagaaaactgcctcattttctgctcactggatgtgcagtcccagcttgtcttcctctcctccccccctgttgcaggtgttcttttttttttttattctctccccactgggcagcaaaagttgttccacagtggaaatttaggcatcctcaagtttcttcccagcttctgctgtgttttcttagagtaaattgccaatttctgtttttacaggaaatccttttttaaaaatggaatcagtgtggtccccatctactctgcaaaaattgcatttttctctattttcaaatgagatttgttcaagtttcaaaaccacgtgaaataataaatgtatagtagttttcttttccttgggcattgcttgatatgtgaaatgggtttatgaaaaataataaaatcataacgctatttgtttgactttcaattcatgggaatttttctcagctaaactctaaatggtgattaggcaaaaagtgtgggagacagtccaaaaaaaaaaaactcaactgtacttgaatagcaatagttatgcaccatttatttatgattgccttattgctttagctcccaagtaaggaaatattactgtttcctgtcaaagggggaaaagttcttcacagtgagatctcctttcccaaaccttggagaagatggattgagacttctgcccttgttgtgtggtttataggtacatgagaccagttgtatttgacacaatttgtccccttgtgtgtgattccttttggtctttgtttatttgtttatttttttccagaggtcttgttgccagaaaaatacacatggaacagttcatacccatggtagattatgtgatggcaaactccaagggattagttatgtagaagtctgttattaaaataaagaactgtaatagggaatacagaaaaagttctgtagactttataaagtccattttactttataaaggggactttaagacttcacctgaagtcagatgggctaataattaaatatggggaaagactcctgcaggggtatggtttacatttattgaaaagattaagctaaaatattgggacacaatttttttttaaaaaaggatatagtgttcttaaatagaagatttcagcaattccacacatgaaacaagaaggtagagacaaaatatttatttatgtgactcattttgtaacattgaagacatagaggttgtttataaaaatgtgtaagttggtaatacaaattaattaaaacatacatcagcctatggtgaaatgagatgagagctgatggaaatggagtacagacttcccttcaaccttatttggaattttaaagaatattaaaatgttcctttatcgtcttgtgtagcatatactttaaaaattatagtattatactgatgactctaatcaagcaaaatactaaaaaattattagagtattcatgtaccagtttgttggctttttcttccagtaagccaatcagcctaaccactttgggagttttagctttattttcaatgtgaaaataagattttacaaatgttttcttgaaagagaaatacattcttttaacaatttctttgtttttaaacatgaacccagcaaatgggcctgcttaagcaacttagaattttttcccatgagattctttgaagaaaccgacatcaataatatatcaggcctgagttatgtggcctaactcaggcacatgatagtttagcgtttcatgattgttcaagtcgattttctcattagatagttaaatcattgaagacaagaatcctattataagcattttaccactaactcatcattaagtggggtttcagaaagttcattaattcaggaagtcttgattgaatgctagcttgagtttagttctgtggaaggccagagacatataccccataaccctgggggtacttcaggaaccgtgagtgcacagaaggacagcgtccctggaaagggggtctggtattaagtctaaacaaatacataataacaattgcagccatggtaggtaacatttaggtaacatctatatgttactaagcactatatgttgctaagcactgttcttactgttttgcatatgataattcattgaatcctcatagccactctacaagctgggtgctttcataagcttcccttcacagatgtgagagccgaggtatgcagaggttaagttctaaagacaaaacttaacgttaacttttctttctccattaattttagttatggttttggtttttcattccaccagacaaaaatgcaggcccaagacattggtaaaattccacttaaaattcctaatattctttcatgctagttcacaaatcctaagtatggttaatcacacagtattatttagtccaacaagaaactttctgcaaagacattaataaaacagaaagaatcataggatgttagagccagtgggactttggacagcgtattatattttaatattagaccttgacttgtgtgagggtggtaggtaaccattgcaggcagcctgctgggcgttgtgtgggcttctgagctggaggcattgctgtttatgttgttcagaaccctcttgctgtcatgtcccctgtgagaaatctctctgaatagggttgcaagaagtatttctctttccagtggaaattggtatgtgtcttaaatcacgaccagtcatatgagttatttaattatttctttttcattttttaaccttggttgcctgtaaactcagcccaattttttacattaaattgcagccataatggtaaaaaaaaaaaaaaaaagctctgatgtatcacttatgattgtactttgcaaatactaattcctttaaaacataaatcctttatgaggaaaattaagcttatttattcatttaacaaatgaagaaacaagggatgcagagtttcagtaattactccagggacataaactagtaagtggtagagttggaaaatctagcttcatagctggagctcttaatcttaatattttactgctttacagttataataaatcttgtagctggtaaatttttttctttcataccttttataccttcgtttcccaagaatcttctcccaccattgctatgtggaaagactcaacatttattgatggcagatgctgttacaagccaagggaagcatcattgtgggaatgggattgatcagaagtgactttacagtgaaagtctattagggctgggcatggtggctcattcctgtaatcccagtgctttgggaggctgaggcaggaggatcacttgagcccagagggttgaggctgcagtgagctatgatcatgccactgcactctagcctgggcgacagaacaagatcctgtcttaaaaaaaaaaaaaaagtttatcagtggtcaacaaactgaagaccaagctcactttttttgaaaatagagttttattgaaacaaatccatgcctgtttatttacttattatgtatggctgctttctccctacagcagcagagtggagtagttgcaacagagacagtatggcccataaaactgaaacatttgctctttggtcctttacagaaaaagtttaacaacctctgatctacgtgataaaaagtgactgtctactaggagtgagaactccttgaaggcagagatcttgcttgttttatttatctctaggaacatctaggaactgggtatgcggcacatgttcaatagaatagtttttgatagttgaactctgagcaattttgatgagctgattaactgggtatggttaattatatagactagagcttggagtaagtatagctgagaaataaaggaaagatgagtgaaaaatacatcaagggaaagggatatgaagtgtctgaggtcttaggacattgactgcagttgggcagggttggcacggcatggttccaagtgacatggtttgtagtgcagtctatgaaacgagtgccctctggagctgtgcagtttgcaaccttgagcaatcttgtgagcccgtacataggtggcaatgttgttagggaaaggagagggactagtggaaatataaatgtcactgatgttgtgaaaggcaaggacggggagctagtaaaggattctaagataggaacatgatcagatctttgccactgggtagaggtgtgaagggtagatgattagagagaagagagactaaagacagggagatttggatttaggaggctaatataggagtcacagtgagagtccacgatggtctgagcaaattcagtgaaaggggtgaagaaagaagagactcaggtggttccagagttaatgcagacagtacttgactagttggttgtgaaagacaaaggcgaggaggacctagaatgctcccacctccatatatattcaaacttaccatacacgaagtcattgtagcaccataaagagaaaataaagggaaacgagatcaggcctaggccctctactaccatgaaacaaagtattttcatttgtgagtgtttgagttattttattgctacgtaacaaattgccccagacttcgtggcttaaaacaacaattttattctttctcatgattctgtggctcaggaatttagacaggacacagtggggaatcttgtctctgcgccccacaatgtcagttgggctggaacaggcagtatgacttcttcacatatgcatctggttctgtgaccaggcactggcgcctgcagccctgtttacttgggtgtggtttatctaaatggacccactgaggaggggaataaaggaagcaaagagccacttgtctggctctgctgggggccttccaagttttaaagctgtctctcatgcagtctcctgcctgaacctgcccccgggatggagccattgaatgtgttttttttcaaatggggagactgagccccagatgcagcgactaggccttgctcagagtgagtgtctgttggggctggatcttgaacaacagcctcctgaccctggtcacatgtgttaatcccacatattgaccgtaggctaactcgaagggctgggggctggctggctggggtcacatggactcatatgtcctcgacattgcctggcttccttgattctcctttatatagtctcaggttgtcccctttctatacgtggcctctctacatggtctttagagcagcatagccagactttttccatggcagttcaggatctctcaagagcacaaaagtgggaactaccagactttcttcaaacttagcctggaatcgcatgacctggaattccatccaagtcataggcctcatccagattgaagggcatggactattaagacctacctttggatgtgaggagcatcatgtgtctgctgggaggggagaaagtggagccatctttggagaccagctaccactgtgaggcaatagatctttgagaaggctaatcagatactttaagttttaattctaacttgatcaagttcagttggcttagttctctactgaggatgcctcattgtattttgctgctgtaacttcagaatgaaaaagctccataaatattgtgtttgcatgttctgttagattcatgttagggcattgatcttagtttgtccacagttctgcatttaaagaactcacaactgtcaggaataaaatgaaagttcctaatgaagcagtatgttttgttttattcaaatatgagaatttcaaaacatctaaccattttccatttgcttttaagaaaatcagcttttaagattatacatgaaataaatttaatgggcaatcactctaatttattaactttggtatgttttaactttcttctgtatggaattttattttcaatttctatttatagcctcaaatgtatgtatctgttggtgtaatccacctcaattttttaaattaggggttatactaataagtaaaaataggttgcagttgctaatagaattggtgttgtaatgagctgaactgtactatttttcttataaatggagtagccacattatcaatagaataaaattggattaggaatatagtcaagtttgcattgtgggtgtcttatactatatcaaatcctagatttaaatttcttgtgactaccactttttcaacttaagtgacttttttttggttgaagttatcactgactctatttattcagctccctcagagcggaagagagaaagcaaaaatccctatctccaccattcccagccggagatgtattccagacagcaagcaggctcagagtgggagaactgctccattaaacaagtggtttagttcaacattttgaaggattatgaattcctagaccatcagtcatacttacattcaaatataagtatccaaacacatctaagtccaaatatagtacaaccattttatgatgttggtgttgggagacaggatttatgtctgccctaaagacacattgtctgctgtcaagtttcatggttttgaactgaagtatggtaatatctttattaataaagacaatgtattccagaggcagggtttcattttgtgtgtgtgtgtgtgtgtgtgtgtgtgtgtgtgtgtgtgtgtgtggttttttttttttttttttggtttcttcttcttccttttccggttctgtttctccttctttgttgccatcttttccttttcttctttttcttcatcatcattgtttcatcttctttttgtaagtaatttcataagctgtgctgcaaataaaatagggaggataggaatatcaaatgagagttaaaaccttaagaaaagtaaacaaggtctaagtaaaatacaaaatttttacctgggaacattggggtgttcaaaaagcaaaacagggttaaggtttttgttaggggaaggaaggagaaagcctgagggaagcaggaggagagagctgggagaaggttctggagtgaaagtcttgccagccagtggacctaggctggacagagcagatgctgggttttgaaagagattgatgacaaccccttcactcccggcagcattgggaccaggcgacctgtggccttaatcagcctcttttaggggacagagagcttatggaggagagtcaggacataaaagaaagacacttggatgccagaaaagattcgtatgaaaacatttagaggaatgcagtggaaaagcaggttaatccattgtctggtatgcacctgtgtatatggtactatgtaaagtttgatgcatcctgcttcttgtaactaatggtttattgtgtatcatttcccctgttcattcagtgctaatttgtaagattgtgtaatcagaccctaataggtttgggcctttgatgaataacttttaaaggaccttcttatttttaaatgcttttatttttgccattgaaattatggcttatatcttcttccatagccagaccatccatctttagaaaaattcatattataaattagttatagtaggacagattttagaaatgtataaatactgaaactgaggcccagagaaggtccaggaacaagtgctcaaggtgcttattttcctctccggttcgtaggtgtggaagctgagtcacgtggtagcgagagctgacctaagaggcgcgttgttgggtaatagattgggcctctttgtgttcacaccctcaagaggtggactggtatctgcaagttctctgctatacttgaaataaccaaaccttatcaatcctgtgggcatgggtgttttctttctctcatttatttgatcttaggcagtgtgattactctctcagcggtcagccctgaaggggtgatactgtagcagagttttagatcctcagtactaccctgctctcagtgggaacctccacattagaaaggattgggtgggatgggactttttgagggaggtagttgtcaatgagggtatcagtcaggtggttggaaaaagagaaatagtcttctccgggaatcggaagcatgactcctccccgcaaccctccaccacacacatactcacacttctaattggcagtcaaagagtcaaatgacctgggatcaactaaggcagttctgggtctgtgattaagcttggtttcttgttgtgtaacttgctggctcagttatccaaactatacattaagagtttatgtaataaacatgctaaagaaagaaaaaaattcttaaattcttgtgttttcctccatatcatctcacctagtaatactgtaaaacatctgcctactccaagtgacaactatgttatgagcattagctgcgtttgaataggacccaatgcttcattttcagaatgaacaccctgtcttgggcttgttgatattattatctttttttccaatgattctaggcagaactgccatttggaatatctttctctccctttctgatggggttaatgtctgaggagatgtaggcaaatgcttttcagtgaaggacttgatgtgcagcctttaagtagacaaatagttttttaatctttcatggactgctggtgcttcacaccccagagttgaggccactgacctcaagtttgcaaattttatatcccattaccaccctgtgagctctgtgctccccagggtcacatagtcggtgttttagctggaatctgagaaagtgcctgaacatttcctgaagagttggctaggaatgtttggcagtttggtcataaaaacccagagctagtggctggggtatatgttataattacctcacactatttcctatttgagcctggctgtgggtagtggggtatactggtattgattgtgggaccatattttaaaggaccaaggagtcattttcaatgatcactaataacctttggccacactttcagggaggtttggaagtgtggaaatagacatgctttgggtcaaaccctggctccaccaccttctaggaggaaacctcagacgagtgatttgacctctctgggcctcagtttcttcacttgtaaatgcgattaaattactcatctttctgtgttgtcctaagatttaatgggatggtacatttcaagttcttagtactatgcctgacatgtttagctatgatgatgagaatgattataatgctgttacagataaggaaaatgaggcagagagtcatccaaagaggctgttttttatggctaaagcaaaaatctagataatcatacctatctggataccacagtctccactttctcatcatagaaatgattatattaagaaacaggaggcaaacctgaattttaaaatgttcaaaagtgtaattttaatggacttactatatctgtggagatctggttatacttaaaggcagtttggggataagtttttatttttaaattttctctttccctaaattgtgttgtcttcattgggaaacaaacttactaaatattattccttattaatatgcaccccctcaactcttccaaaaaagtttgcattttttaactggcagatctgtcaaataggccttgcctctttcctgattagcacattttttaaaaagatactttgtgaaaagaatttaaattttagtaaatggaaagactgggttgaaaaccattctctttggcagcagtgcagagataccctgggagttagaattgtttcatggcaaggtggtgcgctattcttgaaatgtgctttaattgcctctgttggagtaaggatttggttataattgggtagcccagatgaccacctacaattcttagccacactgcctttcaacacataatctcagaggtaaagagataagccctcttttccagattgctcatgtcagatctcgcggagaactccagcactgccccagtcacacgcccttcactgtcgccaaagaaataggacactccagctggtcaggactgagccatgtgttagtcctgcctgaaccatgtggaatgggcttaggaaacgaagagtttggttagcagagaaggggaagggatactggatgggcaaacacaacacatctgcactcacagggagaaagctcccttttccatagcgtcagtattccctccacccactctgttatcactgtcctctctaggtgctttgtgggcaggccttgcttgcgtgattggggacaggctgactcagattggcagcccctgagaagagccactttctagttgagcgttcccttcctttggcttcatgccatgcagcaacataatgctcatttactacaaagagattcttatttgttcttcttcttctgtgtcctctttctcttgagaaattgaaaatctttttatttttaaattttctcttaatgatttccattttgattttaatgagagttgactttcggagaggtcttaaactattgaacatccgtgagagtggaacaaaacatacattatcttaatttaggcatagctttcgtagagttcctatacgctgcaccctacatgccagctctggttaactgattggcagtaaactctaagaagttgcggttgcttcatattcattcacagcctataaaaataagagtagagtgttttaaataaggaacgatttgaacagataatagttacttttctatttgccattgaaaatgttcaaattacttaatgtctctcatccccgtggggtaaatcacaccatcaccaacagaaagtttgtaaaaaagtaagaatataaaatcaaacaaatgaataccaggtactttcttttcttttcttttctttttttttttttttttttgagatggagtctcactctgtcatccaggctggagtgcagtggcacaatctcggctcactgcaaataccgggtattttctgtgctctaccgacttcctgggaaaaaaataaacctcaaataaaataaacttttccttttaaagttttgaaaacctttcaggtattttacaaagataggcaaaccactttttctccttttgcttgtaagcagttctaacttaatccagacattattgaactttgacagaagacagcagggtctaatttgactgcagactgactcatctgctcatttgcatttgggaccttccttgaaaataggttgtttgacacacattctcacacattgaaaggtcagaagacataccaggattctttgctaaatgatttcctccctccatttcatatttcccatgtccataagaattcttccacttatgcacagaaaaacccaaatttaacctttttatggacctgatacacaaaaaccccttcccccaaaacacatcttttgttaactgatgggtttatgtttgtcataaagaaagataaaatgtctttatgaaaatgaatcatgtcaaaaaggacctgtgatgcccaaggggatccatcccctggaccgacatgttaattgtttgcacaggtgtagtgaagtcatttgttcttggattcttcatctagtgaactgtaaccttatttagtagctggatacttagtaggaacactttggttagttcttgccactgatttaacatggtacacatgttgggattggactgttgtctcttaatgggggtcccctccctctcaggaatgttgagctgcgtaacagataaaggtggttcttcaagtgaacgaaaacagaaaacaaaagtgtggcatgatggcatgtaggagactgtggatatcaggatggactaggccaggtgctgctgcaaatttgtgttttttaaaaagaattttatttaacacagatgtggataatttcaaaactagcaagaaggatacaatgatgatccagcttcagcatttatcaattaatggtcaatcttgttttatctacttcttctctccctcattgcatttattttgaagtaaatccttgaaaaatcattttacttttaaatatttcaatgtgtgtcctaaaagataagggccctttaagaaacataaacacaataacattattctgtttaccattaacactaattttctaatattatcaaatattcagtgaatatttaaaatttcctaattgagtcataaattttatttgtttttttgcagtttattcaaatcaggatccaaaaaagtccatattttgcaattggttgatctgtcttaaatatttttgaatatgtagattgtccccctgtcagtttttccttgtaatttatgtattgaagaaattggttcctgtcctctacaccagtgcttcttaagatgccagtccacaaactcctgttactggtccatgatgagatgagaagccagggtgtaaatccaaaatatgtcactaagcacactatttagttcagctgatattttatttctagggagactttctcgatgaaggaagcagtgagatggtttagattctagcttaaactccttatctcaatatagactagtaacgtctagtttgtagaacagcactggccagtccttggaccacacatggctttcaccactggagagtttcttgcagtccagtgatgactgcattccagtggtatggtcctaccatgtttctcagtcccctgtatttgttgtgaattgctagttagagctagatgcttgattcaactcaattaacttttttttcaagaagactttataagtggtatgtgtccttccattaggagggacatcattactactagtctctctttttgtgttattagcattcattgataatcgttttctagatctattagggtggcagaatggggatattcaaattctgtcatttcctattgacttactaatgctgtaaagttttactcctagttttgaacttaggctcaatgcttcacagccagtaatgtttgcaatatgctgggtctgatttttcttatctgcgactttgttgtagaaaaattatttaatatctaacagtaaggataggctattatgagctatgaaattgtggaaaattcacacagaaggagcctggcatttgaaagggaagaaaataattctgcaaaggtccatttatcccatgatcttttgtgagtgtcaaggtggaagcactcaatgtgtttttattttaaagtaagggatttcaggcaagaaccttatgaaaagttggtaagattttggactatgagggtaataaagaagatatctgcagagattttaatattcagaagtgaatttttgtaccttcatttcggcattgctctctcaggaatgctcttttttttttttttcttcaagaaattggaacaagtacaaccttagtgattcaaatgaaagattctgaaaattactggtacacccagtcccctttggggaaaggaaggtagggacaagagctgccccaggagcacctccccgactgtttgtaggggatgatacgtgcgcatgtgcatgtgtgccaggcacatcacccgtgtgtttcatgtcagtgaaacatgtccgtcattctctaaggcctcatgtattcttacttgatagaaaactcctgggtgaaatgacaggcttttggaactgctttttcgtcagtgggtgctgctacagagatttggaagccctttaggtatgcgaggtggatgtatttctgtctgttttgacatcatcatcaccacttcagaagttgtcatgttgaaactttgtgctggcatttagcacctgctctgcttaattatagcttgaaacacaaatactgtgacatcttccctggagctggaagggtgctgagaggacagtgctggcatcactcacactgagagggaaatctttcgggttggatttcagggaagagctgtgctggccattggaatgaggacagtcaccactttctctgtgtaatggacaatatcccagcagcctctgaattaagtcacagagacgtgaaattggagggttttttttagaagatcatctggatcacccaggccttcgagcagctcattgtcttcctaagccgggtcagacagttgcctgcgtgtcctgatggttttgctttgagctacttttcaaaagacaagccacacccatgttgaagtgtgtgtactaacacattccaatgccagctctgagtaggttttgaattatccacatgttgaatctttcttgtgctctctacacatccactccctcaaacgttgagcatgttaagagctgactaatgtttttaccggagggtgcaggacagaatactcattctctgttgggaaatgcagaaactatttcagaaacagaagtgccaatctataggagtgaatgttcctaaaatgtgttctctttacattgttttcctttgctaatacacttccaaaacactgtcttatttatttattttgcaaacctagtaaaaaaatcagagcacaaaaaatgatgtacaaattagtttatacaaaaaagagaatacattctctttggagtatttatggaaacatctttctaatctctaatctaaaaatctttaacactaaccttggaatgttattaataaagtcttttggtttttaattagggatttatgacgtttccattgtgtagcctttgaaaaattacttcacttctcacattttcagtttcctcatctgagaatgagcacaccaatacattttcttgatagggtttgggggaagagtaaattttataaattaaagctctctaatagttgctaattattatttttattccactgaatgacttcatgtggactaaagtactgatttggttaaattcccttaaatttaaattagactatttttattaaaagttttccacatatctaaatgtttaaaaaataaatgcttacaactttgtttcaatttcaaaattaaaaaaaaaacttaagtttttgactgctaatattgtgaagtgttaatttcaatgaaataatctcagcaaactgcatgcttttacctaacttcctctgactttatagaaacttaaaatctgttagtgatttatttatttatttttgttcctgagcaacaatattgtccctgttttgatgggagggctagatagagaaatgttttaaagatccatggcctgttgactgctatgaaatatggtttgagctacaagatctctgaagcttttgtagctataaatgtttctaaatgatgcaactgaaacatggaagaatttcactctcgtactccatgtattccacttatgggtaattgttgttatgtgttagattttttccttttaattttctaaaatttaaaaaagtagatgaaatgatactgatttcttactagtaattatacttttcattttttttttttttttgagacagggtcttgctctgtcacccaggctggagtgcagtggcgtgattgcggctcactctagcctcaacctcctgggctcaagtgatcctcccactcagccttccaagtagctgggaagctacaggtgcatgccaccatcttggctaatttaaaaatttttttgaagatatagattctcgctatgttgcccaggctggatctttttttaaaagtttcttataaacatatccacctttttaaataaattaaatactcactactctgatagacttctcattaacttatgttgtcttagtggtaaatgaaactctaaactctcatttaccacttaagattcaagtattgtgttaggtgctgggattgtaaagataaatctgaacttgctatatttaaggaacttgcatacacacacaaaaaaaacgctggtaatttccagttttaggagaggtgaaattcttgaataattttggtatgagactaaagtcaccaaataggattcaaaacggacttgcttccttgcttcacgtgtaagccactcgtgctagaaatagctcactgaagtctatctgtgagccagtccaggatactgattttatgttatagttgctaatggggcgggatcttctggcctttaaaataaatcaggtgcatcgaggatgagaactctccaggttttaagtctctgattcatggacctgtggatgtcctgtattggccctgatggtctcatgcagggggtccagaagggtgtcaagcctgggctgggacggctctgactctggctgccctctcaggactgtgtggagttgcctgagtttaaggtgttcatttctcacagatcactgggcagcttactaagctgagacatggtgggtttgagtggccaagttttcctctggttgcctgccgtggaatgtgttttcccatagaaacaacattttaagttgtggtcaggttcccagaccagcccacaatagcctattcagctgataatgcagctgagagactgctatttgactggtctggagaccaaaccaccacctattaacattgtttctattggacaggccattccaagttctaaatactaatatagaaatgaaattttggagctctacctgtttgtcaattgggggctgacagcattcggaactcaagtatcaaatcaccctgcactctaggttcctgaaagacctcattctttctttctcctaagtctgaccccattggctgattttcctgtctcttcctggggctgccagtacattcagaagatattatctccctggacagagctcttggtttgagaatttctgggaagtggcaagaatcatggttttagtccccagttccttctgtgggtggtaaaggaattccacaagctccacccccggctccgcctctggccggcctctctctgtgcaggctcagaatcccctcaccacttgttttgtgttttcaatcatttctatgatttcgttcaccctttggaaaagtacagtgtggcttcaacttgaataaatggaatgaatatcccagtcaaagaaaagctcttgatagaccctgagctcactggtgaagtccaggggtttcagagtgctgggaagcagttctttacacaggcaacatgttctcatcgtgtcattggccatatcctctcagatgctccagaagcaaacatttgagataagctggattttctgtttggaagcaatgcttcctcatccttagatggtcaaatagttgaaacttcatgaagaaattcacctcttcccatgtatgggagcaacttttacccaaccaaccagacatgtgacgccagtaggccagatacagatgccctcccttggagaagtgatccagtacacactaggacagcaagttattcaaatcattgccttcagaactttgaggagtccattctggtggtgtaattttctaagcagacaagcagacttagtgttcttagtgctgcttaatccagagttccagaagcatgaagtgaagagtgctgacttgctgcacacatgatgtactttaaacatctgtgcctctggtcttcatggttcaattgtctagtttcctgtagagtgcatcccatggctttttgagcttcaaattctttttttttaaatatatacactccacctataaaagattccaataggatttaaattggctgtcagtctaaaaatgatgtcccagatccgaggaactgccttttcagctttctatttcctaattttcttaggctgtgcgtgtgtgtgtgtgtgtgtgtgtgtgtgtttgtgtctttgtgtgtgtgtatgtgagagagagaatgtgtgtgttggggaggagggtgcatgtgtacatgcccttgaagggggacgacatttttggaccataagttcttgggctattgcttttgatcaacacaaaatctccatgaaaagttgagggtacacagtgaatgaaactgttgatgcaacacctttgtgctgcttgtgctgtgagttactccactcagcagtgggaaaagccttcatccaagcagcacatccaaagagacctatcaaggtcactctatgaattttgtcatgattgtctgtaggaattggccgcatgaggctggctccatctatggccttgatcagttgcagcaatctgccataataaaatgcatgccaacttgtgagctgaaaaccttcacttagttgcttgtgggattttttttcttcttttgccaaagaaataaatagaatcaaatgtttacatatgtgtgttatttgtctacattgattttgtattttctcaaaggaaaatattgatttctgagttataaacatgggtaacttcactgatcagaataagttaatgacaggcatgtcagtgaaataatcaaggcacaaaaccaccatacatttctgtttaactgcctatgtagcctttcaaagacgtgttaaatagtcttcttttaaatagataaatttataagaaataattctatcgcacagattttaatgtcggtggcatattccatctggcttacttttggcactgaggagatgatattaatctttgctaattgtacttcgtactcactattgcctttagtcaatattatcttgtgtgcttctaaatagactccaggatagtctaggcataatagacattgtttctgtgcctgaagaacaatttattactctgggagtaaagggggtggtgggttgggcttcagggatgagatctagacatataattgttttaaatatataactacagtatagcctatgtaggtttttgaagatatgtctggaattgtgtttgtagtgtgaaagatggatggattcatcagggaacactaagggagatggaactacatattgaaatggaaagatggaagagctgatataaaaatggaggaagtgtctggttttagtgtgtgtcagagatagcagtgcgtgcatgagtgagggctgagacggtgaagaagaggagctgagtaggagggtggaagttgaaggtataggtaaagataagagttgacaggtagattaggcctacctggtagatatctgaacctaataatgagatgtttaacattatagagagtgaaggtccatctttgggctgtaggggaatagaaataagcacggtgaatatgaaaagatacttacccatattgtcctaatggagtagagagaaactaggaagccaggaaaaaagaacatgatattggtccaacaatgaaatcaccaggatttggacaagggatttgctaatggagttggagaatttaaggggaatttcatcagtgggatgaaataaaactagtgactccccttagcaaccgggaaacatcaagtcatagctcagatagtcctcttctgagcttaccatgcatgctgtggctaaaggcctttgttctggcctccctgagttccccaggcagaccttgatgttagtgctttgtctgttgtgtagataatctttgtgtatgtgcctgtgttcctagactgtaagatcctcaagagcaaagactgtgtgtcttagtcactttttaaatatagctgttttatttataattgcattgggacaggattattattattttaccttaaaataaacttttcactttagaacggttttagagtcacagaaaaattgagagagttgccatatactctggacactttactctgttgttagcatctcatactagcgtggtatattttttgtaattaatgaaccaatttttttcttttttttttttttgagacagagtctcgctctgtcacccaggctgaagtgcagtggcacaatctcggctcactgcaagctccgcctcccaggttcacaccattctcctgcctcagcctcccgagtagctgggactacaggcgcccgccaccacgcccggctaattttttttttttttttgtatttttagtagagacggggtttcactgtgttaggcaggatggtctcgatctcctgaccttgtgatccgcctgcctcagcctccgaaagtactgggattacaggcgtgagccatcgtgcccaaccaatgaaccaatattgatatgtagttagtgattaaagtctattccttattcaaatgttctgagtttttacttaatgtcctttttatgttcagaatcccatctaggataccacactgcatttagtagtcatgttttcttagacttgacttagctgtcacagttctcagactttccttgttttaatgaccttgacagtttttagaagggctggtcagatattttgtagaatggcccttagtggaattatttgatgtttttgtcatgattacattgaaattatgggtttttgggaaaaagaccacagaggtaaagttccatttttatcacataatattaagggtttatagtatcaacatgattttccattgttgctgtaacccttcattgcctggctgagataggatttgtcaggattttccacttcctccccctccctttatactgtactctttggaagacagtcagtatgtgtagctcacatgtaaggagtggggagttatgcttcatctttttgaaggcagagcatctacaaaattatttgaaagtcggaagcacaagagatttgtcttttctctcccatttatttcttcaatcatttatttatcagtatggacttatggatatttattttttacttggtattgtaatccaatgctgcttttgttattttgttgctccaaaagggttctagctttggccatttacacttccttcatttggcttctgtgtcccttgccatgctcccctcagtgtggatgtttgtttagcacttccttatactttctgtcactgcaagatgctacagattcagcttgtctatttcctgcccagccctagaatcatctcccaggagccctgattccttttattgaataatagtattagcaaccaagatctaggcattaggtgtgctcttcttggtcagttttatttcttatctaacacagtgcctagcacataataggctctcattaaatattgctgaacagccagcagtaatggaatgttgagtaactgatggtacaaatgactcaataaaatattatgtatctatcaaaaatgatcattagatttatacaataacataagtgaaaaagtaacaaaaaatgaagattgtaataacactcatgcaaaacaagcagagactcgtgcaaaaaatgctaacatggggagctagatttgaattttggctccccagtttattaacatatgaatttagatggattaatctctatggcccagcttcctcacattaattataatgcaacagtaatgataaaagtaataacttatttcatagaagtattgtggggaggtaaatgagtgctgtgactgaaataggataagcactcaatagatatgattaatatagtgattattgtgaggctgatggaactatggtgttttgtctttgtttcccaaaccctcaatgatgtgtaacattacatacatcgtcatctcttcatctctcttcccagtcttctgtaaggaatatctggagctggatcattccagccatgatagtctcactctcccttcctaagaattcccatagtgcttcctatttgaaatgattgctcagcaatgtttttatgttgtctggggttcatcactaccctttgtacatacatgctcctccagtcccccgaccatggctctcaggaaaggggcagcttgagtccctctcatgagcccttcagcgcacaaccaaatgtatctcaataggttaatttaatttttaaaacatgttgatttggcattcatataggtcgaagcatgtagagtatccagacttcaataaatgttagttcttctcctgtttttttttttttaacttttattttaggttcaggggtacatgtgcaggtttgttatacaggtaaactcgtgtcatgattgtttgaggtacaaattatttcagtttgtttcttaatcatattttatttccatagtcacaaaaaaacaagaaacttaaaaaaaacctttgggttggtaaaaaaaaaaaattgttgaacagctttgtgcttgtgggcaaggtgaatagtcctgatgtatccggttgtggacctggcagtgaacttactggctacacaggaagaggagctattgatcttggataaattgagtttgagatggtaacaaaacatttaattctaaatgccctgaaaacaggaactgaagagagaagaaaagagacagagtggaagaaaggcagataggaaaggggagatgaggaagggagggagagaaggagggagagagaaacagatggaccatggcttgggaggaaaacgtaatagagtcaccaatctactggtgatggagaaggcaagaaggggataaagctcttgaaaaccagaataaatctattattcattctgttccttttcagattactttcatctaaaaaataaaaaaaaatcccaaactgcacaaagtaagttagagtggttggctggcttgcatcctcaaaggaggaagccagaattgcccgtgtcccaagcagtgtcaactcagacaatccagaaaagagtctttgggtctacagcagtggtctccaaccttttcggtatcagggactggtttcgtggaacataacttttccacggaccaagggtgctgggggatggggggatggtttcaggatgattcaagctcattacatttattgtgcactttatttctattattattacattgtaatatattatgagataattatacaactcaccgtaatgtagaatcagtgggagccttgagcttgttttcctgcgactagaggatcccatctggtggtgataggagacagtgacagatcatcagtcattagattctcataaggagtgggcaacctagatccctcccacacgcagttcacaatcaggtttgtgcttctatgagaatctaatgctgtccctgatctgacaggaggtggagttcaggtggtaatgagagtgatgggagcagctgtaaatacagaggaagcttcacttgcttgcctgccacttaccccctgctgtgtggcccagttcctaacaggacatggaccgttactggtctgtggcccaggggttggggaccccagtctagagagtcaagctgaagcttagggaggtcatggaagctgttctcattaccagggtttgaagttttgttacccaggttgcattgtgactggcagatggactgtaacagtcacatgaggtattcacatcactactgggagacttgacctctgacttcagtgaagagggccagaataaaggcactaaaataaagagggggaatatttgaaaggttcgttagaatagtatgggccccttcatcagacagtactcatgatgttttttctttttttatcttgataagaaaattgtcaaagagcaaataaaatcatgatgtgtagttcacaatacaggcagctcatttatgtattgtaattgtttcatgatctatcacattttttatagtggaagttattttaaccttggaacagtaggatgttaagatattaacatgggacacattacatgggaagttgggtgtcctttgttgtgtgagggcatgtaccttttgatcccctccagatttatacttaaggggctaaatcatagtttttttccttaaaggttaaaaaaaaaagcagttaatggagcagggtcagtctcattagcccttacctagtacttgttctccttgcccaagagtttaatcactaacaaatatgttgagaaactaacatatatgaaataagagcctcctgaccttgtttttattaccttaaccttttctgaaaaggagtttgcactttgcataggaaacagaaaggctatcttgctgtaagaggccaaattgcagaagtgggctttggctaaggaatgtggacacactgcagacatcttgcacagaggccaagtcttgcaatgatgtggtcagacgtggtagaggccagctgtttgctccgttgagagaggcttttgccagtccacaggctctctgagggctatgtttaactgaatccaagtatcaaacctgctgagactcactcatcccccagggtgtttggagttgggttcttacagagcacaatattgaaagtaactggtaagagaagttacagataaagacttagctattttaaaaaaatgtaacatacagtggtgaagtggaatataaatgtattttccctctttcccctataaactattggaatacaggtaaaaacagtttatgctggctgggcacggtggctcacacctttaatcccagcactttgggaggcagaggcgggcggatcacgaggtcaggagttcgagaccagcctggccaatatggtgaaaccccgtctctactaaaaatacaaaaattagctgggtgtagtggtgtgtgcctgtagccccagctactcaggaggctgaggcagaaaaatctatcgaacccgggaggcggaggttgaggtgagccgagatcgcactgttgcactccagcctgggcgacagagcgagactccatctcaaaaaaaacaaaaaagcaaaaaaaaacccccaaaacagtttatgctgtgctttatccttggtctattgatggacattctgtgatttgtgttacttatgtcaccatgaatactactggatgaaatatcatcttgtcctctaagtacacttttgacttaacataaggttaggagagcgtactctagaatcaggaggcttcttgagttcaaatctccattagacacgtctaagctatgtgaccttggccaggttgtttgaccttcttaagccatagttttttttttagtgttaaacattataacaataaaaattacctcaaagagttgttattaggatgaaataaaataatatatctttagcacttagcaaaaagttatttcccctttgaattttaattttttaaaatttgttgaatgttattgctacttgcacagagctttaaatccgactttgtgtgtgtgtgttggagtgatgggggttgatggggatggctcatgaagtgaaaagagaaagaggtatggatgctatactttcattgacccgaaagagtaactttattaaagatttaccttccttgtacaagcattttgtattgaaaccttataactaaatcttttattatggaaataatccagcatgtctcatttagagtttacatattttggttctttccagcttcaataagacattcatttatttccagaattagagctgttttttttctgtgtataagtaaaacaaatgtcatgcagcttgtttgaacgagttctaatagtttgcagtttctcaagaccaaaagcagcagaggagaaatcttacatgtttcaaatactttgcgttgagccataccacatagcatttagaatgatttaagaatgaatggcaacacaattaaaacaatcattgtcatttgaaggtattggttgaaacagctgaaattaaataacatgttacttgttaatgataaagttttaaaactcatagaaagtcagaggatgcaaataaaataagtccaacccaaaattataaagaaccttaagaaatacagtgaaatgaaaatgtgatgcactaatgaaagggaatggtgaatgaataaaacaagaagtattctgtttcaaagataagacgttcatacttcgaaagtctagttattgctttaagtgaaagacgatggaaatagaagagcgtatattttaaaatgaacagttgtggatgaatattagataagaaagcaagagaactctctctctgcttccccgggttctcatctcttaaggtaactaggttgaaacatttctgttttttgttcttctcatgtaacaccatctaccatgtttgtacctctgtatctagatttaaacagtacccactggtttcttgctttgaaagatggggacttagctcactaaagtatctgtaccctctttctctcttcttcttcacaactttaaaatatagttttagtataacttttatgtattggttattttaaaacacagtgtaatatatataagactctgtttctaggatcagctgctttattgactgccacacctttcctcccaaattgtttcccgagttatgtcatctgtcccattacttttactcttgtgaaggtttacaacatttacattttcttttgtaactatagtaaattgtaaaatcttccatgttttggctgtagattgattctaaacattaaaaaaagaatgtttatattaccatgctttttcaaattccttggaaaatctttagaatattttgctttgtaggactgaaattgttattctggatcctttgtttctgagcttcttcatcttgtgtatgtgttatgacatacatatttttgtcagacactatgactgtgacatattatgtcagacaatgtatgattgtagtaaaaaaaaaaaataaaaccttgttatgtcaaccacagggcaccctgcaaaggctcaggagtgctctgacactattccaggatttggtagggattggactatctccagcggagctgttctaatgggctgttgctggagaaggtttgaggtggttgactttggcctggattgtcatttcaaattgagagaacttttataataaaagtttggaaggtttgtgcgttcccctctaccccagctgtctaccctcacttcctctctcattttcctttccgagaatttgaatttccccaggaacttctggacactctgaagtttcaggcattactttgtcatggagggacaaagggttgagagcctttgacttaaaattctccataacatctttcttcctttattccttgtgtttccactggctgagtaacctgggtcagaagatgattccatcaggatgataatgctgcattgcattttcatcatctttttcatatatgaagctttcatgtccattatttgacatatatacacacaagggagacatttcattgtgccattgtacacagaaatatactgagctcacacaggctctaacatcatgcacatatttcacctctatccaatcatttcctctctatccttagagaaggcctgggctgctgggtatggagttagggccctttccttggctcctccagctttcttcctaaatccctttctgacctcagcatctgtcagtgtgaagcatgtgtggtgccctgcagggtgttccagattttctggagcaacaaaaggggtaaaggacatagcaaagaccttatgttggttcccaaacctgcatgatgttgaagtagtgagttcagaggaaatgtgggaggactctgtactgtttcacgtggtctacatatacaaagagaatgtgggagtgcaccctaactgaaaatacattttagctatacagttgtttttaaaggtttatgcttttgggtttacagtgtttataccagtaagctttggaattgctcctagtttgtgaaattgattgcaaaacatttgaccttccttattagcccctgatcgctagcagctagcatcaatgcttaggccctcaggatacggcaaagtaaaactaatggttgcttctaggtctctgtgtattatagtctctgtcctagtttccagtgtagaagtcattggatccttacttagttgctccctgaaattgttaaatgtggatcatctggattctgaatggagtttctactccaagacatgtgatgaactgtctgtaaacaagaaacccagagtgacactgattttattttcttgtaactgctgttatcaagtgtgtttccaaactttttgtttttggagacagagtctcactctgtcgcccaggctggagtgcagtggtgcgatgtcagctcactgcagcctctgcctcccagattcaagcgattctcgtgcctcagccccccaagtagctgggactacaggtgcgtgccaccatgccaagctaatttttgtatttttggtagagatggggtttcaccatgttggccaggctggtcttgaattcattacctcaagtgacctgcccacctcggcttcccaaagtgctgggattacaggcgtgagccaccgcgcctggcctgtttccaaacttttgctaaagaaatatttacatgttttggcctttatttttttctgactcatgtcagagtttgcgttcctgtaattttagtgaaagggagaatatgtaaaattatagaggtgagatgggccgtaggaaaatatatatatatatatggcttcaaagtgtagaaatgtgaagtcttatgtgcattagattttattacaaactttcttaaccatattggtaagaaatttattgtttaagtttattgtctaatttaagacttgtatggcttcatgaattgtgacagaatgtgctacattttgtatctctggtttttatttccctgatgggccatatgcataggtgatattaagggatgtccctgttgatatcactatgttagtgtcccaagctaccaacccagcattgagtctcatgagtttgctttatctgtctgccaggattcatcttgcttttataactcaggaattttttttccttttatttggccatctcttcctcttcttcttttttttaaagtatggaattcttctgtttttgttttagacccaatgtctgtggatcacgttataatgcttactgttgccctggatggaaaaccttacctggcggaaatcagtgtattgtccgtaagtaaatagaaaacttgtcattctgcatgtccttcttttgttgtgttggttgcatggggagccttagaatgtggccttttgtaactgtactattaatctgttgatagtacagccttccagctttaagacttttctacctttccagtttgggaaatacatcaacttggtcaaaccctgtcaaagtttagtcacggggatactttgcttgaggttgtgtcatttacatatgttgtgcctggctacacagactatctaattactttgatgggagtttgaatgaaagggtattattgctgcttttcttattgtaatttctaactttgttggccactcacgggccttaccaaaccctgtacattgaatttgggtgattgagggaccaagagcagacctgactcttagacagaggggaaaggaaggagatagatcaccagacgaagatcagtggaaagactaagaaagatctcaaatgataacagaggttcctctattgatttctgctggcaaggcaaacttccagatttccccaatatcccacaaatgttgagtgacaaatcgcatgccagacaaggtgttctttaatggagacaccaaagtcaaatttagtcatgatgcctgcccttcatgagcttttacagttgttgtacctatgaaataatgtccagttttcagaaaactccagtagtataatggggaaatttagagctgaagggacattaagaatcacttagttcaccttctcacttggctgacagtggtcaatggagtattcaatagactatattggccaatatttgcttcatgacctgaaaaagtttaactgtttctcaattcttgattttgaccagaaagcatctcctttatttggcacattatggtctaagaccaaaattggatcactaaaagagaaatataatggtatttggatttttctcaatgaactttataatagaaccctttcttagccttctgtagagttctctgagaaatgatgtctccagatatttaaataaatgtttactggatctttgacagtttgtttcttagtcgtttccagtttccatcctaaactctttggatgtttgaatgcactttctatcaagtgtactcttttagccttgcatatcatgtttgcacttgcaagattgtgcaggagcttgaggaaaagatcatgcctgtcatgacgaaaagtagtgaccaagtgctagtctgccgataaatataaatcatatgccatttaaacttactgttgtgaccactagcagagcatttggtaccagcatgatattagtctctgggtggtatgcaaatgttagtatttctctaaaggatgaatggcttcctgactgtagaatcagtactctagcagtagattccagcattcttctctcagactgttgatggaattcagaacaggataaaaattaaacattaaacatttacaataggctggacgcggtggtttacgcctgtaatcccagcactttgagaggccgaggcaggcggatcacaaggtcaggagattgagactgtcctggctaacacagtgaaaccctgtctctactaaaaatacaaaaaattagctgggcatggtggcacatgcctgtagtcccagctactcgggaggctgaggcaggagaatggcatgaacctgggagacggagcttgcagtgagcagagattgcgccactgcactccagcctgggtgacagagcgagactccatctcaaaaaacaaagcaaaacaaaataaatttacaataaaattggctcccaagagtaataatgtaatttttatatcattaaatcttagagttaatataataatatatttcttgtgatcatataaatatgtttagatgcaggatttaatttgtttgtttggttttctcttcatagcctgtcctgggcttctgatggattgagtgctgtggactaagcaaagagaggttgagaaccaccgtgactggataaaggagttgtggattttaaagccagagtttatttagttcaatagacttgttttgaaaatgagtacacctgaggcttaaggtcatataagtcatgatagcaaagtttgtgagggacctgagaacccaggtttcctcatttgaggattggtcccctataacaaatcgtgttccaaatccatgtgctaacagacctctggtttattcacagccatttgccggcattcctgtggggatggattttgttcgaggccaaatatgtgcacttgcccatctggtcagatagctccttcctgtggctccagatccagtaagtctaacatgtcattatatataatattattttatgtggttataccccattttctcctaaatttgattttggctttcctctttcctgcaatacattttttcactagaacatctgccttctctgttctgcccaaaatacttggaaaggctttccttcatctggcctctcatttcccttctttactctttataggaaaattacctatggggcatagttactatgaatagtataaagcttatggccttttatgtaggtatcgccttattcatctttgtatctccagtgtaaacaccataaaaggtgctcaatgaaatggttgtttaatggacatttttggctcaagaaatctaggcatgcttccttgtggtactgaaatatgaatctgattaaaaacttatttaagactcaagacccctgctttacaagaagaaaatgtaagaagtcattatggaagtttctgggggtgatttataatgaagcataaacatatttttcctttcagaatgttgccactttctgtgatgccagatgaatatccacagttcattcttcagaaccttttcttgcttgttctgttgtttttcttttgggggtttgggcaagtgagtcataattggttgtttaaaaagctgaagttcttgtttgtataaacagcccctcaaaactttgaccgtccccatggcaaaaaacgtaggtcccttttccgtttctttttgtcctgtaagaaaatgcaccccccttattgtgtgtcctattttgacaaagttttaaagaaaaacattgtggaataagtgcattctcttttgtttactgcaagtagagacttcactgtgtcaaggctcattacctgttaagagtctgaacatttgagtgtgtctctcacaagccaattaacaggttagggcaaattgtcctgtgtagcactcctggtgccctcttgcctcccttggcttcatggatgaacacgggggactcttcctgagagctttgtatacttttctggccagagagcatgccaggtctgcatgcagggcaagctggaagtgctgggggttagtggacctggaagcagacttttaaccaacaacagatggagagtggttggataagtgcctcagcttccttgcctctcagtttggataaccatgaggttcactctgcactgtctcctgaagttccccagtgggaccgagccctcgctgttcacagtgataatagatttgataatgtactttattagcttccttctctttttgtctcactttcccactctcctatgagtgtttcctagaattactttcagaacaaactacttccatttaaattattgtctcagaatctgcttctggtggagcccacacagtaacagccaccttttactaaatacagccagttacaattgggatagaaattgccctatgggctgggactcttgcttattgcactgaatgtgtagcatagttttccttgatctcagcttggtgtcagacatgcatcttccgagtaatagcaggttcattctacgtagcaagagcccctgaactggaggaatagaacgaggcagagaagccagctggcagcacatctgggaacatgcgggacatctccgtctctataagggtgacttccaggctgccgctgaagcataagcatctcagggttggaaaagaagtgcagttataaagttgggaatagaccccatctctcagattggtccctgaaccaactaacaacattgcactcctctgggggaagaaatatagccagatggcaaaactgggtattaagttgggaaggtcttcaatgataatgtgaactgataatgacttctctatcgagtagaaatcatgagatgtggagacaggatgttaacaagaccagagggaaaagccatggtcctggtagaatccaagttaactgtggggtgtgacgagtatagtagtaaggtcctggggccagatttagtctagagactaaaatccaagactgtgggtggtgctttctgaggaagtctgagtcatatctatggtacctggacgttagacaaagtccccaagtagcttgtggatgagagtagtgtaaggaggaggttctggtttcatcaggatctttggggttacttgaaatctttaaaattgttggctttgattctctctgcactaatattgtctaaatggcttgcaaaattaaagatggcaaaatattttaaattaaggatagctggggatgatcagaattcatttctcatcttttggagtgatgttctagggaacagctgtgccattccacagaacatcctgatcactttgctaactttcctgctaatagaaggacaattctactcagtgaaatgtttgcattcactacatgtggttctactaaaaaggatcaatttagatcactgaacgaatttttcctctgaaaaattttatactttttatatgatagggatcaaggaggtctaggcaagtcgtgggacctcagagaggcttagttttcccacttgaatatgaacagaatggaagaagtgttgttctttcaggtggtttttgacttgagtgtcctgtgactctgagaatagaaaatgatctcttagtgacctgaatgagagattgcatttccagaaggttcaaagtaccagccagtgattctcttggacaacaggaagttgtggcttcccttggtgctggtggaactctcgacactcgtcattcagcaccagggcaaaaagaatgattggctagacagcgtcaaaacagtagtttttctagactttaattccagccctctttaggactgttctttgctatgtcagtctctgagggtacagatggattttgagcaatcctaattgtcataaagacctatcatggtttactgatgtatgaatttactcattgttctaatatgtgtatacacacattcaaatatatattagcttgtaacactgggattaataaactctataactttacatatatatttgtcagtttgggcttctataacaaaatactgtagactgggtcatttataaacaataaaaatgtatttttttacagttctagaggctgggaagtccaagatcaagaggccagcagattacatgtctggtgaaggccttctcctcctagatggtgctttctgtgtgtcctcacatggcagaagggacaaacaggtctcccaggccttttttttttataaggatactaatcctttcatgagggctctgcctgcataacttaatcacctccccaaaggccccactgctccatactctcccattagggactaagtttcaacatatgaattttgtggggacacaaacatttagacaataatatatatatatatatatatgtatatgtatgtgtatatatataattgtctaattatatatataattatatatgatacatgataaaagttgtttcctatagtttatattttgtaattttgtattttctattttgtaattcctacagtttatattttgtaattttgaaatcttctcattctgttttactctttacactttaagaatgctaaaaattaaacttcatattctgagataattgtagatttacaaacagttgccttagtctgttttctgctgctataacagtataccacagactggataacttataaacaacaaaagtttatttggctcgtggttctggaggctgggaagtccagagcatggcaccaatgtctatagagggccatcccatggtggaaggcatcacatggggagcaagtatgagagacagacagaaaatggggctgaactcccgagatgaccaacccactcctgagataatggcataaatccatttatgagggcaaagccctcatgaccttatcacgtcttaaaggttccacctcttaataccatcacaatgataattaaatttcaacatgagttttggaaggaacattccaaccatggcagttgtaagaaatcagaaatatcctgggtattctttatttagttttccccattgtgacatcttgcaagactatagtacaagagcagaaccaggatatcacaaaatcaatacagttaagatgcagaacatttccatcaccacaaagagcgctgatgttacccttttattgtcattttcttcccgacataattctctctttaattctgacaaccactaatctgttctacatttctataattttttcatttcacaaatgttatataaatggaatcacagaatatgtaaccttttggaagtggcttttttcactcatcagaattctctggagagtcatctaggttgttgcagtatgaacagcttgttatcttttattgctgagtagtagtacatgctatggatgtaccacaagtttgtttggccattcacctattgaagggcatctgagttgtcatcagtttttttttctttattatttgaactaagctgctatgaacatttgtgtacaagtttgtggtgtgaacacaaatcttatgttctctgggataaatacacagaaatgcaatttctaagttgtatgatagtttcatgtttagcattttaagaactgtcaaactgtttttggagtcgccgtatgtaccattttgcattctcaccagcagtgtatgaatgacccagtttctctgcatccttaccagcttttggtgttgtctttattttttattttagctattctgattgctgtgtagtcatctcttactgtggtttcaatttgcatttccctattggatagtgatgtcaaacatctttttatgtgcttattgccacctgtatatctttttcagtgaaaggtctctttatatcttttgtccagattcttatttttcattaaaataatttttttagacggggtcttactctgtcacccaggttggagtacagtggtgcgatctcagctcactgcaacctccgtctcccaggctcaagttatcctcccacctcagcctcttgagtagctgggactacaggggcacaccaccatgccccactaagttttttgtatttttggtagagacagggttttgccatgctgcccaggctggtcttgaactcctgagctcaagcaatctgcatgccttgggctcccaaagtgttgggattacaggcatgagccactgtgcctggcctcttttgcccagatgctaattgaattgtttgttatttcattgttgagttttgagaattctttgtatactctaaatactagctgtttatcagatatgttatttgcaggcattttatcacactctgtagcttgctttttaatatttttaatgggatctttcatagagcaaatgttttcaaatttgagtaagtctaacttatcagttttccctttactggatcatgctttcattgtcaagtctaggaatgctttgtctactcctagattctgaagattttctccaacttttttctgatggtttcatagttttatttttatttacttattctttgagacagggtcttgctctgccacccagatgggtaggcagatcttccccactttatcctttttttgttttagctattctagttcttttctgtaaaaactgtagattaatcttgtctatatttacaaaaccttttaggattttgataggaattgcatcaaacctgtatatcaatttggggccctttacacttttcaaaccccttatagtttgatcacattttctcatttaatttacttcaattcaatgagagtgtcagcaggaccagtcgcagacaaaacctctcggacaccggttttaggaaggggctttaatcagctgggagcaagagtttggggcatttgtactcccaatgcaaatctgagctctaagggtgtaagaaggccagcagaacaattctagaccagtgtgttagcaagtttgagggagtatggtgcaaccatcctgaaagtgtggggacattcagaggaagggaaggtggtgctttagccagtctggaagaagtcctccttgaaaaagcttttcagggaagtgtgggatttatatggactgggaggagaagcatgcatggaatctactcagacttgtccttagaaatggttgaactctttgctttctactccaccctttatggaagcacctttatcactactgtcatttaacttgtccttctctacagcttttccagcttggctagattttgtttgtttatttgtttgtttgagaattttagtgaagtttctcttccaagctgtgtgtctttaggcatccccagacatctgttcacttaagggaaatgccattgctgttatccctctaaatgaaaattgtttttatcctgcagtgactctgattgtccctgtggactcttgtctcaggtgtagagtccagaagttagtctagctgtttaatttgtctgtctgtgcttttcctagtacctaaattaaaatcacatgttcgtcatacaaatgcttatgtgcaaattgctcccagtgttcttcctgccagttgtgcctgccaagatgatggcaggtctttagaatcattccaaacctaatgcatcccaaagaaaatcattacctgaggtattgagatccaggtgccagccctgcctctctctcattcccatagcgtgctcacattgttcttttctgatgaatcatttaagaactaatctgtgctgggctgtaatctaaagaaaatttcttctgctctttctggccaatgctgccaaatgaaagacgttcagtaagtcactgttgaatgactgaaatgactgactgacatctgatatgaacacaaaattaatttgggatcttttatggatatggggagatggcaacattttctgttagctctgggttattgagccttacatgaaaccctttacggctgtctgctcgtcttcaagggcaggtcctcactgggaccctaggacactcagggttcactgcatatggctggatctgtgcactttgattcccctagtgttttcaatttctagtaaaatcttaacacagattgagtttaggaatatcttctgacttggggtacttagtgcatccagtaaagaatacagcatcattatgggtgtaggaggaacccctaggtttcagttggcttttttaagagacgtagaacttggtctcctaattatgatacatctagaattcttgttcaaatcagtataaatttagaatatgcatcaatggcaggactgaatccaaaataaaaccaatttcggtatatattctctgtaaactatttcctgcgtgtacagtgaaactacgtatctagttctttcacttccccacagaaatcctgagcgactgctcccacctttatcggaatgctttattccccactaaagatctaagactcacaacgaatacagtttcccatggttaacacggtggcaaagcaagtgattcagagcctattacctgtgctgagcctgcctcctcctggcttcccccaaggattcatgcatatggttccttgatgtcttcttgtttcacaagtctgaatgagtgcttttattttttaaagaaagaatattttatgctggaaaaggtttgcctgaaagacagggtaaaaaatatatatcagggagattttttattatattgcatttaattgtaaacttaccattcttgccagaaagaagaattcattctgattttcaacttgaacaaataatgtaaagtcactaaactactgttagcttttttatctcaaagtagttaaatggctttgttgctcatgtgggaatggaaattagctcttggcatgaactgctttaattgaaatcagtttgaaggctgagttcctatgctgcttgacagatgacatcatttcctgtgcttttcccaatcctcactgtttttctaagataggatgaagctaagtttaacttcaaatttaaagcaactatacaccttttcatgacctacttagaatattattcaaagttttcactaaatcattttttttctttgtatacgtatagacagatttttagttaaaaaagcatcttggctgagatgttttaacggaatcataagagcctaaaataactgcaatcagtttccggggttgcttgatttcattactccaacaaaggagttatttctgcattcatacatggggaaacaaagataaaaatatttttaatagcaacctacttagtagggctgtataagtgcctcggacacaatggacaacttctaagtctcagtttggtctttgggcatggcttttgatgtcatcatcaggcagcatgagttaagtaaataaaaattaatttagcacagttttatacagcacttacatataaagcaaggtgctactctaggcacttaagaggtattgcataattaatgctctcccactccccactctgaagaagtttttaaacaaatgagatggggcaaaataagtaaaaataggctggattatataatatatgcttcaaaagagaaatatgaagtaattggaaaggagagagggctcacatttggtttgggagatatcagaaaagattagcggaaggaagcaatatttgaaatgggttttggagatagataggatttcaggtttgggggagaactgtgtgtgtgttgtgttggggtttaggagttaggggcaaggagacaaagaggcaggtaagagagagggttctacagagggactaggacaaggaaagtgccgggtgttttgcatggcacatagtaggcactcagaaatgttcattgagtgaatgaatgactgataagtagatcaggggatggagtcataggacatagtgggcatgtgccaaggagcctcgaaagatacctggggccatgctgaggggaccgtgaatgtggagagatggaggtggctctagttcagtagaaacaggcctttgatggtgtttcagtgtgtggcatgttgttgaaaaggcatttaactttcaactcaacctaacttctttgtgctgtaaaaggaagggtatagaagatagtgggttctgcactttccttccctgttggcaggctgagatttgtgtagctccttataaaaattgtccctttctcctgaagtcaagtagccacttttcaataccgtggctgaggattcctaacaaggggtaatggacagggtggctgttgggaggaatcttctatttgctctgaagagaagatttggcccctgtgcttcaggaagagtgagcataaacagcagatttctgcttttgtgtagaaagaagatattctcttctccttagctaaaattatcgaaccttcttctctgagaatttacttccacaacttggaggaccagacagaataagccaaacctccaaagcccaatcctggcctccatgtgtaggcaggtatcaacaaggattagtggttaattcaatcaagctttggactaggaaatagcctaggattttgaaagtgctattagcattcctaaattactgacctagagatagcctgaacactggagaaatgagagcacttgcctgcgctgttgtcattgctcactatgagcccgtggctgtcttttactccagcttctctgagtgtctcattgtctggggtctaaggctgtcagcccatggtctttctaccctgggccccgaaatgaacacttctgtaggtgaaaatgaggatcttatttagtttgaggttacagtttaaacaagcagctctttctcaggcaaatccagctgtccctgtcgtcaggcagtgttgttattaaatgtctttgtaggtattttcttttttctctattctgcctctaaaatttcttttaacaaaattctttggaatttgctactcttaactgttcccctgtgccatctacctgggattctaaatcttttcacgggaaaattattgccatcataatcttgtctcatatggttactcaaggcaatactttcttgttggtataaattacagaaatgacattgagttgtaatttctgttaaattaaagaagtcatttagcactattaaagtgaatgccagagaaacaattgcattgcatggtaaatgatttttttttctttctttcgctcgctctgtcactcaggctggagtacagtggtgcgatctccgctcactacaacctctgcccccccaggttcaagcgattctcttgcctcagcctccggagtggctgggattacaggcatgcgccattacgcctggctaatttttgtatttttagtagggacggggttccaccatgttggccaggctggtctcaaactcctgacctcaggtgatccgcctaccttggcctcccaaagtgttgggattacaggcatgagccactgcgcctagccggtaaatgattttacacacacaaataatatgtttagcattctcaattaggtcattatcaggtaaaaatagatgaatcctgataagctatttgattttctcttcaaataactacaaatcaactcctgtgagctgttgcaatctatgcatttaagttgcaaaagtgaattcttcttcttttttttcaagtacaacactgcaatattcgctgtatgaatggaggtagctgcagtgacgatcactgtctatgccagaaaggatacatagggactcactgtggacaacgtaagtacactgtagttataagtattctagatgttaacctgtttgtagacaagtagaataaagagataagtgctgatggattttcttcgattacctgggacacagcatgtttacaagtgtccagtgacctttacagatgaacaaatcacttactcaaaaaacttaacaccaaatttccaattggaaccttgattggttacaggttgtttgattcattttcctctcatttaccttcaccaccttgcttgcctgatctccttgatttctagtcaccaccaaaggagcagaattcttgttcattccagacacataccttccacccacttgctgaacttcaacacttggattttcaggaagcatctcaaataaagtatttcaaaactcagcctcatcattctctctaaacatgtcctttatcttgattggtggtatctgcatccctctcatttcctaatctagattctgctaccgaagtacttatcacatggtgttcagtttgaaggttcatttgcacacaccatttattgtatctactttctaccagtccctgtgctttgcagaagacgaacattctttttaaaaaccttgttttttttttttgttactttaagatgagcatatataccctacagaaaatttggaaaagtttaaaaatacaaaaagtaaaattattcgtgatttcatcattccagatagtatcttctagacttgtaatgcatatttggtacatgagttcttactgtatatatagtttttgtaccactttttcacttaatactttattcaaagtatgctcattacacattttaaaatacattttaatggttgcctagtactctattacctggatgtttgactgtttatttaatgaatcctcaatggtgggcgttattcagggcgtttctaatttttgcttttgtgtatatatttattaggattaataatgttattataaataaacaaaaatgtagagaatgccctagtgaccatctgtgttagtctgttttcatgctgctgataaagacatacccaagactggccaatttataaaagaaagaggtttattggacttacagttccacatggctggggaggcttcataatcatggtggaaggcagggagcaacaagtcacgtcttacatggatggcagcaggcagaaagagcttgtgcaggaaaactcccccttatgataaccatcagatcttgtgagacttactgttatgggaacagcatgggaaagagacctgcccccatgattcaattacttcccacctcccacaacatatgagaattcaagatgagatttgggtggtgacacagccaaactgtatcaccatccacacactgcagtgggagaagaatattggttgagttttgtgtagcccagcctggagagaggagaggcagcctccgcagtgtgggtgatccttgggctgagtcttgagggatgggtaggagcttacctgtcaggtgatggggaatggacctttttgggcagatggtagagcatgaccaaagcaccagcacaagacacagcaagggatgtgggacatagcaagtgctttggtgttgctagagcttaaatgcagaggagagtgaggggaaaggaagtaaggtcagataggatgtcatgggccaggttttgatgcctttatacatactatgttttcttccaaagtagggctaggaaagaagagtgagaccacaacaataaacaacactaacaacatcaataacctacatcttttcagttactctgtgcttactgtgtgctaggcacattttagaactctatgtgtgttaactcatttaatatgacaacaactctttgtattagaggacataaatgttaccctctggcagatgagggaactggaacacagggacctcagtagttcctctaagggtatatagatggtaatcggcagagttggggttggaacccaagcagtctgactccatagcccatgtgtttactcttgtgaaataccaaccttattacccttcacttacgaaggtttacagtgagaaagatcacagtgtggaagcgcaactggaggaggacaaaacaggagcaggaagacaagtcctaactaaggctatggctgtggagatggcgagatggggctggatcccaaggcattccaggagaatcaggaggggctgctgggcatctcttctgctccccttggtgctccctgagggagtttagcccaatgcccaacacacaagtgcttaattaacactggcagaattagaaaacttttcctaaacttcagcttcctcatctgtaatctgggagggttggcttaggcaagctcaaaatttcttttctgtttagaagctcttcattctccctgactataaatcaagaggcaaagaagacaattaatttacataaacctctctggttatatgatgagtaatggcctcctgccataatttttggttaaaaagggttgtgtcagttcaggtcctcttatgccaagaaaatatcaagacagaattagacataaaagagaatttattggggaaaagacccgtgaagaataaaggaaagaggaagcagaagtaggagggaatggtcttcagaccatgatgcctgtctgatcctgtgcaaggagggagggaaggaaggacaattgcatagaaggaacttcagcctgtagtgcagctccaaaaagccatagccaggttgatggagaacccagggcaaaaagtgcccatcaaagagttccatgatgggtggaaatagccaggctttagtatcctaatgctgtgtttagtcattggctgtgagcctgcccttgacatgaacattgcagcagatctgaaggtacagcagctggaagtggtctgccagctaaacttgcaggagattctcttgagggaaagtatgagtggctcaacttcatggctgctatagggtaatgtatggaaaaatgtatagaaaatatataaggagcaaggaatttgaatggaggttttgggggagcctcatggagcagtaagatttcagctgggctttgaagagtgggtggaactgacatatttggcagagaagagcctgccacgcatgacgaagatgcctagaaagagcccatgcatgcacgagttacaggaacttgtacaaagaggagttgttcagcacatgaactttcaattcttattttaatgtcatttctaacaagcaaaatatcctgccctgaagcatctctagatttactgcaccaatagtttccgtaagttctgttataactctcaattggattttcattatggtacttaaattactgaagatcattagtagtattttgttgtttgcagttaattgtgcaattgaacttgctacatttctgtaatggtgacatcagaggggctgatatttcccctcatgggagccctgttgcaattaaacgtaaatcataagcaaaagagtctttgctaacacacagttcccattcagtgacatctcttagaaaccactgttttcgaggttaaactgaaagcattgctcagatgcttcacggaatgagaccatcagcattaacatagatacaaactcatctattccaggcagctttacctaagagtggactgaggaatatctgagtatgtgtaactgtagagtgaccgtccaaaacaaacaccagggtgactttagacattttattgttgtccttccagaggaccacaagtgttacttcattagcatttattttcaggtaaagcgtctcagctctctccttattttacagctgtttgtgaaagtggctgtctcaatggaggaaggtgtgtggccccaaatcgatgtgcatgcacttacggatttactggaccccagtgtgaaagaggtaatggtttttaaaatcatttacgtaaagacatgctggtacctaaagctgttactaatttgcacagacattgggtctgcatggctacttcctgaatgttgctgagctttgaggggatttctcatttgtcattgggaaggtccctaggatgacaagacagcggccctgaatctatgcatgatattcggcaatgtttgtcagtccaagtttacctaaattcagttatttgctaatttggtggtactcagttatgagtgtatacataattaccagttggcatcaggataaaaaggggagaactttcttctgtaagggtaaggattaagctctttattatgccagtgaattaagtggtcttgaacaaaacatatgtatggaaagggagaatttcagtatgaaaagcacacctaaagatctgttggacctgttgggggctgtagaggtgtacaagctcagcattcaacactcaccatagatatattgagtgtctgctgagaagctactttgtgtagatggtttattcagtactcatcgcagcctgctagagtgtgtagaattatccttaattttgcatatgagaagatgaaggcacaaagaggtccagggatgtccccaaggccacatacataagaaacctttaatttgaatgtgtgttttgtctcttcaagtctaatgtttactgctgctcttaattaaaagaaacattctacctgatttgcctacctaaaaatacaagtatgatattgagatatgtgtggatatgcaatattcttaagtttttttccctgaactttggtcttactaataatcttgtctctacatttatagatttttttctcatcatccctagttttataatgaaagtttagaagttttatgttacacaaaactgtaattgaaaatttgcatgaacttttaaactgcagtaatcacttttagccaaagttgtatagacatcttattctaagatggaaagtaaagattcagtagcagatgttgaatatgtcatttaaaacatgtaatagaggaaaacaaagagcagagagtggtttgtgagaaattattttctgtctgtgtttataatttatctaaattcagttatttgctaataatgcagtaatacctatttgagcaagaaattccaggtcgattactttgattactaggtaaattacattgtatctctattaatgggaccactgcatggtattgatgtgtaatgcataatagacctttacattgcatgttgatatcctttaggagtccctccttaaactgcttctctttacaacttgcacagatgtgtttttattcgctaataattataatggtccagagtactaaaaactatttcttctaggcaatatcattctgtggccttattacttaatcagggaagttgtaggagattaaaattgttaatgtgtagcttgaggagtggtgtgtgaaaataatttctcagatgataatgctgggcataatttgttttagaaaaatcactaataagatgaagttacagggcattttacctgtaacattttacctgtaaccattttaacaaagtggttaaagatttgctgcaaagactattgatgctcatagttgatattgatgataacacagtctaaaataaagggcatgatattgaaccattccacagtgatttcttcaaagatttgatctttgtccaagattaagaaatgtcctgaatgggttaaattactaagctactaatcaaaactggcatgttactcagaggtttctccaagtttgggggtgtcttcaactgctccccttcaggaaaaagggctatcctgaaatctgcactaaggtgtaaatatctgttgactccatagaattttcccagtggtgattttcaaaatcaaattcatccccaagtggcagattttcaggcatttgtggtagtggagactggagagcagaaggcaggcttgcccgttagtagcagaagggtagtgccatctacccactgcctgttttacccacgggtacagtcccagaccttcaatgggagaagaaaaacatgggtgtcatttcccacaccacatgggagagaggagtctttttgattccagaattctatttccatttgtagagtcttcactgtttgctgctcttatgaaagtcacctgcttacctctttgaagaattagaggcagtagattctcttacttagatgtatgttcgtgatttcaagagtgatgaataaaaatctgataccgagtcaggacagatccatcctgaagtgtggggaagtattcagggtgacttccgatggtgggttggtatacttattgtggtgcttattactggataagtacctaggttggttgtattctgttttaactgggatgtgatgtttattttttaaagtgcagatccgggaggcctttactactttcctttctcccttcatctacattttcccttagtactctctccacatctctttttatagcatttactgcattgcatcaaaacagcaagtttccaatctccctcactagagcataagttttcaggagcaactatagtttcttcatcttcttaattctagccttactgtgtgatgcacagtacacgacccatagatgatgaactggattcatttaatagcatcaaaaaatctggagatataatgatcggatatgaacaagtatctcctggaaataattgctgtttgccaacagtcctggatattgatttcattggtttcatgctaaacagagctgattacaatgttgatatctaattgaatttggtcccatctttcagaagaatgatctttcaggtccacaagactgtcatttttcagttaacagggatgcaaaaaggaggaatgttttgatcaaaactaagtggcaataaaaacaaaagcaaaaacctcttatcatgatataatacacatgtaagggaacatttagaatgtcagttacaagtacttctcaggataaagatctatgtccctgggagaccttggaacttttatacattaataactacctcagagacccactatgagtgtgaaatacgcctttgggggtcatactggcaggatttgtatcacattaagccaataagtcaatcttaatcatccatgaacatagtattttggttttgtgatggagagaagcagcagatctcatgcttgaattatgaatcataatagtcatataacagtgtaataagattataaagcaattagtcttacttgcagctttttgtcattaagataagtttgtttaaaaacattcttggctggccagcctcatccccagtgggcaggtagcaatgatatattttaccattgccactaccattgtttctctacacccagaggataaaaaatagagacctgtggcttatttggcctgtgatgtctactttttaaaagctgaataggaatacctttaaatacatcttctagtttgtcatagtccccaccactacctattgtcacatcttgctcaagttcattcatttagcttaggtattagcccttgtgagcattcaagtttgccacctcctgctgctttctctgtcaaagattgtgtctttattttttttaaccacaagtttctttaatttttcttcctgtcacttttttttggtaagttcacatttgtggttttcttgttgcctcctactccgaccctttgccttctctttgcttgggccttgagcaactagtagaacttaatcacttcttagctcagtggtacagtatgttagcatttgttatcagattattgaagtgaggtcagtgcctgttttggcaatgacaatacaagctagtcgtatattgccatagttactgctaacaaaaaaactgtgtggaatccctttctcttgccatcttgcctcagaatgcacatttaaaatcttgttaaatgcctttgtattaaacacagtgaatcatatgagtggatgagacttttcagggtcatgtcaaaagagaaaagaatgatggagatagacctgaacttggagatgggggtggggtgtgatgatgaataggcttagggaagaagagaaacaaagagatacagcaagagaaccaggagagcattgaaccaaacaaacaaaaaggagttcaagaaataacttggcaattgttagactcatcgaaggtctgagaatgagaatcataaagcggccattggacgtaagaacagctgacatgtactgagtacttgcagtgtgccagggggtgtgctaagcacttcactttgatgatttgcaacaaccttatgagaaaagtcctgtaataagtcccatcttatggaggaataagcagaggcaaagagagatcaagtgccttgtccaagaagggacagcttataagtggtaaaatagaggcctgaacctagacattctggctcctaagcctgtgcacatagccactgtgtagtacttggacttcactggaaaggggccactcgtaactctaaagacctcactggaaaggggccactcataactctaaagacctcactggaaaggggccactcgtaactctgaagacctcactggaaaggggccactcataactctaaagacttttctgaggaacggtaagaagaaacctagaactatgaatcttagaatggaagtcaagatgaaaaggcaaaagaaaggattcttgcatattcttggatgtttcaaatgtagggttttggaatattcctctatttgattgatttcaacgtacgaatctgctcttggaaagagagagattcctgtgtgtttacaggacatataaatgtgctccaaaggactgaactaacatgcctggaagtagacatatggaatgaatattgtcatttagtgcagttatcatggaaagttatatcattttcttgtaatattacaacagctcaaaatgtgtttggaactcttttttggaggtgcctttacagaatcagcaatacattcaaatcagtgtgtgatttttttttttcccttttgaggaggcatttgagttttcagaaacagcctacagtaatttactgttaattctagtgactacagtgggtaatcacacattttagctgtttgggatcaaaagcagacttagatttaaaaaatactaaaaataattttctcatgtggttcataaagcacatggaattggtttaatgttttaatgtcaaactttatgtgagccagaggatgaagccttttggaagcataaatgcaaatagcaagaagttttctctcatttctccatctgaagctgctcatcatgtatcctcagaatattagcatgcacgtggactcttctaaatcctggtgcatttgttctgtgttaaattcctacccaagtctaaactgtgaagacaatacttggatttctgccaacttaagaaagtctgttggctgttatgctggctatcagtagataaagtataggggaaagcattgttgaactgatagccttaaggaaaaggaacaattggggccaaagtggagtagaataaaaatgagaggattgaaataatccttagttcattagagaagcagaacagttgaaagtgaactagctcttcatgcaggtacttgcttcctaggaaattacagtcttaatgaagctgaaaaggtttttgtatttgttagcacaacaatgaaacagaatagaacaaacaacagctaggttgattgtaattccacctccttcttatatgtgcagttgacgtttgagaaacttgtcctcacaccttgtttctctgatgatgtaaaaatgattttgcacagatatctttctaatgattttattgaatgactttcaaaaatactacattaagcagttgataaacacatattatataaatccaaaaaggcagcatctatactgtgtctagtgaatggaaaggactaacatgtaattatccaaatatataataatcagatagtccattttggaaacacctgcttcgaaaaagaaagtaaaaactttaccttatctcaagacctgtttagagagcttcatggaatcaggagctgattttcctgtgctttttttctcctggtgtttttcaggaaggtattaataaaatacagattcattattattttttctctatgtagaagtaagttttacagagctgcatttctgacacgaattttacataattttaaattgtaggtggctatcactaaagttcccaaggtaatgccacaggctaactcccattctccatgtgcctttggaaggcagagctctgtgaactatgtatattttcttctttccaaaagcaaaaggcagtaaactgtcattactaaactacactgaaggcctctatgaacctctcttttggtatttagtttcaatggaaagtaacaatgtggcagggcgtggtggctcacgcctgtaatcccagcactttgggaggccggggcaggcgaatcacgaggtcaggagatcgagaccatcctggctctactgtgaaaccctgtctctactacaaatagaaaaacaaaattagccgggcgtggtggtgggcacctatagtcccagttactcgggaggctgaagcgggagaatggcgtgaacccaggaggtggagcttgcagtgagccgagatcacgccactgcactccagcctgggcgacagagcgagacgccatctcaaaaaaaaaaaaaaaaaaaaaagaaagtaacaatgtgtagatagcaggggcacaatgccctaaatgttactgtgcgtctacagtggtattgcaacatttgtggcagctggtggatcactgaataaactagattttcctagaatagttccaggaattgcatcttttgacacacacactcgtttttttgtggctgggtaactgtatacactgagggcacacatgctcctctgtctcgcaggctgcacatatgtggtatgaacaagcagtggggatgggatgcaaccagaaagaagcttgatttttgtctcccactcactgtccctctcggcccactttgtaggctacttcttctcctgctggtagatgaaatcatctggtctgttttggactttctcccctatagttcctttaatgggggcagaggcatctgtgttctgactgttgctgacattttcttcctcagtcgctgggcatccagtggtacttccagcctcttgagttctctttgctgctccaaggagccatctgggaaaggagctaggctcagtccacatcagctttctttttggcggcccctagcttgttggcagaaaacattcatgcattttttctgccacgataaattgctggagtgcaaactattgacacgttagcaaatgctcattggaaccattgtccaagcatctggccagacagtttccaggcatttgacagtccctagtccacagtgtcctccagacttctggggataggtatcatgcaatctgaggagtctccctgaagcctctctcatgacttggcatcataatgtggcccttcaccagtttcccaggaagggctagtaacagcccagctctctccagagtaacccgcttcccatcacttgctactttggacatttgaatactcttgatatgcataaaggtttaagaggtcatcatcacccactttgcaaattatgcatcaaaatatcacacttgacttagaatgtggcatctgttcccttggtggttcaattgaaattttgattctaacattctcttgtgttatcaaagctaatcatttagtacaactgttaaatttagtgtcatggtttcatcttcaaaaacagtttttttaacttcatttttttttagctcttatgaacttattaaaaagataaaactaatttttatatgtcgttagccccacatttaatatttgaaccacttttcgatcttagatgttcaaacagtagaacagtactgaacaatagaaatataatgtgagccacatatataattttaacttttcttgtagccacatgaaaaagtaaaaggaaacaggtgaaattaattttaataatatattttatttaacccaatatatctgaaagttttatgtcaatagatactcagtattaaaaattatctatgagatatattgtattctcttttccattctaagtcgttgaaatccaatgcatatattataccacatctcagtttggaccagctaatatccacatgtggctatcatcttggacagcacaactctagaacttccagtaatacatatccaaactttacccaaagtatctactagatttccagttttctttcttttccttccttctgctgcttctccagctcttcagaaagcagcatcttagaaaatcaaagagaggctgcattgatatttgaaaagtaaaccattaaaaaaaagaactggggcctcagagctgagcctaatttctcaggttctctgtcttagtagaagtttgatcaaatataagtgataaagctcaatctcatgttatatcatgtcaattagatataacaactacagcatatatttaataaagccttggcactaagctaggcatgatgatagaatcatgagaggagtgtatggctcttgtcatgagggccttaaaataatttttggaaagacagacatgcatactatattggaaacagttaagtaaccaagcagggccaggatttagctaggcagaggagataaaggaaagtactacaggtaaagggaagagttagtacagatttagaggcttgtattgacctggggaaaagggaggaccctgctgtgtcagctttcatggtactggagcccttctgtgggagaagaggcaaaggcacaacgtcaactcacataactccaaagaagggagggcctattgcaagcttctccacgatgcccttccattctattgaactgtgcttctgtacaatttctgtctgaagcaggatattgggattaaaaaatgcccctttgtatgtataaattagtgggaagactggtctatttctgaaactgttttcactttcttatagacggcattcaggaaatccttaccaattttatatgcccaactgagagtacttcagaacacttaatgtttatgttcccagtagttatggtctctagagagtctatgctgtttttggtttatgaacatatgttggacaaatacatggggcttcatggtcccgacgatgtgccaaagtactttttgtagaacatcagtcccatgaggggttccatgaaattaagttgccatggatataatatcatttttggaaactccatcccatgtcttcttggggaggcatcgggtttgttagctcttgggagtcctgcaggaaggaaactgtttttacttagtttaactcacatctccaagcccatgaattttagaatttcttctttccaatttgttttcccttaacacctttaatgtcttcatcttggagatctggattcttattattttgacagtcattttgaaagtcacttgacatctgcatgacaacattttcatattctagatagatgttttgaatccatgtatgatcctcattttaaagataaatatttgcctaaatgtctagaggtttttggaggaagatcttcattatttaatcattcaccttttgggttcctaagaggattcatttgaccataaatttaaacacagcatgagacactcatcctttggggtttggttctcaaatactttaaagaatcatataggagagctggactatcccattaaataccgataacttcctagtttttaatggcttgatgtggtcagtgtgcatgccatcctggttctggttcttatcagccactgggggtactacttctagaactaggagtatgagatattcttagagctagagctcccttttctatactggttagatccttttctttcaaggtcaagtttaagtctcattctctccccagtcacttcctgactgtaggaggccagcccccaaacccccaccccaaccagccccatcagtttctatgcaactttgctgacatggccacctctggcctcccggaccccacccacatttcagttgctcagtgaatctattaaatttttggtttttgccattcactttaaggattacatcagacattttagcatttttattcctccaatgaattcttgtttttcttgcattttattacattttaaactgattaactgacccagtgcttgtctctggggatatgtactcatgatttttaaatatttactaagaggtaaagaatgagcatattcaccttgtcaaaaaactttttttccatgtgcatttattgatttttgtgttgaaatacttctatcagcataaaaccatctagaattctgtttcatggcttcaggaagccttatcagcaaattgcaatatttaagtttccttaaaaatattttctttactaagtgaaacataaatcatctattaattttaaaatatgaaataattatataggtattatttcagtattttctttaaaaagtcaatttggtttatgagtcccatcatctgggaattacacaattggctaatctgcttttgggactactaaaatagaggtttatgtatagtctttcagtcagactatggtactccccataggtcaaagactagaaattagatctgatacttcttcctatttcactaccaagcttagagctgtgaagagagtaggtatctattaaatatttgttgatttacataatttaactgtgggctcttgaagtcgatgagagggagtgtttaaatgttaaatacatctgtttaatccaacattctaagaaaagacattctggacaacaatatttataaatctatgtgtatgttatatggaaatattagtgtagttatttataactgaaatattgtaggaagtgaacgcatgaaaaaaaatgttctccaactttcctgccatattccctcggtgataatcttttgtctctgaactgtttgagaagagctttataagtaaacaatagattgggatatttgttttctcaggaaataaagaatgttctaatggttgagtttataagatagatccatttctatctctgtccttagagagcccttatcttgttgcctgccctctcctaggaggcattgttgacctttaccattgtaggcactgaaccacgctgaaagagaagccttacaggatggaggcaacttttatccaaattgaaaatgtttttataaacatacattagctcttcatgaaccatttgtttcctgaagtcccaatggaaatgatcatattctgttagggattccaatgatatattctttaaactaagactcgtgaacgttaaaaggcaaaagcgaagccagaagtaaattttgactcattctttatataatcatttgaaaacttcacttgaaaactggagaaaattttggaactttcttgttctactatggagaagataaaagcagaagcatccacagtatcttaatgatataaaactggctttggaaagaagtatgtaatagaattcagattgtccttggaggaaaacaaccctaaatcaccatcgaaaattctttatttatttattttttcagacggcataatttggagtgggattgggctatttcttttcagaccttatttaggcctcatttctttctacagtgttctccacattgccaagcagaataagctatcacaaaactaaacaaaaggcagtgcctagaaggcatcccatcccttgacggagccaactgggagtgtacccaggactttcctgttctcatggctcctggggttgttattctttactttttatgaatgagacaaaatgatagtgaaattattttcagaactaaatcatatctcaaaggagtcttcattccaacttgtcagtatcacatgacaatcattttaatgttttcatttaaaatatctaattaggaggagttgtgtttttctaattgcctagccattcctagaaaactgatcacgaactcacgctctgaggataaatcttgctacttgctggattggtggccttgagcaagttactgcatgtctctcaggcacagtttcctaatctatacaatgagggtaattatagtatttatctagtaagattgtcaggaagattaagtgagatcatccacaaagtacttagcacaggatctggcacataatacatgtataagaaatgttaactattttaaattcacatgaaaatgagggtaatcttggttgacaagtatcatttcattaacagtatcatgaaatgttcacatatccctgaaattacacctaaacttaaaggcctcattttgaccattttttccacttagaagttttgttattttacttgaacagcgtattttttggatcccctattcagatgaaacccaacattcttgagctggatatagaaaggtcaacatcaagaaagaagcacatcaaccgtgtgcttttctttagtacacattcaactgttgcagttgtaatgaaggctaaaactacaatagtgcaaatagtaataaagaaagagaaaatgaaggggtaaggggaaaactatttccataaaatgtaatggtgactgtgtctgggaagcatttgttctcccaatagctaaccaaaaattcctgaaagatttgcttacttttactgacatacaggtacagaagggaaaatgaacttgtctattcagaaaaggccaataacgaaatataagaggtacttagctattttagaaatgcggcattctaaaatcaatgagaggtaatagacacttacccatcagtaaaataaactgaacatctctgtaaagtatacagtttccaggtggctgtaagaccttaagtctacaaatacggcctggtcaggttggatgggagtgggggatgcttttactcatggaaccatgtgccattcttcttttgttgcaaaggactaaaagtgttagtcccagaggactaaagttagaaaaatcaaaacatttggttattttaaacccacaaatttcaagctgcccttgttagtgttcagttttgttaagtctatccataaaaaggtgtgatgttatgctgaaaagaaattgttctaagacgaagagaggaggtgtgagtttatctatcatgcatgagtatttctcaggcactatgctaatgactggagatgtataataatgaatgaaacacacgcatcccgccttctggagtcacattcctgtggagagatggaagcagtgcttagaagggcatgtgtaggaaggctggccacacattgagaggtgtgcagtggtgctgtgactcccacgctgggaataggagctctgtacatttttctatagcacattagaagtttgatggctccggctgaccatgagactcttcccagaggagcctctggaataccaactttgttaagatgagagagctcttcttataggtttccaatgcccttcaaagtcagagggatcttgagtcttttgctgcttagattgcttttcctctaatccttgtgctcccacagggactctgatccctagctttcccccagaaacgttaatgaactggaactcaagtgtccaaaaaaatgcaagtacaccacaaaaatggtttgtttaggcgtcaaacattttgagataatgcatacttttgaatggatgcctgcagtcttgtccctggggaacgcctttggatgtcatgcaatcctggcttcagtaaatcatttgctgtttggacaagtcgtggccaccacgtcagtcactagatacatttgtaatggtttacgtgaacaataacaacaaccacctagcaacacactgtttggtcatgtcatttttttctaataccacatgtggttttgtgggctttagaagaataaattcttactgcatctaaaaggtcttgaaaattaaacagcaaatattgttggaggcctactgtgcacaataggtgaaatcacactgcatgttgtaagaatgaaacatgggtctttgctagtttattagtaattttatactccacacgggagagactatttctgttctgttcaacattttaggtctaatgcctgacacgcagtagcccagcaagtatttgttgactggaaaaatgaacaaatgagtagttttcaggcatagtttatttcttgaatttcctgtaattcaaaaaagaaatgactgatctaccatctgtactttttagccgatagttttttccctcgactttttaaaaccatgaacacaacagtgtcaggtagagccaagtgtattctgtgaagtgttaatacctcagagatgccacatttatgtcatcccttccatttatgcagcacttatgaacatataccaccttagtcagtccttggggcaacccttcatattttatagcaaagagtgagattgaaggggaacctctgtgactcggaattctaaggcaggtgtctaggaatgagacttatgtcttctcagtcagcccagactatggggcatctatattctccaacatgtatttgcttgcttttagagctcactgtggtcgctagcattaccttttgttattattaactatcttttaattttagctctatctttgttctttcctctcatttttcacacctttttgattttcagtcagactgctgacactttgctatttctgttctctgtgtctcttagacactatgtccatttttaaaatttcaaatttgagggaactaggcaatatttagaattaattttgtcaaggagagcttgtctttaattgtaagtggatattatgtggtgaaaacacttggcttagctgaaattgagctgtgcatagaatcagaagacaatctggtcctgaaggagtctgagaacacacaggcatggataatccggatgtgtgaatgaatgaactgctgctgtgtcacgctgcccgggacatccttctgttggaatttctgtgaaagtagaccaggcatattgcatattggagtgtgtattccaggaagagttgagaattggttttcttttatgacctctttgttttcttgctgcacgtatcaggagatttgcagtttctgtcatataaaaactactggaaatttagaattatctcctctgagagcatgagccccttgagaacagggagttttgactgtctaattacagtggctagaaaatgtctaacacagagtagatggtcaatacatatttgttgaattaaagaatggatctggcatatatacagctgatcactttttgcaataggacatgggttgatggtgtagtgcatgatttgttggtgcattgctgtgatgatgttctgagctcacccagcctcagttactcaatgacagcaagttcaagtcatgtcagagttggtgtttggctcttgtctgccccactatacaagtgcatgcagttttagtctctgttttggtgggtagtttcctacccctctggctcgctatacttgattatgaaattataattggctttcgtttatctctttaggatagaatagtaactgtagctaatctgtggctgaaaatagggagataagaatgaaaataattaaaatggatcactctgggtagcctgaagtgacatggattaatgtactatcagttttttccccctgagaaacatttggtcacaaggaagtttggctttcagaagaaattcagatttgggtgtgtggcttttggcatagtctagcatcactggaatggcctaaagtagatgtttctttttttcccatgccttcctgtgggtgctcagaacaacccggtcttttgactgtagggttatctgccattcgtagactgagcattatcttgccaagtcatatggagaagccagttaccgagtgcacttggagcagaagataatacttggctgaagcatcctagaaagcctaaaaagcttatgtcagagggatataacgtagagtttctaaggagaggtggagaaagagactgattgatcgattgcttgatctccaaagggcaggggctctaccacgtgtttcatagtgctaggaaatggcaaactttaaaaaggtgttcttcagttgccccaagaaatacaaatgtcacgcttgtctgactgtcagggatgaatggtcctagtgcatgcatgatgactgtatattcttctttgatagcgccatggtgtgggtaggtatgaggatctgttggcttagaagcaattggaaaaactggacaaggaaggaaaagaaaatgaaactaagaggctggattgagaaataccaagaagggtggaaatttcaagctttttttaacttcagtaactgtaagagagaaagaaagagaatgaaacagaaatgtctgactgtgtcccttcaatttcaaaacatattttgtagctctccactgactctggtttattcattatttatttaatagactcctttgttaacttcaggaagttaatactagtggcaattcttttagtcgtattgggttgctaaaaagctgtggaccctaccacataccacagtttagattaattgaatctaagtgtgcatgagtttgattaaatagggatttattattaagagcccttcttaggacatatgagcttggaagagcctgatttataacttagtagctttttcactttgtgaagggatgggacataaagtgttcttttccagagtgatgtggactgagataagatttatagattagtgaaagaagtccacgtctcagtcaaaagatttccagaaatgttctcctcattattcttcagagacctgagctattccagatgtccataggtttcagaaaggtagcttctggggagttgagactttctaaaagatgaaaatgtcaaccttcttccttccctgcttttttgagatggtagtagagctatatattcaactgtatgtagatgaaattgtaatataagaagaaaaataatggccattattaaaattcagcagtaggccaaacaggaattatataactgttttgcttcatagatagaattgttcctaaattcagctgatatggaatttttaagaatttattttttggggggtcaagaaatgttctgttgtaagcatgcaaggaaaaacttcttattctctgctctaattgctacatccagatatttgttatgacatacaagcaagattcagtgctcgtggtgaaatctctgtgcctcaaattgcatttgccctgcctgccctcctttcaaagctgtgcttaccactttggtataaggtcactgaaagtgtctgcgagctttaacaagttggagatgcatttctttttttttttttttccccttttttatttttatttttattattatactttaagttttagggtacatgtgcacattgtgcaggttagttacatacgtatacatgtgccatgctggtgtgctgcacccactaactcgtcatctagcattaggtatatctcccaatgctatccctcccccctccccccaccccacaacagtccccagagtgtgatgttccccttcctgtgtccatgtgatctcattgttcaattcccacctatgagtgagaatatgcggtgtttggttttttgttcttgcgatagtttactgagaatgatggtttccaatttcatccatgtccctacaaaggacatgaatgcatcattttttatggctgcatagtattccatggtgtatatgtgccacattttcttaattcagtctatcattgttggacatttgccattgtggaagtcaatgtggcgattcctcagggatctagaactagaagtaccatttgacccagccatcccattactgggtatatacccaaaagacttggagatgcatttctacagctgacatttttcacttaaaaataaattataggatgcgctttggagagcacacgcctaggagtggaacattaacaaaggatacgtcaaaccacagacacttctagtggatccagttcacagtattgccacacagcctgaaaaaataacattagtaccagcaaaactatcatccctaacattcagtcattatccctgtggacaggcttgggaacagccatgtggatgtagctgctttgtgcttcttcccatgcagatttgatttttctttccactttctcccttttaatgaatgaactaaaaatgaatttgaactacttgccaaccttagaaggtttgattttaaaatatattttcttctcaaatacacgaaccagtagcatcactttcaattccctactcccattctctgtccaaaaatacatatgccaatcttcaattttttttttgtagattgcatgtaaacgatggttggtttgtataaagataaatattactttagtaacaagcacatagtaacagcttaatttctttttgaattgttaggctgcacaaatcaatcatgtggtgccagctgaagactgcttttacaacaagacatatgttacaaatatattaatcttagcggcatatggcacctgagaccttgtaggaaggcgttgcaaaaaggacgatcatgccctattagctggctcacttcctaacttacattaattcgtgcattatggaacgtcaccaacacatgaaacaaaaagtagaaatggcactgctgagtaatcacaagccattgactaaagaaacttcagggaaggcggggcaatgagcattctttgaaccacttaattcaagaaataacaggctttgtttatttaagaggccagtctgtctgttttctgattgcattcttattgtgaaaatgccagagcatattacaatggataaaatgagaggaaaaaaagggcgatttaagtaggccaggaaagagtggtggtagatgtttgaatgcccccccttggaattaatcagtggtttataaacctgaaatactttttaattttgagaactgagtttctgactcaaattatacaagagaaaatgttacttggcttgagaaaggaaaaactttggttcatgtaaatatgtaccctcatgcctttatcatgggggaattgtaattagggattcagaatcttgagaacactattgtgacctagttatttctgtacagcaagtgctcacaggaggtactggctagacctgaaaataatgaattaagagattccagctgggatgtgatgaaagcatttttgggaatctctgtatcttggctggaccacatgggttataacttggagagacctaaacgagtagtagtatatgacagatttatagtccaattgatgttgggcatcagaaaaaaaggctgaggttaaaaaaaatgacctgagaattatgagttctaaaagaattgctattggaagggatgctaatgcaggaaagcatgaattccttatatgagggcaataaaaataataaaatttggtgctgaggcattgaatgggaaacacagtagcttatttttcacagagacccctcctccaagatcccttatctaccttctctgctgtacagttctccacaacacatcctccatctaacatatagtatattttctgtctgacctagttcttccatgacattattaaactccatgagggcagacattttgtttgccactgctcccaccatcccccacactttgttgtatccttagctacaagagtggtgtgtgacacttagtaggctcttgataaaaattgttgaatgaatgaatgaatgaacgagtgcatcaatggtgtcatttttaagccagaaattcattttagtccctctcttccctgcatctatctctccctccctcccaccttcccttcattcctccagcaggcactggatgtgctaaggcacaaagaccaataaaacaaggttcctgccctccagcttatggtctgttgggatcaacccatgggtaaatgaaggagtccagtacagagtgataatgctatattagacatgtgcacaaagggagatcagagtagagggggaaaaaaacatttaatcaggctgagaggtcaaggacaatttttttccagagaattaaggattggaaaattaaggatttgtagagcctaaaagaatatgtaagagttgatgaaaaatgaaatgacttgcaagaaaggatacgacctggaagaagaagacaacgttgtcagggaaacggcaggtagttcaccatgaagggagggagatgatgggagcagatggagtttggaggtaagttaaatggagagtcatttcaaaatcattggttttccaaggtgttttgttgtgttcattgagagtcaacaatactgagacttcataatacttcagacaagtaggtgagaccactccatgtgagttttggtcctcttgctcttctgtttcccagtttactatgtgccccttcccagcttgatatgtcaggctaagaagtaagtggactttctgtttctattcttttacttaggataatgctttccagttctaaccatgatgctgcaaaaaacatgattttattcttttttatggcagagtagtattccatggtgtgtgtgtgtgtgtgtgtgtgtgtgtgtgtgtgtgtgtgtatctcacattttctttatccagccctccattgatgaatccttatgttgattctatatctttgctttgggaatagtgctgtgataaaaatatgagtacaggcgtctttttaatataatgatttctcttcctttgggtagatattgttggattagttctttgagaaatgtccatactgttttccgcagaggttggacagagccaaatattacatgttttcacttataagtgtgagctaaacagtgggtacacttggacagagagagtggaatgatggacattggagactaccaaaggtgagaaggtaggaggagggtgaaagttgaaaaattacctattgggtacaatgctcacaattcagataatgggtacagtaaaagccagagtttgccattatgcaatatgtgcatgtaagaaacctgcgcttgtaccccctaaatacatacatacatacatacatacatacatacatacatacatacatatgtaaatacataaagaattgagcggagctctaaagctggtttaccatttccttgccagagcattatttggagtgtggagactttaacatttaatacgagttgcaagactctaaagtccatgctagagcaattgctctttcatcctcattttgttatctgtgattgtgggcaggggccatctctgaaagaatactcctgtctttcatggtatttacttgagtttatacttcgtgtcacacgtgaactatttcccgtctctaatctgcaaatgttcccttctggaacccgtttttatgtttaacctataggaatgcctaactgttgagtaaaatggtgcttttgtgttattttcatctaacataacctcagaattttagtagattttagtattaatatctttatatgtgatgcagtcatcatcaatatttgttcttttaaattaacattcaaaattaaatgaacaaaacaacagtgatattcataaaattggatgctattttgtgtcaggcttgagtttccaaatggaagcctcctgattgtcctgatctgatgtcacatggaagccactgcatactcttgatcttttctatgtttctaatcattttattaacatttcttggaatcttttctagcttattgcatttatattggctggttttatagtgataagaagattgagagctgtttaggatatagatgttatctgtacgtggtgcctgtacaaagtaggtgcttaatatgtttttttttttttgaatgggcaagtaagagttatatttttaaaacatgcattggatcattaaccacttcctactgcctttaggaaaaagtccagactcctttgccagagccaccaggccatttacaacctggaagcagcagaccttttcagccttatctcttgctgtcacaaacaacaatccacaatctacagtatatgtttgcagtgccatgcttcatccatgctgctccttccatttgacattcttactgatttgtcagatgagaaagcttccattagccattcacagaagaatcacttctctatttccaaaacattgtttgtacttccaggataatcacactggttcatttcactgtctatacttatctccccatctaggttgtacactcaagacagaggctctgtcttacttacatttgtatctttagggtctaatattgtaccactgaccattgcaaggactcaggaatgtgctctgaattaattaacaaggtaattaggccagtgccacagcctgagtatcacacagcttcatggtctctgctccacaccatgagaacaggacccgtgcggtcgggacaaggctaaagaggcctaaccctcagccagggctctgcaaggctgcaccaaggctgggtttaatctgggacccctcattcatccacagtcagtagaggagtgaccatcactggcttctaaaaatccatggcgtcctggcctgtctgcacagcctaccctcatcagagaagagttctttgatggtactgcccagggtctcttgatagcagaggttttcctgggggagcaggctcagtcaaagcctcagtctggttctgatggttcctttaattgtttgccaagaatctggttaaagggaacatgacagacttcaagggactgatgagaatccaagatctccttgctggccacaaatcattaattgagagctatgccttaggagggtaatatatattttctttcttatgaccatgattttacatgtgctgaagcttatttagtctttaactctccattcacttagccttgtaagacctgttttggaataatcttaattattattgttattttaaaatttagccattgtccttttttatttttataacactataagccatattgtttaatttacaatttattatattctgttgtgatatgagatcatagtgatggttagtacaacaatgtgatagctatcactttatgcaccattttaagattaatgggcatcatgatatgagttatagatatgaagttccaatgtataatttgagctgtgttgtgtattctgggccataatcatcacataactcagcatatgtatatataaatatatggaaaaacacaaacttgcaaaaacaatttgagacaatcccaaaagatagatctcaaagaaagatttctttcttagttgaaacgctttcttagcctcctgttttcggataatgctcaaactccttagtggaccagacaaagcctcccatgagctggtctttcccacctcgctggctcatccccagcaggtgcccttcatttatctgcagaaccatgcccacatcctcccattgttcccccttttcacacttaacagatgttcgcaactagtctacttgtctctgtttggagcccttcgcctcttgttttttaaaaaaatttaaatgcaaaacagtgcagtgactaataagacaaccatatttaaactgtctacctggtattaacaaatgtcaacatttcatgaattttaaatgaacgaaccagagcatctcagataaagcttatgtccctctttttctccctagttcctttgccattcctctctccagaggtgactgccatcatgaatttgtgctagagtttttaatcttgtcaatttactatgtgtatgatttcgtggccatttgtaactgtgtagattttacttgtacactttctctccaagatttttttaaaaatgccgttttagacaatccccagtactgatccttgggggctctttgcttcctattctttgaggggtctttgtttttttttttaacaaactaattaaattgttgcttatttcttaaaaatttttttactgtttctggtctggagcttcttcagtgattttgtgacagtcttggaaaatctaattttaattctcccctttattgaaaacttggttggccttttctttttctgacctcctcttgcccctacaaaggtagagatttaataatacatgatttctttttacagaaagcacattacttatttattagcttggtagtttcagcattgagaatccttcatttataatgttcagaatttttctcaaagaccttttaacatttcgatcctttacttaagaaatcctgatatcaaagtaatccatattcataatagataatgtgaaaagtattttttttaatttagaaaagtgcagagaaattggagaaaatactcataggtccctgagtgactgctattaatgtttaatatgctcatttaagaaagtttgggaagtagcgaagaaactacctaccatactaatataatcacagttaatatttgcctgactatatttccttctagtttctatttttctttacatagtaaatttctttgcaatcacaacataaattcagtttgtattatatgttttccacacatacacattttaaaatactatataaccctgtgttttcattttttaagcatttgggctctacccttagctttaatttttttctgttatttcgttatgtgtaacatctttgaacacagagtgttttttgtatttagaatggagtgaaattgttggaggatggctacaggcactttaaagcccttactacctattatgaatgtggtcacgtgtgcacctgcatgtctaagttttggtttcacctcattcttgccatcatagggattttttaaataataaaaaagaaagaaaaatccttgcttattcccaacaatagacatttactctttattgaaataggttcttaaatctttttttaatcttctttactttaaatatttttgcaggtatttaaatttgtattagtgtacatatatttttattttcattttacatgtggtccttttcctcgtgatttatctatggcttttaagattagaaagtctttgtgctttcaaagattcaataaatatttttattcatgttcttccagttttttgtggttcgatttttaaatatatttgatgctttaatctaatttggatttgttgtaggcctaagacagatctaccagggtgccattgttctgctatacctagtttaaaccagtgataaatgctatcagtggtggatggatgaattccaagattcatttcacattttgtacctgactctttgtaggagtgttatttaaatcaggctgatgggtgttgctaaaatgttggaccagccttggacttctcatacccatgctgacctgtggctcagtgggaatctagcatttgtccctgaacgtgcattgcccttggtttctgaatagcctccagctagtttatactagatctttggcctttctctggggcttgtgaactctgctttccagcaaacaatgtaccctcactattagtcaacagaccattttccttaggccctggaaggcctataacacaagctccttcatccacaggcagaatcccttccaatcacctttcctcttggatctgcccacccatcccctgcagcctggccagcagatgccagtttgcctgggctggtcagcacattcacaccagctctctctccttagctgactgaaaggctttcttttttagctccatgactgcagaataaataagagcaataacattgctcttttgttttaaataaatgagtatggggcaagtgattcaatcaataactgagcaagaattgacttttccagtttaaatgtagtgagcaccctatcacctagagtgttcaacagattcaggaaaacattttaagaaatgttagataggggagtcatgaatttcatgaggatgactgtctccataatcttctcaccctaaggttctgaagttacgtgagtatctcatttcacacctcccttttttttttttcaaagttttcccaacatttacagtagcagaggcacaaaacaaattttttgcatgtgtatttatgtatgtgtatacatccttttattgatctcttcatgaaaaggtaaggaatgtgatatagatttatgtaaagaatcttatttgctagaacgtgatgttaatgaggtcataaccgcaggtttgatccttagataagccaactgtgttaagtcctaggattagtttggaaaaaatggcttctaaaaaacaggaaaaatatgattggaaaacaggtttagtatctgccccaggtggttagatatataaagcttacttatccagtgagtgtaagaaaccaaaaccaaaacaaacagaaagagtattaagtccatacagttgagatagaagtagaatatctgaccacagacttgtaggttgtattagttgacaacgtgtgcatctttttaggtaaatataagaattggtttgtgaattgattttttttttcaaaaaagcatcatggaggtgtaatttacataccataaaattcacccatcttaagtgtataattcaattcaatttaattcaaattttagtaaatttagagttatgcaaccattaccacaatctagtttcagaacatttcggtcatcccccaaaagatttcttacacctgttggcaaaaaatccttgctctctcccagagccctgggcaaccactaatacactttctgtctctatagatatgccttttctggacctttcaaataaatagaatcttataacacatattattttatatttggcttttttcacttggcataatgttgtagcatgtagtttattcctttttattgtggagtaatattccattgtaaggatatatcatattttgttcatacattcaccagctgatggacattttgattgtttccagtatggggctattatgaataatattgctattaacattcacatacaagtctttgtctgaccatatgtatttcttctcttgggtggatatttaggtgtagaattgctggattatatgccaagtttatatttaactttttaagaaactgcctaattattttccaaggtagctgtaccattttacattcccattaaacaatgagtgagggttctagtttctccatattctcacaactattttactgtctttctttttcattataaccattctagtggatgtgaaatgatgtcctgtggttttcatttttattttcctaatgattagtggtgttgaacatcttttcatgtgcctattcatgtatcttctttggtaacatgtttactctaatgtcttgccggcttttaaaattgggttatcttcttattgagttgtaagagttccttgtagtttttaatgcaagttctttatcagatattggaaatattttcttccagcctgtgacttgtctttttaattttcgtaatggcgccttttgaagtataaacatttttaattttgatgatgtctaaattatcagtctttttcttttatgaattgtgcttctgatattttatctaagaactctttgcctacccaagatcttaaaatttttctcatgttttcttctagaagttgcatagttttagctcttatatttaagtctgtgatccattttgaattaatttttgtatatggtgtgaggtgagggtcaactgttttgcatgtacatatccatatccaatgttactagtactatttgttgaaaagaccatcttttctcattgaatttccttgacacttttgctgaaaatcagttagccgtaaccagaagggtttatttctggcctttctattctgtttcattgatctaatctctgttcttactctagtaccatagtctcttgattactgttgctttgtagtaagttttgaagtcctccaactttattcttcttcttctaaattgttttggctactctgggtcctttgcatttccatataaattttaccttcaacttgtcagtttccacaaaacattgcattgagattttgataaagattacctttaatctacaggtcaatttgtgaagaaatgttaacagtattgatttttccattctgtgaacatggaatgcctctccacttatttaaagatttttcgacttatcttggcaatgttttgttcagtgcacaaattatgcacttttgtcattagatttattactataaatcttattccttttgatgtaattgtgaattgaattgctttgtaatttaattttctgattgttcattgttagtatataaaactatgactgctctttgtatactgatgttgtattctgtgacttttctggactttttttttttttttttggtagattccttaggattttcttatacaggattatattgtcttggaataaagatagtctttctttctttctttctttctttctttctttcttctttctttctttctttctttctttctttctttctttctttctttctttcttatctgtatactttaatttcttttctttgcatcattgcactggttagaaccccaagaacaatgttcaatagaagtaacaagaactgatatccttatcttgctcctgatattagaaagaaagcatttgttatttcgccattatgtatcatgttagctgtaggtttttcgtaggtacccttcaacaggttgaggtagtttctttctgtttatgttttgttgagagttttatcatgaatagacattggatttcgtcaaatgcttggtctatatctattgagatgatcatgtggtttttgtctgttattctattaatatggtgtattacattaattgattttcagatgttaaactgaccttgcattcctaggacaaattccatttggtcatggtgaatacttctttttatatattgttggatttggtgtgatagttctgtgttgagggtttttctgtctctgttcattgggaatattggtctgtagttttcttttcatgtcttcgtctggctttggtatcagggtaatcctggctcacagaaaagttgagaagtgagccaatttattttttttaaactggtctcagttagggggaaggaaggatggtacacaacagtgtttctctatctatgatgaaatttcatttaaaaatcatttcttatcttgtgaattgatactttaaaaatataataaaactgaattactagaaaagtcatacaaaaatatacaaataaaagccccactgatgaattatattcagcctatattaaattactccatgaaattgataaaaacgttcctaaaggtttactcttaatttctgtgtttacctcatcacagactggacacaaaacagttctcacaaatctgtgaaccagcttttagtctggtgtaaagcactggtgtaaacccatgcttctcaaactttaatgttcatagaaatcacctggggatcctgttcaagagcagattccgatttggcaggttgggggcagggcctgagtctctgcatttccatcaaactcccgggtgatggtgatgcggctgctgctgggccacaggtcacactttgagtgccaaggctatgaaaaacaatgcagacagcaacgtaaatgtgatttttaaataaccctgtcataaattgctttgggacatattttggattttccaagattgttggattgttactcagctgtcaggattctctagatatcagttgtttttcttggcctgtgacctttctgggtctccagctgttcctctataaatccaaggggttgaactagaagatctctgaagtcctttccagatctcacagtctatgattttaagcatccatgtcaaaggagaattatggtttcatttgcattttctttttgtataaacctaataaaacatgaacccaaagttttatgctacaacagttcttaacataatgttaaaaagtaacagtaaacatgctttactaaattttggatgattcaggaagattagtgtcaacattcaaaggtttttccatgttgaagtcttgaagagaaagggtgggggtcttgtttaactttatagttggaaatccaattaaaaaaataactggcttgcttaaagtgtggagacacaagtaaaataggtgtttatattatgaaattcaagttgacacaaaatagctgaaaggcttcaatttcagccaagttgaaatgatgtcattgtcctttatatttcattttatttactgagatacttgaaactttttcccctgttgcttaaaagcaaatgaaaagggtggtaaatctgtggtggaaatgtgttgtcaaaacctccaggggctgtatcctcagccttcagcacatattagtgtgattctgctattcttactacagatgattacagcaaactctgcaatgaagggtggaggcatttggtcagcctccaaagaaagtgactaatatttgacctaatgtacagagtacatgaataacatattcttagggtaagaaaaaaattctggtttacagggtgtgtaagagttcatatttctttttcaattcttccaaaagatttaaaatactcagctgctctattaaatttttaattcctcaggctcaaatgcaaatcatgcattagatgccattattcaattcaatttaagaacagactcttgccccaggaatttattaaaatagtttagaatcttgaagataaagagtatcagttttgtgagtttgtagtaccctcattcttcaaaacagctttttcgttttatacactgttgagtaatggtttccctgggtacagacatttgaagtctacaaaatatataggagtttttatttgctgagattagtggaaagttagcattttctttttctttttttttttttatcacattgaacatcatttaaataatatacttactgtatttctgttatttttggcacaatattttacttggtgggtttccttttattcatttagtaataatggggtcagcttggcaggccttttgtttttaattaactaacacatgattgtgttatgtgttaagatatgttcattaatgttaggaaaaacacagatgaaaatgtttacagtggttcactctgggtggtgggattatagttgaatttcattttctgatttctaattttttgtgtcttttgaatgttctacaaaggccacataatttttttgaattagaaaagaccacaagtataaaattaataaaagcttagaatttctagctttatttctctctggagaaagggaacttttcatgtatctatttaatatgtatgatgcacttactatacaccatgcactttgctgggtctggggaggaataggggaggtgagagacagctgtttcccttaagctcagttctagatctttatctgaccaaggtatggtgggtggggagcaataaatgatatcccccaatgaattattaccatcgtaaagtggtaatcattttatgcttctcgcctggaatttaaagaggatgaattgagattctatatgtaaggcacttggtctaatacttggtacataggaaagtaatcatgattactgtgctttgcacattcatggtgatgaactcattacctctggagttaggccggtctgtttagatagcctgggggaaaggtgagaccagatacccaggtgacattcatctctgagatacctcccccatttctgcagttattcttccacgtggcatccttttaaataccaaccactaaaagtttggtttattaacttaattccttccaagccaagtttctgttgggacctttctctgagaatgcagttctagttttatcatgaaggatagtgagaaactaggatttattatgtagttgtgcaactataaatatttatttcatcgatatgtgagggccacctgggatttttgctttttaattaattaaattaattttatattaatagacaataagcatttgagaaggcaaagatatacctagacaaaaaaaaaaagtcctgaatcactgaaagcagtttagacagagacattgagtccagaaacttcaacttaattctccccaaagtgtcttttctgtgaccccacaacaaagcacacacaaaaccgcattggctttgtatcacagaaatgctttcctgtcccagcagttgattctaataagtttgttttattgatctggttgcaaggggtgctgtccaacaaataatcctatacaataaaaagccttctcaagtgactgttgaatagtcagggtggtgttggtgtctgtgtgatgatgaaggtgatgggtgagcaaagttcagctaatcacagggttattgttctatggtgaggcagccacagcgtcactcttgagctttctgcatgcctgcctcccataccaaacattacagccttcccctaaaacttccagaccacccactggaacaatatagtatataaaaggatccagatgcttggaaagagaaagggtgaagtgcagagcatgcgtgatacctgctcgttggcccttctagattttgagcactgtttttacatagctggctcactaaagagatcaaacttcatctccaagtctcattttcagagcattttttgaaatatatcaagattaaaatgtatcacaaaaaatctgcatttttaaaattgttctggattcaggggtgactgtgcctctacggctctgcacctttcttcagtattccccagaaaacagggggaaacaaatcgttgtaggatgtgcacacacgtggagctctaaagctagacaggatgtggggaatagaggagagagtagagagtgtcaaataacagagtgatacccacgaggaaagagtaccaaatacatggggagcgcccgtttgcagaatggcacaggagagttggctaaatacacataacttacacttgaaggcttaattgcttggaaatttttaaaatattttgttttataaatgtatatatttggaacttaggctacttggtagctttgcagtggttcacctggtgaaatatggcttctcaatctgtttgttcaaaacagatttaatagatagggtttttttccctcctccctgcctgctccctgcaggacagctgatttacaagaggcaatctccttcatatgatactcattaattaatttatttacctaaccccttcattttctctcaccttcctctccagtgttgcttccttagtttctctttatcacattaccattaaaaatatttacctaaaagtctctttctctctctcaagttagcttcagaaaaggagagctggccgcctgttttcacccatatcttcagtgcctagaatagtgtctggcagacagtaggtactcaatgaatattgatgataaaacttagttcatgaagaagttctagacaggactatgagtaaaacatcttggttcatttgattgttcatctgttcattcattcactgtctctcatgtatctattgaagacatagtctgtgctaaggactgtagtactaggtactgggcatataatcctcctctaaaggactttacaaatagataaaaacatcttcttttggtacaatctcttcatttaaataaaagactaatgaaaattagatttagaatgtttcattacaaattttagagtcctccaaactattgattaaaacaatacataaatgtttcccttccagtttaaattaaatcagaaagcttgtgtgggctgttctccttgcctggtttagactggaagaccccagctgtagggaagatgctttcctcaaaccatgggcaggcagagctttcctgccagcgagcaagttggcatgctggtgtttgagtggcagtccattagttggcatcaccacctagtgcaatctctaaaaaatagcaatctttgtccttgaaaatgaaaatactttggttttaaaaatatgtttctgtttttaatgaatccaagacttgagttaatttaaaggcactcacatttccctttgctgatggcgacacctaaaacgttcatgcccatgcacaaaagggtattccatttggagttctcttacattgactcaattccctatttgtaatacacaacatggccaccattgggcaacaaaataactttattaaagcaaagaaaaactgtgggttactgtgttacatgctctttcagaattgtaaagtttccctgaagtagatatatcacagtaatccatggcctctttgtggcctacggtctgccaaaattactgaagatgtcccagcatcacagcacggacctgtggagaggaactttatagcattctggcccaatctctgctttttgtagagggttctgaggagtttcggtgaactgagcttactaaccaggggtcacagagctaattgatgggagtccaggcttgattccattcttctaacatccagtccagtgttgcccaaaatgtgatctactgacaacttacgtcatgattggcagggttactcagcaaaaatgattcctggcccccagcagaatcaaaattattgagggttcagtccagggatttgcgtttcaataagttcctcagtggttcttatggacactaaaatttgggctttttaccaataagccttaagaccccatttccagggaaagctatgtgctaaatagttcttccagaatgcttgcccaagagaatgacttgccttcatatttgctctgctgtgtatattgacagtataaaccatttcaagatgagctttaaggatgagtaaaaacatacgctaaattaggagctgaaatctttaatttagagatactttttccatagtctgagagtaggaaaattttcatctgaaggttgtttattcagtggatgaatcaaaaattgttgataaagtctaaaaaaggtaaatatgattctttaaaattttgaattgagtgtaatggagcttgaattgatatttagtatgttctatttacttgtgttttcataaaaaccttgctggatgaatattcagggtgccaataaatttgttacctgtttggccataggaactgggcagagggaagttatgggaagacttttcagtgaatattttctatgcttcttgatttttgaaccctttgaatatattgcctattcacaaatttttaaataatataaatgtttaaagcattaacattcattgtagggccttagtaggtgattgctctgactctgcccaggctacaaaaacacatactctagaatctaggtgtccctgtagcagaaggtaatgaacatttccaaagggcagagccaggaagggaaagactgcacattcagctagttttaaggaaatcactaattggcttgaaaagacaagtcattttgttttagcacttatactcattattttaaagcccctccctgacagaccactcatcactggggttttgggtgaccttgggcaaatcactcaaccctcttgagactttgttttctagtctgtaataatactgatgaaaactccctgtatttcagttggctgacgatttctgaatacattacttagttttcacaacaactctgggggttgggtagtatggcatgatccctattgttcagatgaggaaattatgacccagagaggttatatggtttagagagggtcacacaggggtgggacatctaacttccagtactgggctctttccactgtggcatgcaggggacgtggattaggcaatttccagggcctcttctggcatccaagtccttgagtatatgagctatttggggctccgtcaacatttgttgaagtcttttggaaaaatccaaaggaaattgaagccatgggtttgcaattttagaagctcgcattgtaattagagtatcaaaatgtgctcatacgaagacaaccgaggaatacttacaaagccaacacataccaagttatgcaaattacaaatataccagatctcatatcacatagcacaaactctgcacctaactaccaaggggatggggaatcccaaacctcagagaataacatttgactctctcatcctctcctaaatgatactagcaactgctctttgagcacccagtaaggcaagcatttgttacgtattatcacatttaatccttaccacatcctctgaggcaggtattattatcccaattttataggataaggaaacaagacttagagattaagtgatttgaataaggcttgtaggtggtaaagcccatcaccaaccagggtccttattattattgttatttttattgctatctcctacaggaaagttaggatcctttattgatttaaggtgtgtgcgctttgtctcatgcctggctcgtcttcttgtctaagagtacacgtagcgtggtttcagataagggtatgttgaagagaaaacttaacgtacctctgccaatacccagggtgagcctgatttcatgcagtagcaatttgagtcgcctttagtgggcccatgagtaaaggaggcccatgaattctgccttcttgcctcaaaactctttattatgtgagcctggcttctcctgtgtagcatctgttacttcgttttgccttccacatgtactaagtagaaatagacaaacttaactcttgcagataatagatgactgaaaacagatgatgggcacacaaaacaggctttgtctccataggattttgttggtaaaatacttcgtctttcacttcaatatattttgttcattgttttgctgctgcttagatatgaaaactttcctctatcgtcctaatcttctgatatgccatcatctctttcaacctcttttccgatgccagagtgaatccagtctgcccttgaatactgtagaaacctcttggcagttgttaacaagccttagcatttactcagtcattctgggaagagaggggaatttacactgtttccttagttcacatagacacaggcgaggtaagtagcctggctgggttggcagaggttcttgaggattgtaaaaactgtgctttgctccggaccctggctcctcacagaggtctgcctgcttgtccttggtctgtgtcctccgcaggccttttacttgagtcagactcctctaatgagagagttcttgggtttcagtctgggggaatccagcctccacccgccagacttcctggagagctctctgctgatgctgaaagtgcctggagccttgaggattggatcaagctccctttcgaaggggtctcaaaattctttagacataatatatttgtggctacaatttgttaagaaaggaaacaggctgtactagccaataaattgtcaaaggagcacatacctaagatagagagaatggtttgcagcacacaacgctctcactcccttttctagtgctctgtattcagtatttacactaacttttagtagcagctgatttctaagaagacttctggcttctgctctttgcattgaccaaaactcttggggcatgtgttgagtgagggaatacctttttattcacctgcttcctagtctgaactttcagataatcggcacttcttgttcccagtgtgaatccaaagagctgaaacagctttctttgtgggaaatcaggtaagtgggatttctctacagggatgcagatgcagatctgaatgcatgtacagtgctccatagctcactgactaagctttaaccagcaagtcagagctatacagcacctataggtactcccacgatacttcaaaaattttcatggaattataaacattgattgtcagaaaaacagacctagttatctcattttgcaggctttgcgtctttgaacacatttgatatccattcctactaaattttctctctgaatctgatctgtctgctattcatatatttctgttgttttattagtatgtgctgtagccagatattttgctaatttgtgtgctttttctttgctttttcataattctgcctaacttcttaggtatagaatttccaaagctagttgttagtgtgccaaaacagccaaaacagctttaacaaaaaaaactatgctttgcttgactgggctgtaagatgacttagataatttatgcttcccttcaccatacttgggggagtacctgtttagaaagggttttatatcctggcttggaataggtctaataatttaaaccctctctcctggaattaccaaggtctaaaactaaaccttatgctaataatgttgaagttgaaatggttttcaaaatgatacccaagtgtttataattttttatgtgctgaactgttttgtttagataaactggaagaagatattctgggataggaaatggctgaaggaaacaaaggtgtgtgcagagaaatacatgaaatgtgttgtaggatcaaagatttaacagtttatatggaacaaggagacctcaaatagggagaggggaaatggagttggatggtaacttggcctggctgagaggacttggagtgctgattattatttatgcctagcttgtttaagagtttttaaaaaataggaaaccacatgtgaatgggagtgggggaaccactctaacttttaacttagccacataggagaagcctacttattcagacctcaagccttagtcctggcaaattcatctcctggtgatggcttaattatatttcaggcatagtattcaaggtgagtgttaagtttttatttttaagtgagaatcttgcaaatgcaagcatatcaactgatagccagtgtcttagggcccctgcacaaacagctaagtatgctcagagagccctactgtggaaaagatgccctagaggaacacccagtcatcctttcctttaaccttcatctcatcgttttctcttcccttccccaacctggacctatcttgcccagccttctcaatgaatacttggcatgaacttcattcactcaactttgtcgctgacacgcccgttgtactgacagaatcctggcttgaatggcgcttgctcagctgtgctttagacagacccttctggctgacctggtttaaacctggctttcttgacgccatcctcagcgtgttccaaggtgaaaaaggactctgctgccccttctgttgctcctctgcaggggaaaccagttgccacttggcaccaggatgtatcaggccggcatccagagtagtaacatgatttagtgaaaatagtactagaccaggaggaaacttgagtcctagtgctggtttgcttttcagtggctgtgtgaccttgggcaaatcattgcaccaccccaatctcagtttttttcatctatgaagtgacgagctgttctctaaaaacctttctgatcctcaaagtcaggaattcacataggttaccaaattcttgaatgaatagagatttgggttctaagtgcttttcttttcatctactgcactgcctttttacacaaaacaggggccatctctatattgttttgtagtgtgcactcaactcccctctcaatcttgggttcaggtaccaaaaagaccttccttcacctgcacagttcactacaaagaagggcattcgaaaagtctgtaagtgggccaggtgattcaggatgtttcgcgttactttaagaagctttttcttgaattaaatcactctatttttagcaactcactgggtgatgcttttaaaaatatcactgataaaaaatatgtgcttgagacaattacaggtatttcacatataatatttcacccaaatcttaacaaccttaaattctctccgcttgacacgtgaggggattgaggcttactgagattaaacaatgacacagggctaagaatgggcagggttggaatttaggtcagaactttctgtgtccacagcctgaattcaactctggcactatgttcactatgaggagtagctgccattgctgtaagaatacctggcgttttgtgcaggagatctcagggaaccctttttgttaggtttcaaagaaaatgatttctaactgcatttcagatgcctggaatttatgctgtgccaagcacttttccacttaattctaaatccgtgggtatttcaaggggaatttaacccatgtggttctgattcacttgtacttaactcatcaaaaaggattgttttgtaaaccttagcctcttcttatgaatgctttcgagctcatatttggctggcattggctggatttcgaatctgccatggttgaagcttggttcttaaatccttctttccaacaactattttgtggtagtttcatcctgggagtggatggaaattgaaggtgagtcatgaaggctcttccaaaactttaccaggattccagtggtatagacagtcactaacctttgaggttcgtgaggtttgttgcactcacctacagccttaccccattaagtagttgaattgtgcatggatgtgatctatgagggtaaaaaattaaaatcatagatgttgcattttcccctgggatggtgtagagaaaaattgtctttgagataaaaggtatttgtggaggttaggtatattactactttggaaaggccttttagcatagagtcttctatttgggagacattagagttatagagctagtggaaagtttctttcagaaacccccattagaaatgtagaaggcaaaagcctatttattatctttgcatttagatgagttgggtacattcagttctgataacctgctgagttggagaattaattaacttgtctaattaacttcacatgagctcatctaaggaatgtgtgtagttgtgtggcccaggggaagcaagagcaatttttatacctagttaacagtttggtttaagaaagatatattgagtgtcttctattccaggaagttggggatagaagataagagttcagagataaacaagactctctcctcctaaggaacctaccatttggtaggttataacctatatgcttctctttggaccatggccaaatggtatgactggcaaatagtcaatgtacagcaatacaccataggagctcagaagatgaagatgttcattttgatatatgaagctggacaggcttttcccaaaatgcagtgtttaagtttggtcttgaaggataagaaggcttttaaaggcagggtcaagggcgagacaaccagacatgttcttgggtaatacagacaatgccaaatagtctccacagatttctgctctgtttatagacgtggagtggggtgactctgcggaggtgaatcagagcgttagaagctcatgctgggcgaaagggggttgtgcacagtcctcgataatgagcagctgggattaacatgacagtttttaaccgagcacagattttcagggctgggacagtttagccttggatcaagaagaaaacacaggaaagggacaaggaagggaacaagatgtgaaggaacagtatgtgagatttacacatcatcactgcatgccatgtttaaatagaacatactgcataacatcttaacatgcccttacatttctatagtgtacaaataatggcttattctgtctcacgttgaagaaaccaattaaatgatgcatgttgggtataaaggttttttctattgaaaatatcattgtcatagaatagaaagagttacaatcagacagaaaattaaatatcttaaatatttctcttgtatagtgtttacaaacaccctattatcatccctatttataattaagaaaactgtggatcagaaagtaaataatttgcccatggtcacataggtatataagacacttccatttcagtttgcagatataatgtgtatgtgtgtatgtagcttaccttttctatttgtcatactttttcaattcactatatgacacatttacagagtatatgtcatgtatgtgttagttacaaacctattttaaaaatgaatactgcccaacctaagcagtaaaatatgactgatacccatttaggattccccgtaccatctctttcctgcttctccacagggaggtaacctctatcatagattttattacatatatttttttagctgacaccaacattgcttctgtgttaccatggtttacagtgaatatatttacaaaaacaaaattgggataattttcatttcttgcaaacaacactccaacactgcactgaaggctttgttagctcaagatttaggagtatgagaacaaggtcctgaaactgatttgaacgttgcttcaatctcgactgctgtgatttaatcctggggagcaagagggcaaaaatgaggccaaaggggaggcatgaagtaaccaacagggcctgatctgggatttgaaagatgtagattgtcgttccatctgccactaatttgttctgtgacattgagaaaataactttgccgctctgtgttttgatttacccttgtgtacattgtaccgtcattttgaggaaggcaaagtagtggggaaagcacagcttttagaatcagaaacaccaaaagctgaattctcattctgccacttactgtttgtagaaccttgggcaaatttcttaactttactttgagcctcagtttccttctttataaaatgaagcaaaagtcttcctcagagaattgttgtgagaattaagtgagacagcatgtctcccttgtagccagcaccatgctccataaatgctcattttctttttcttcttctataagtttccttccaattctaaaataggagattccagtgctcatcttatacataaacgactgaagcacaaccagctcataattatggaatttcctgtattaaagggctcaacatttctctcaaatcagacttgtcattagaagactttccaaggtctggatgaatcttttgaaattaacaataacatctggaaaaaaaaaatggctcatctcacactcacagagtagagagaaaggagtgagaagtattatataagttcatttactacccttgattctcccgttccctgagccaaaacaatagactataaagctgcgacttcatttttattgtttcataagccatctgcatttgcataaagtgtcagtaccgttaccctatttaaaggttgaatgtcactgtgaatgcaatacttaccttttactgtctcccgggaacctacctaggcatttacatagttctttgctttcttttcaatccattcttattgacgtattgtttgaaattggccactgtttgggaataactccaaaattccattatttccatgtgtccactctgtttatatttttatgattgttatggtaagcaatcaaatatgtaacatttgggaactgaggggaggggatggtggtctttactttcaattgacggtagtatatagggcatatcacattcaaaatatctcaattatttaaaaaatagaatagagaaagagggtcatctaacagagatattagtgagcttatttaaaaaatagaacgtatcttacaagtgagaactggcagtaatcttatgatggtaatgatgcatatgaccatttatttgatttaattggaaaaatatgtgtacatcagagaacagtggattaacggagatgatcagagttgagtcatgtctcaacattagatatcttactaggtttcgaggaagaaaaattaagttgatttggggaatatgagcttaggaaggaatatctggaattctcatttgcatttgggtaaaatttggttatgcacttgacctactttgctcaatctctttgctcttaatttttaaaatacaagctacataaaaattccagaaatgtagtatcttatgcttggattattcactcatatatatgtcaaatgacaacataatttgtggacttggtgtctcagttagaaatgagtttggatgcaaatgatgcaaaacccaaccacagtgacttaaacaaataggggttaatttttcttatgtcaggaatgaatttggaggtatatggtagctggtggtgattccactgctcaaaaatgtcatcaggccagccagtggctcacgcctgtaatccctgcactttgggaggctgaggtgggaggatcgcttgagcccaggacttcaagaccagcctgggcaacatagggagaccccatctctacaaaaaataaaaaaataggcaggcatggtgacatgtgcctgtagtctcagctatttgggaggctgaggtgggaggattgcttgagcccaggaggttgaggatatagtgagctgtgatcccaccactgaactctagctagggcgacacaatgagattctgtctcaaaaaaaaaaaaaagaaaaaaaaagtcattgaaactgaggttcttctttctttgtgctttataaaaccacaatgagataccatctaacacctattaaagctgctattaaaaagtcaaaaaataacagatgctgcagaggttgtggagaaaaaggaacacttatacactgttgttggaagtgtaattagttcaaccattgtggaagacagtgtggtgattcctcaaagacctaattacagaaataccatttgacccagcaataccactaccgggtatatacccaaaggaacataaatcattatattataaagacacatgcatgtgtatgctcattgcagcactattcacaatagcaaagaaatgaaatccacctaactgtccatcaatgagaccggaaaaagaaaatgtggtacatatacaccatggaatactatacagccataaaagggaactttgcaaggacatggatagagctagaggccactatacttagcaaactaacacagcaacagaaaccaaatactacatattcttacttataagtgggaactaaatgatgagaacagatggacgcatagaggagaatagcacacactgggccttttggagggcggagggtgggagaagggagaggattagggaaaacaactaatgggaactaggcttaatacttgggtgatgaaataatctgcacaacgaacccccttgacacaagtttacctatgtaacaaacctgcgcttgtacccctgaacttaaactaaaagttaaaaaaaaaaaaaaaagaacaaggtcttcatgaatccaggcttggacttgatctgcatgtcacctttatctttgctctatattgcaaattcaactgttgtttttaacaaaaggccaggcaagggagtagagataacttagaacaaatctcttagctcttcagaatggattaaaaggtgtgtcttgcagattgtgggtcattgacgtcatttgtttctaagaatagcgggatgtattggttatgtgtacccatggtatgtgtgggaggagaggaaaaatagaaggaccagggactatggtaggtattttgtatacttatttactactcatacaaccccaggaagcagagaaaactgactcaaagggtaactttattcactgccacattgataatcagcattccagaattcaaatcaagcatgatagattcacggaattataagtagttaattacatcttgagcaaagggaatgaatagttcaaaagattaaggatttagactaacttaaagatatgtcattttgcatcctccattcattcattcattcattcattcattcataaatacttgagtgcttattatgggcccatggggatattctaggccatggagatgcaaagtttaaagagacaaaatatgtatccttaaggctcacaatctgatgaaagacaatcatataagtgagagtttaccatggagtttggttagtgccacagaggagggaaggagtaagtcgtcaggggagacttccaagtggaggaatttggtggaaaaatagggagaggaaaggcattccaggtagaggagatggcatttgcaaagacgtgtggaagagaaacagcaccgtgagttgaggaactgcagttcactcagtgtcaatggagggggaaggcatttagggaagaggccagagaggaagccaagtagggagcatttcacagagcgttttagggtctaactgaagttaggttcactccagcagggcaaagggaaatgagggtctacactaaagcagtagcaattgaatttcagaggaggggcaataaagaagctgttgaggtggtaaatttgacaaagtttgcgggtgattaggtgggggtgtgagggatactctgtaatccccgctgccctgagtctgtggccctgtgatgtgggctgtggtgatgccctttcccaaaataagaagtgtgggaggagcaagtctaatggcaaaacaagcttctatcagacatctttctacacgctctgcccttcctgcactatggaaacaaccttctcttcctaacctagctgaagccatcctggctcaggccagctgaaaggccacgagggcgtctgaatggttcatgatttgaccacttgaatgccatcagagagtgatgtgtctaactcgagacgaacagcaaattagttgctgagctgagactggcgtgcaggcctcctcacttttaggcttattgtctttaggttctagccctgcactgtgttctgcctaaatgggcaaggtaacattatccacaaatgcctgctgccgtttggggaaaactaaccaggacggtatgtgttactaaaagttagctatcaatttatagagggcagtgatgactttcatgcaggtttatgtttctatgtggctccctttggaattacaagtaaaggaaggggagaactggagtcgtttttttgtctgtgcttgtgtcactaactaggagagtttttttttttcttttctttgagaatgaacatataaaactctagtaaatcagagtaagttatctaagtaatgccaaattcttattagttacttctttttaaatagtgcaggggattattaccttttctgagccatggacacttttaagaatttgatgaaagaacacgttcttcttccaaaaaggaataaatgaaggcactgtattgagtccaagtgcattggttgcaagtaatggaactagcttaagcagaagaggggatttactgtaaggaaatcccaggttataagaaacccaagggcaggtactatagcagggctttacccagggctggaagcaaaaaccaaatgctctctccaactctttctggagccagctggtctctatccctgccccatgcaggtggactgctctgtgcatcatgtacatgccgcctccctgctcccaaggtaagtcacctgaggtctagccagctgcagaggtgaacaccagtgctcgtcaatcccaattccagatttctggaagagaatatgtgattgctcacttaattgtgttcagattcatcgaacttgcagatgtgatttatgtatagtttcagggcacctttagacctaccaagtcccaattgtggtcttcaagttaagaacccataactagagaaatctgaatgcccatagaccagcagcactaacttttagccgtacaactactgcagaaatttgaaaatacatttgaatagaaagcatttgcatgagcatagttcctaagaacacttgctttgtgcaggagttgtgaattttaaatattagtagtgaaatcccaggatggcgaatatgatgtattttaaattataacactttccaaggtcattgatattctattcctaacttttacccttaaaggtttggaaaattccattttaattattgttaacatgcttcataaatatccaagggaataaaacatagacctgttaatacatccagagagctaaaatctggctcaagttgttttttcttccacagttggagaaaattgtggtgtttggcttccctcttggggcattttaaaccacttttaatgctgtctcttattattttctaaccatatacactttccgaacgtatctaactagctgccttagatgaaaccccagtgtctggccaagctgatgtaaatctctagtaagtggtaagagggaacagagtaacacagtgccctgtcagtgttcagacagtacatgatttagtagttgtaggacttatagtctcaggagcaactttaaatcttttttctagttctatagaatggaagtttctaaggcatatactattctgccactggctccactgggcaacacttagctagaactagagtggcctatctgcccatgggatagtattaagatttaactcttcacatcatgtgtacctggggtgtctgggaaataactattaattccaaagagcaggatgaatatttgcataattgctagtctgtgccataaaacagttgtcactcaccagtggcccagaatatcgaaatctgtatgtttccagtggagctgccaagagaccccatgtgattgtcccattagtgatgtgttctcactccacttagcaggtctgaaaaatggacgaccataaaataacagtgaaaactcagttctagggtctgctgccttagttgttggtgtctaagaatatggatcatctgttgtatttgatatctgagcacgtactgatttttgtcaggaatcttctcttgttgatgaattaaatctacataatcgggttttggtgctgctgcctctcccaccccctcagctcccatgcctgtcttttgcacggttcactcacgtgttctgagtaatgcttgtactttcttccaacttgtctttcttcagctgagttcagtgccagactctgagctggaaacagtctcaggaatttttcattcatcagacattttcttccaaagaaaagttctgagaagaggagggccaccttgatagtatgttagcatgcttctgtgactgtgtgtgtgtgtgtgtgtgtgtgtgtgtgtgtgtgtgtgtgtgtgtgtgtgtgaaagagagaagatatacaaacaacctatataccacatatctattagcacatggatatttgataaaaagccaattctagaaataacatttgccaaccaatgtatcaaaaccatctccctgccgtttatctgtcttgatattacagaaagttcatatttatagaaggcatttctcagctgtggttaataatggctgaacttttgtccctgctttaagttttccaccagatctctcagaattgatgctatcatggaatgtgaatgtggtgtgtctccatttcctgtagaatgaactcagggctggcagctaaagctagtggtcttggattcccatgccctgtcatttacgaaaggggcagtggagttcctctggaggaaatcccacccaccacgccaggattccatcacatattgttggtctgggccgtgggtacttcatacttggttttctgtgaaaattcaccaagtgtgtttgaagtaagaatctcaaccctaatgtttatacataaatgtctgaatatgataggagtaaatgcttgctcacaaaaaggaagggaaggaaaagaaatttataaaaaagcaaaaacacacaagtcagggtataattacattatacacaggttttgtttttgttcattttgatagcattaagatttacagataatatgattttatttagggacagcctcactaattcaagttacctgttctacaccaggtaccttattgtgagaatgggaagaacttgttaacggattattagtatttacagcctaatcttccctagtttccccgtttcagcaaatgaccatttattcagtgatggaagccagaagcccgggagccttccggtttccctcacgcttcccatctgatccatccacacgtgctgttggttctttggcccaaggacgtcccctacctgctggccttccaccctttctatgccaccactctcgccaactttcacctcaaatccttcagtagcctccctgaaaccctttccatttcaactcctgagcccttaaaggagcacacttctcaaataacagtggcttttattttcagtggctttttattgagctttgagccagatccagactcctcatcatatcccgagatgtcctgcataatccagcccctgccaaaggatccaacctcatggcatgccccttcccctttgcactcaaagctctggtcacagcggctttcttttaatcctagagaagccaggctatctgccagcccagagccactgttcttgctgtctcccatacttagaaagcgcttagatgttgcacagctggcttgtgctcatcctttaggcctcagtttaaatgtcacctcctcaaagaagtcttttctgataacttttaccaaggcaggtgtacccaattattctctatgacagcagcatgcttgtttcatttgtaactaaattacaacctcaaatctaaaactattttaatgtgttgatctatttattcactacctcctccacaagattgcaaactccatgtgaacagaggttttatgttgtgctattcactgatacagggttgtggctcaataagtatttgtcgaatgcattaaggaaacccatgattctgttttacagttgtaaaatgtaggcctttacaactgtaaagcattgaagtcaaagtgtttaatttaattttaggttgtggaatttctttctttctttctttcttttttgatacagggtgtcactctgttgcccaggcttgagagcagtggtgtgatcgcggctcactacggcaagcgatcctcacacctcagcctcttgagtagctgggagtacaggcgcctaccatcacacccagctacatttttgtgtattttttgtaaagatggggttttgctgtgttgcctaagctggtcttgaactcctgggctgaagcgatccacctgcctcgtcctcccaaagtgctgggggtataggcatgagccactgtgccagctagaattttctttttattgtgttaaagtatacataagataaaatttaccattttaaccacttctttgtgtacagtttggtggcattaagtacattcacattgttgtgcaccttgtcacccccatccatctccagaaccttttcatgttcccaaactaaaactctccattcctccctcccctaaatccctggcaaccatcattgcactgctgtctatgaatttgactgctctgggtacctcatattagtgcactgcaatcgattgatattttatatcaatttatttttattgcctctttaccaacatatgccttcaccctccacgtacacaatattcagtgttaaaattggcttgctactgaaaatctcatttctaataattatttaatgataaaacattctattaggattcttcatgaacttaattcatcttttgtggaacttatttttggaaaataaacaatattacaaggtacttttatgatatacaggttaatttaagaatatgttgcccctgacaatttttatatttaatcataagaccctttcctcttgggctactaatcttgtttttggattggagagaatattttatgcttcatggctttgaaaaaatataaaagaacaaataaattgttatacaatattattgtttttgtcttgctgtttaatagctgatgctctgtggtcaaacttcagtgtttggtttaacgtggcatttcatacaagctgttttaaaagggaatgaatcagagccaactggttctttaaagtggaatttgcagaccattaagaatgaaagtattctgtatgattttattatcttgatggtaaatatgtcacccaaactatgatttgactttaccgattctcccagtctttttttttctagtaaaagtagagataactttacaggaagatgaaagtcagtaatgacttgtaggatttatagtgaaggaacaaataatatcaggtaaatgattatttcaaaatgagatattcttttactctgaacaagatttctaactgttttcttcatcatggaacagaataaaatgtggtaacaatttgctgcagttgaattgctgccacacataattgggtcccacagaactatggcctggattttggtgaattgcttagtctgcatgttagattaaaaggtgtacaacaaatcaccttgtttctgcagttttgaatgacatttacatttaagtcatagtggtaatacttttcatttatggaataaagaaaataaaatcagggaaaatactaatgtagaaatggttttgtttttttcctatatggtttatttctaaagtgctttttaaaaacatttagttacaattaagccatacctcagaagcagtttgttaaaggtaaacattttgcataatacagtttggtaaattttgccaaaaggttgtattcttttaataacactgtatagaccatgttaaataggtaatcttgtgtgcagtattttatataaatgcatggattggaaagtatattcaaaccttattgtgtcattttaaaaatgccatgtagcttaaataagatgggagaagcaacattgcatagtaaaagtaggcctgaaaggaatttctttcccctgaaattttattataaaaaatttcaaacttaaagttgaaggaataatataaagtatacacatatactttccacttatattgaataattgttcccacttttatacacataatagctctctatgtgtatgtacacatatgtatgtatatatgtgtatatagaatatgtaaaatatatattaaaatatgtatttattatttatttacattgctgaattatttgaaagttaagttgcatacatcatgagacgtcacctctaagcactaaggacattcttgtatgtaaccacaataccgttatcacacctagaaaaacaacaattctgcagtgtcatgtagtatgtagtccacataagatttctgaaattgtctcttttagaaacagtatccagttgagttttgattattatgatttttaatctaaaataatctctgtacttcttttggtgaagagaaagtaatttgcttttggaaaagttctagacaattgccttagaaaatatcacatgttctgagttttctggttgtttccttgtggtgtaatttaccttgttcctctatccctatattccctttcagctagaagtttggtgtggaagtttgattagattaagccttgacactttttgacaagaaacttcatagataatgtgcactactttatattttataaaatcaggagtcccggaagaatttcagacgatctccgtgatagtgcaattctggaatgaatcaagagttgacttttggtgttactgatgctaaataggccttgtatttgggccccaattggagaatgcccctggaattccactcagatacaagctgcagcagtgggtaggggttggatgtgagagttcctgacagcggcatgagatcatgtatatcagtgtgctttgtaaaactagaaggaaagagactggaaatgggaattctactaactattaggacactgcagtagtggatgatcaaccttcctaaattttgactttgttgtttgctttgatgagctggtagttagtataattaactataatataattagtaaagaacataataaagtgcctcataatcagtgcagcactgtggaaatgaatagtattttgccatgattaggatgtcagtcctagttgagaaatactgggttatgtcgagtggcagtgatgccagtttatgggctggcttatgttcctaaagttagactttcagataagtagttgttatcttgcagagatctccaattaatcatggcacacgagtactcttcattaaaggaaaagagaaagaaggaaaaaaaatacacacacacacacacacacacacacacacacacacacacacacacacatcttagagtcctagagggcagaaataatcttggggagcttttgcaagacgtatatgcctgggccccatgccacatctactgaatcgggttccatggggaaaactgggggaggacagggtgggacccaggcatcagcattttacaaaagctcccccaagtgattctattatgtcctaaggttaagaatgattgcagtaagaagaagtaacagcagttaggaggctgattatgataatggaacttcttaactttaattttccttagactaaaagttctctgaactccttcctcagaaagttgtattgaaattccacacattaggagcctaatgttccccaggccaacctacctgggagaaataagtgtgctgtgaccctctatgtcatggataaattgatatctcattcttttgtttgtcatttttatgaaaagaaggatttaaaataattggagcctagtgcccaaaattatatccttgtgccttccctgcagtttgtggtttagtgactgggcaggagggacgagaattcattgtaccacagaatattctttccctgtaaacgatgcatttgcttcggggtgaagtctgattacaaatgaaagtgaaataatgctgtagaccacagcattctgagctgcagagctgggcatgagctgaggatcagaggctgcagacacatgttggtcagagcccaagccttgaggccaaatctaacgggactggagagcaatccttgagctaaccactcagaatgggaacatggagatgcagaatttcccatgaaccagccacactggagtaagccagttaaaaacaattagagtcgcactttaattttggaaagacttggcctgttgccctagttcatgaaggtcttataaggaagtgattgtagagcaatttgcaaatagaaagcatttctaatactatattttagttgcattaggaataatgatttacactgaagccaggaatgagtcagacgttacacaagctttgagttaagcacactccctgtctaatgctgagactatctgaaaaaaaaaaaaaaaagagtatgtaaatttagcttaatatcatgtaagtgctatgggaataattgtaaataattggattattagtaaggaattgggagtgtgggcagatttctttctgcggttggagtattggactaaaaacagcataaccttggcaatctaaatgaagtacaggacgaaaagcacatgccgccaaatcggaatgacatttgaaaaccatgttaatacagcatttaccttccaagacatttttagatccaattttatttcatccagattatgcctctccctctacaatcagcaatttttgtttaaaatatggatctacaaatacatttatatccacttgctaatctgtactgtcaaataagccagtttgaatttgtttccaaaataactttgtctatagtgataaatatctagcacagaaatgtactaagtccatagtttctattctacataaagtattcgccaaatatatagtatacttaataaattggatccctgtggactgttgggatgcctaatatagattgtcagaattaacaactaccatctcgattctatgtatttcatattgaaataagaataatacgttattgaccctggaaaagtcttaaggggtttttttttttaatgaagatcttccaatgagaaattcacatgtgaagttatgaatcagtggcagacagaactgaatcagatttgtattagcattttgtagagtgtctggattttgctggtgtcactcacaaaacaccatatttgtatctatcctgaaccttggcaatcctcatatataagataattccatagagtatcttggcaagaggaggtggaaaaacaaatcccaacagtgttgaagagaggattataaattaaaattcatgttgcgttatgctttttaaaaaggattgaatatggcaagctaacctgaatctgtttgattaaagcatttgcacttgtctcagtaaattaacagaaagaaacaagcctaaattctctttcttgttacctaacatggagagttttatttattttttaaataaaagattacactgctgtgatctttctagtctcagatgtaggatatatatagtcataaaaatcttgatgactgtttttatcctgaaaaggattcattgtaatgtacactgaatgctatgtgtaataatgaagaattagaggcaatttaaatgatagacagtaagaaaattactgaacacattctgttataacttgatggaaaattatgcagcaattaaaatcatattgtagaatagcatttattacatgggaaaaagctttggcaatgttaagtgaagaaaatccagcaggattcaaaagtatatttttagtataatccttattttatgattaaaaaaataaaacacacacatgcatacacacaaaatcttacgtacgataatataatcaatacgttatcaagggtttctttaggtgtaattacatttgtttatatgctactgccttttctcaattgtctaaagtaattacttaattttgaattaaaatacataataaaatattgaaatagaaaggaaagaccaaacagcaaagatgtatttattaaatccctataggtatttgtttgggagaattgagccaaaaaaataaagatgactttggtatttcactttgtccacatagttcctgcattttaaagagattttgttccaaattactgcagtgctgagtgactttttcttcatcgaaagaacgaaatgagggctgagatttattcaacagctcagtatttaatacttgtttatatttttgtttgaattcagtatctgtggaagaagatagcaggttttgaataaatctggcatacaatgtaaaatattaaactatacctacagcttgactatataaaactaaaaaaacagtagagtaagaaatgcataaacaaagtaaaaaaaaaaagacaaatgataaacagagaaagtgtcaggagacagggctggaaaggtgggtggggctatatcatgcagagaagagggacacagaggtcttaggcttgtcttttggcatggtgagtctggttgcatgtagatatcactcacacaatttttgacctgtttgcatatcacctgtactagtatttaatatttttaaaaaattgaattaaaaggtttttcaattcatcatcctcatagcagacataactgtgaaatcatgagtctgatatatttatgctgtttcataatacacattaaaattaatatgtgactactaaaatctaaaattatcttgcatcctgtgagtgggacataacactggcatggagggagggagctggggaactggggactcggcatttggaccatcctgtctgtctctccagtgctgccatagcttggatatggtagtcttctttacatatatgactggcatggagttttgtttttggaattcttcagaaggttgatcttacagcatgggcatcagagcagtgctgtttctgcaacaccattgaacagaggtggttcattgcagatagcagaggagagggaggaagagcacgtagtgatggggagcagatggagttgaaattccaagggaggggttggagtggagatgcaagaaaaagaaagcaagagagaacacacaggatagagggatgccagcagataagattcagctattgccaaaacattgttacgatccagaatgttgactcttgctggtactgtaatgaaaagttgtccttttttccttagtaaatagcatgtctgcgatgtcctatgagctacttaaagaaagaagaaaataatgaaagcatcccagtagtttcattagcacagccagtgattttcataaaactgttgcgttcacaggtgaaaggaacttactggggtcattgagtccatttttagactcacagggatcactgcacctaaacacttctgaaaatgacctggaagcatgcaaatgttggtttgtggatagaagcccatgagtcttaccccagcccagcctcccttgtctgtcaaggtcattgtagaaccacggaaatggatattatggccctgatttctctcacaaggggacaacctgggtttggtcctctgtgctcactacgtctttatctttcttatttgttgttggctctctctctgtaggaaaaaaaaaaaagaggcagatcttatagctggtggtagactgctctgattggaaattctcttgtggacttagcttatccctgttttgctttaagatggtccttttgcctaggggttacaatgatttcagaccagtgtcctcactctttatattaaaacctaatgtgttttgcatggacaaaattttaaattcttgtttgttggtttgcttgttttgtatttgaaataagatgaccccaactcaaaagaaacagataaccatttcttttattgaaggaactcccaggaagaaggtgccatgacttgcctcactgcaagcttcaaaattctttgctttctcagccctaaataacaatagactggaagctctgtgaggtcagggatttggcctcttttagtcactgaagcatctgtatcaggcataggagctgattcagtgtaggcactgatatattttcttaagtaatgagtggataataatattaccatgttacatttgtatagcaattcacagttgtaaagagttttccattagctcgcctgatcctcacaatgccgttttcaaagtgggtaacaactgatgttttcatccctattttgtaggttaggaaatcgggttcagaagtagaatggtctatccaaggccttacacagggacagtgatgcatgattctgtccctgaaattcatttctcaatttggagtcaagcaagatggagcacagctgttcctctgcatgatggttcctgcttttctggattttcatcagatttttattctttattttcagattacaggacaggcccatgttttactgtgatcagcaaccagatgtgccagggacaactcagcgggattgtctgcacaaaaacgctctgctgtgccacagtcggccgagcctggggccacccctgtgagatgtgtcctgcccagcctcacccctgccgccgtggcttcattccaaatatccgcacgggagcttgtcaaggtaaacccgggctgatggaattattaatggattaatcttatttgctctggagagccattctccaatgaagttgaagagaatggaaaagtagtgtcagctacataacttcacaatttcgctgactgcatgatatccaactaaggcattaggaacgtggctctcgagagagcagctgaagtcttactgaatgttttcttgccaaccattccccctttctgaccccagaggtgtttgtatgtacctctgactccaggggtggtgtgattctgtttacagcgatgcagtgcattatggcagtgctgtgtagaaacacaaagcaaggtttgtgaacaaggtagtttatgtttttcttaattttttttcttcatttgaaactgttgagttcctctctcatgggttgtgcttaattgacctgaagaaaattgtttctctcgacattttgcatgctacattttgcatttttttacaagtccaaaataaattaggatttgtttcacagttttaaatatccccagatgtcgcctgctagctgcttctcctgcctcccgtagaagcccttactctgtttttggcttttactcctgttcttccagctgtacaaattcttttattgtctggatgtctggcaggaaacaggaggaagtgaacagaggcagctccacactaaactgatgggattgaaaactctcagcctgtatctgtttcctttagacagcctcaggactttttatagcaagttgcaatattttcagaaacttcaggatatgcttttctgaggcaaatagataatactttggcgttgttttgtatgttaattctaagggtaatgtgcaataaaacagaacttgagcttagtcacacagttttgtgggtctccattacattccacttcaataaattccacttctgatattgtcattcctggccttcagctcccatgtacaacatacagctcctttggatgcccttaaatgtatccctctgaatgtcaggagaagaaataagtcaccttgaaactctaaaattatcaagggatggattgtagtattttacaaaagtttagttgttttttggtgccttcttatttttcccgtttttagaaaatcccagtgagttttgaagaatttgttcatcttgggattacaaagttagctaatacccatgaacttgttgacagtgaccagagagctagacttttaactgcctcagctgcccatcagtgacccattgtcagaggttagggtgctaatggaattgggggggtggggataatgaactgccttctctttagctttgctattcgtttcataaatctggatctttccagcatttgcttcctgtttctttctaactctgctattcaacatccaagaaaaaaaatgttttttataagaaaagttttgaaaacccattgaatcacaatggcagttatattgctattttgagagtgaaattcttcatgtttggttgttgttgttgttgttgttgttgttttttctaagagattctgccaccaggttgtggctcttgctccttgctggtgtttccagtccttgggtcagatgtgaggggctgtgggcaaatgggttcataaaggagcttattctgtcttcagacctggagtatacagccagtggagaattgccttgtctatattttctgttggccagaaatcatgatcaacaagacagctagttctgcctatatgtaaaaatcttgattttcaaaaacattttaaaaaatacattcaacacatcaagagaatggaaaattctggtctaagacaaaactgaaattggctagaaaacataatttaatgattttccacatataatcatgtatctgtgggttaagatatttcatttaaaacagtaagtgatacttttataataaactaaattgttgtttctttaatatcccttttactgcatgctgacttttctcaagaacacaggttgagatcttataaacagcaatcacttttttctttactcaatgaagagtgaaactaaagagcacattaagcttccaggtttcaaaaagaatacattagactgtttgcttggggattctttattaaatcagacttttctgttatgaacaaagagatggagagaatgtacatgtactttataatctttataacaaaagtagtgagcctgaaatgattaattttgctcctggaaggttaatatttgggcttacacataagaacccaagttagtccttaggtgctggttatacaacagtgaagaaaatggacaaagtccctgctttctggaagcttatattgaagacattttgaagacattcaatttattaaataaaacaaacaggcatgtattaggtcagtgggtggttagtcctgtggaaaaaaataaacagggaaggaaggatgattagagccagcagccaggtgttgctgttggactgtcaagggaagggctcgtggctaaagtggcattggagcacagacctggaggatgagacatcgtgggccatgcagctctctggaggaagactattccgggcagaggggcagccttacagagctctgtggcaggtgcatccttggcatatttgaggaatccagtgtggtgggagagataggagggtggaaaatgggtaaaagatcagagaagtcatgtcgaactccccaggacatagtacacacttgcacgttgagctggggaaagacatgatctcactgacatttacaaaagtggcttctggtggccactgtgccagcaaggtaagtctgcagctgaaactacacactcactcacctaacaatctctctcacttcttggcctaattttctgagttgtttaatttttactgtgcaaggcacttctccagaatgtgaagtgaacatttccacttcatttgcgcaaaaacattagctgtctcgtgtagtctgagtgaccttcaataaattccgttttaactaaatcactcagtacaactcttaaaggtagtttcattgtagaaatgtattgcattttgatttgcaagattttttgaataactctgattattactaccaatctggagataaaaatgaggccgtgaataatggccttttaaacgtatctttatactttgctgcatatgtgctaaaacccgcaaaagttaatgcactctcctctacattaggaaacatggaaggtgggaaaacaaaaaatacttgtgacttcttatggaacattattaatcaaacgatgtattttacataatgcaattgtgagaaacagtttctctaatcatattccaaatattgtgatggacaaataactcaccgatataaatatggtaacataattgtggacaaattatcacattttattctgcaatgaatttcatatgagttttttttttttctctctgtcttctgtaatctgacagatgtggatgaatgccaggccatccccgggctctgtcagggaggaaattgcattaatactgttgggtcttttgagtgcaaatgccctgctggacacaaacttaatgaagtgtcacaaaaatgtgaaggtaagaaatcttatgctttgcagttggggggtgtagtgggggcaggcaaaactcaacattagaaacaagcttgtttgcaaattattcctaaatccttctgtctttgtcatccctgtgaatgtgtaaatataatatttttaacagtaataatatgcctttgtgctattggaccagaaaaaccctgtagctttttccacttttatagacccaaaacaagaggtccatctgaatcaaattaaatattaaaaacatgaaatatttttgaaccaacatttggtttaaaatgttcaacacacatgtttttgcatagttctagagacatgaatttaaatttggtcattagatatcattcagaataatatatcttccgaagtttttctagttaaaaggtatgtttgattttgtgtgtggggaggcagattgatctattaacccttatatttatgctcctagtacatgctcatgattttcttttctgggggatggtaattgcctatcaaatgaaaagcttttaatgttagtcaaacagaaaagtaatttgagataatttttatatttacatttagtttatagattgaacttctacaaatatatatacagaggatgtgtttatagtcaccactactgctactgctctttgccgaaatgaggcctgacttccaattacagtcataatttcttcgtgagaggggagcatctagaaaatatgtaggcagcattggactctcttttctttgatgagtgcatgtaacttatatatagtaatgtccaacaatagtgtaacagcattctcagggctacatctctcatcaagatcagaagagaaaactttttccttcatcctcaactcaccccaccttgaggtttcacttagatggatgcatttttattgaaaacagatgctgttatatttatgcccctagactctaacagtgagtacattctaagttatttgtctgggctggataattaaccttgtcagttgccactgtatatcagatgagcaaaagacagctttaaatttaaggtgcaattcataagttacatgtaagacatttaatatctacttgccctgaaactgaataatctaactctgatagaactatctttatgagttggaattgtttttaggttataaatcatcattgaatttataattgatactgcattcttgaacatgttatacatagttattcggggtagttgtgaaaaaatagttctttctaaagacttcttaaaaaaacattttaagtttcaaagaacaataaagttgactcttgataggccaatgtattttagaagttgtactgtagatctaaatttgaagcagagaatgttggcactgaaaggggcaaagaactcagctatttccacactctacattatatattaaggaatggtgtcttgggtgtattaagtaccctgtctgaggccattcagacaagactgctcaaatttacctctttaactcacactctggtgcttgctgagccatattacattgtcctctttcctagatgaaagttattattctggaatagattttcgggccatatacacacacacacacacatacacatatatatatacacacacacacacatatacacacacacatatctttatatagacacacatatatctatatacacacacacatatatatatgacattaacttaacaagccattaaagtttatcacatgcaaaacctacatcaacgataggttgtgttttatcttttaggctttctcagtttaatatattcagcttcagaatatataatcagcttcaagattgaggggagtatagtccttatgacttgtccagtctgtgttttgttttctgaaattatgatggcttccagcctgagtagaattgattttgtctcttgcttttcattcagacaagtcaattaacaggaatggtctatggatgtggactagacagaagattctaatttaatgctcagactgaaagaaaaatcattcgaatctttttattgatgctaagaaacctattatggtggtgtatccagtggaccaaaaactcagtctattacttaatccttttccacacacaaaaattttccagctacatgtgaaagtcagcagcaagataaaaacagactattttggctagatttttttttcctttgccatctactattacattaatttagataatggttttttccttcttttccttctagtatcaatgcaaaattgatactagaggagaatgtcctgttagtgctatacattctctggcctggagactggtgtgaacagggttgacctgtcttactctggtaagaaagtaatcaggaagtaccctgagagctcttggcaagccgggttcactttttcgacgtccttgctcttttccggttacagtgtctcactgtggaaatggcataactctgggcatcggctggtgtctagatggccaatagagggaacccaggaagtctggcccgtaatcactgaatatgttccctagaaagatgatgagtataaccatggggttctgtgcccttgtgaaaatgtcctggtacctttgccattgctttgagtggctttttaaaggtagcttcctttagacttggaggggaaggaattgagtacttttcatagaattttttcaagaaaaaccaattccatcaaattggctttagcaaattcacaagatgctaaccctcacgctctcagatctgagaatgccattattcgagttgctttccatgagatcttcctcttgcagaattctcacttccttcctaaaatgtccctctttccaaaaactaaaaaaaaaagaaatgttacggaaaagtgttttataaatacatataattggaggacattttgaaatgtaaattaacaagttgaagggatttaaataacaattattaaattttcatacatttaagaaggaaaagattgagatttatagctgtgatttgagaaaaaaggaaagagttcatgcccaccttctttgttgatctttccaatgactgtagagtacgcatgctgaaagaacacatgaacatttttctttggaaaccaagtccatatttgcataggttactatgggaggaaattaagaaataaaaagcgtaattaagggattaagttttatttctggaagaagtccgttggattcctaattaaccactaatattttgggatttagattatcgccagcccagcctttagcaattataatagcactgcatgatgcacaggacctttttaaaagtgtagcttttaaatccatgcactccataatatgtgagccaaaaacctcaggacttcccctttccaaaataatagcatatttatctcatggctacttactgttaggggctcttatcctctcaggagctaaggagaattcccggggcggcttaacccactaccatagatggggctccatcctctttcagctgtttgcaggccctagactttcactgttcaaggtaactggctctctctatacaattagttgaaaaaaaaaaaaatctctgcggtgaaggtcaaagagccctggaaataaggcaggcctggctcccgtccttgatgccccgtggtcaagtccctaatgctttgtgtgatcttagataagtcaattaccatctctgagttacttcagctttcaaatgagggggttgaacaagatgctatgtgggggttctttccagttccagaattcagactccattttcaagttgtgatcgggcggcggatgcagcatgaataagaattcagactccattttcaagttgtgatcaggcggcggatgcagcatggataagaattcagactccattttcaagttgtgatcaggcggcggatgcagcatggataagaattcagactccattttcaagttgtgatgaggcggcggatgcagcatggataagaattcagactccattttcaagttgtgatgcggcggatgcagcatggataagaattcagactccattttcaagttgtgatcgggcggcggatgcagcatggataagaattcagactccattttcaagttgtgatcgggcggcggatgcagcatggataagaattcagactccattttcaagttgtgatcgggcggcggatgcagcatggataagaattcagactccattttcaagttgtgatcgggcggcggatgcagcatggataagaattcagactccattttcaagttgtgatcgggcggcggatgcagcatggataaaagctggcgtacgtgatgtgactataaaatagtatggctgacgtttttgtcaacatgaagagtcagcttgtttagtttttagtgatacattttacactgggttgagtttgtacaatcaaagttaagctcacaggctcagtggcattcatgatcattagtgtgtcacatgttacttttaaacagctgccacagtttttagtttttttctctcattgtattagtatctaggcagtcaggatcaggttaactgtcaggatcaggtttctcttgtcaagtccacaatcttggatggagcttctagatagccaagtaatagatggtgatgcctgtcccagaacagacaccaagctccatccatctgccctccacactctttcctcccattctgccagaggagccctaggatgaaggggcttaggcatgggaagaatgctctgggagaacagatgagactgaaggatgggaaggagcagaaacaaaggacaggtggcgaataaggaaggaagagatctgccatttgtgactcttcttaaggtcacagcaagaagccagtggggtcatggacagctaccatgggacagctactccccagcagctctgcctccttttctgcctcaaggaagcagggagaaatgtccagagcacggaaatagctcttcccagccaagcaccactccccagcaagcgtccccacctggtttgctttcatggctggcatttgacacagcctgatttatagaaactgagaaagtgaccgttctcaaattccctcttaacttgggatgcctcaaattcaattaaaaggagatgaacacagagtgggaagaacttggagaaataataaattcatatgaatgagtttcagagtgtgagtcaatcctattcaaacaccttattctggcctttgctgtcgggaactttccaccacagcctggtaatagatagaactcttgcttttatttgttacgaagccatgccactgagaaacaaggtggtttaggaaaggggaaaggcactagacacctgaaggcaaaagggtgtgtcactgagaaggggacatattaaggggaatttgaagtcgtttaagctctttcaaatgtaacaatttggcctagtcccattttatcttaatctatgtgaactcagggaggtgtgcactatgacatatttcctgacctgctggctttcaaaggcatgtacctaggtggaaactccccacacccaccctaaaaacccctgccagttggagacttgggtttagcctcactttataaatgatgggcctctttgctcttatttcaggtttgattcatgtcagttttctgaaggcctcagtgtaatgcaagaggcgtacctgggcaccagaggtatagaatcaggcccacagtcctacctgcattataaggattagatgattgggtacacataaagcattttgactatgtctagcactcagcacatgcaaactctcatcattattgttcttgttattgttatcttcaataaagggcccaaatctcactcagccagcatggaaaagatgtttcccccattctgccaatgttaattctattgtttaaacaaatttttctgacatgggctgtcatttaaaccttttagatattgatgtacgctaagtggccttaataagaatggtagctgtcatttatattaatgggttgagaaaaaatatttaataccacattgtctcctcatgcgatctttggcaggtgttgtaggactcagatactaacttttagggacactttgaaaaaggtacattcttcttaattacaattatagcttcctctatccttaaatgaagctttgaatcctgtaggctctttgacatacttgctttttgtttgtgttaagtagaagtgtggctgccttgagatattacgtgggtaaccctaggctctgtctgcccttggcagtttctctacctgaccctttcacagactctaatgaaatttctatctgtcagaatagaatatgcacctttaccgttacataattttgcaatgacagtgctgtttatgttagcattgactctaatataagcagtgaaatattgtttggtttagcctctagcctagcatggaagaatggtgattttggttttaaaaaggttaaactgcatgtaaacactgtcattgctgccttttttactaacaaggtgaacttgagtcagaagatacttgaatctggttcacttagaactctattttgtcttataaatgaagagagtacttagcctgtagaataaatgttcttattgggggttgtaagcctttcccagttttaacggtgtcagcctggccattgtaatactcccaggaggcctggctcaaatgtctcctttcccaaggtcagtgcagaaagctctgctggtctcagagaggaggccatgcagattccctgtgccctgagtttacttctagcctaagaaggaagctgtcatttttttctcttcttctgctggtgccgtatctgttgacatttgtcagtgtgtgggtcaggctattgaaaacctctccttgaaggaaatggccatatttgtcctaagggaattttactgcttccttgatgggaaccagtggtgtcaagccctgagggctaaccccagctttggcctccatagcattcaggatgtttattagaggatgtccttgggatcaacacctgcagaagagaagaggaagaggcaagagcgtgcagagaaggcaagctggggtgcagcccatcaacagcctccactggccccagaaggaattggggaatcggaggggccttcagtgttgtctcccattggggcaggatgcaccagactttgatcctccttcacaattgcttattgggtgtcgggtgcctgggaagggtgtgacctcgggcgaggtggctctctgcgactcaggcaatcttagaaggggctgagagccaaagaccgtgtgttgacagtattcccagcctcctgggcagcaagtccctctttgaaggggacgttggttagggcacccagtgtccatcacagttcattcaccaaccacagaagaccatcataatggtagtttgggtgccactgagaacaccaagttggccaagttgggatcagcactcagaccacaagatctcttctgtaggattccagtatccgcgttgtggaaaatagattgaaaagcagcgcaagaagtgatacagaatataaaataattagtaggagagtttaacttaatgcaaaacatggaaacaaaaggaaaacaaaattttaaaataaatgacatttgtaacattaacatgctatagttacttggtgaaacaacagtacacaggtttagattttaaaggggggtgatttcattttgccctaatctgttgaatttggtaaatcttttgggtaagtctgtgttgaaagaagcagcatctacctttgaattgactgttctccatgcggtttttactttttaatgatggctgtttccagggacatgatttgactagtgttaacatctgagtccttctactgacgaatggttttatattgtgttctacaaatgctgagattcttttttttatattccagatattgatgaatgcagcaccattcctggaatctgtgaagggggtgaatgtacaaacacagtcagcagttacttttgcaaatgtccccctggtttttacacctctccagatggtaccagatgcataggtaggtttaatgacaaacagcatgcatggtttgtgtaagtcagttccataacaaacaactttctaaacaagcttgttaaggagcacatataatttatcaactgaggtaaaatgtacatttttggaaaaatgttaaacagttgactgccctcttaaagaacagaggcaccttgtggtcattttggagacgttttgcctcccataaaagagggatgatccaggagaccttacaggtatcttcagtctattaattaatgttgcagtcgtgcagcattaaaccttgaagccatcccaggtgtctctctctttttacccccaccttcagtcattccccagaacctatgttaatttggcctgaattttttcaataatctcttaattggtctccctgcttcttggcttctctacaatccatcttgtcagatttatcttcctaaaatagtgcttcgattaaataacactcttgctcaaaccctcggtagttttccattaggacttagaaattagtggttttcagtctgtgtccagtggatccttcaagtgtttcaaagccctccagggctgcagggattgcggagggcacagagaaaagggagagagctgagtggaaagggctcttgtccccccacactcccacacacattctaggcatagcaatttcactttatctgctgtgagtgttagacttccatgtcaggtatcaattaaatcaggggttctattgtttaaaaaatagatttggctgggcgcagtagctcacacctctaatcccagcactttgggaggccgaggcgggcagtttgcttcagtcaggtcaggagttcaagaccagcctggccaacatggtgaaaccctgtctctactaaaaatacaaaaatttgccaggcgtcgtggcgggtgcctgtaatcccagctactcaggaggctgaagcaggagaatcactggaagccaggacgtggaggttccagtgagctgagatcacgccactgcactccagcctgggcgatagaacgagacttcatctgaaaaaaaaaaaaaatagatttgacagctgctggatttaataattgttaagacttctttaaaagtgcagtgttctagattaaaattcaagttccaaagtgcacagtctgatatttaaggattttaagagagcttcaaactacatgaggattaagacatatttacatatcagatggttcacattttaaaagttactttctttttatcaaatgtatccatactaactttttacaaaggaggaatggaagggaactaagattcatggatcacagggtatgaggtgttttatgtaaattatctgacttgatgttcatttcacagcagtattgtagatgggaagcagctgagattgagagaggttagataaataatggcccaatagtttaagtgggtagtgagagagggatctgggattccaccgtgacctgagtgcacagcccagatttccctcattttgccttctacccctcaactctggatgcagttcactctttcttgccagatccctaggcaagccccgtttcttctttgcaactctgttgtgcccataattagacacttgtcatacaaaatgatccaagtgacctttctgccttctggtgctcctatttccctccatggtaagcaacagagacccccaaaattatccgtagtgatgagaaaatacaaatagcccctgacagtataaacaaatccaaggcttgttcgtaagacagttgtttggaatgagtaggtctcaccaatagaaaacctcctatgtagatagtggtatgcagtatcttccgtgcacatttcttctaaccgtaaaattccaactgtcacctgctgccaccacattctgagactctcagacctcccagccccgagctccctttgtgttctaagctcttttagtattattttatttcttgttctgtgatcttcctgtggcatttgtaatattgcctgtagggttgtctttttatattgttgtgttctctctcttcgactcctaggagtcataaagatgtcctttccctagtttgagcctcacaactcctaactcctggttgtacacaaccatgttcgtgacaggttaggagaagcctgttgacaggctagacgacctgcaaacgcctatttaatccataatatatttgctttgatataatgtgatttctgggtcctgagaataagggccaagtgattcaaaaggggagaaaagagtgagatttcctcctcctcttcgccagatgtcttggccagggcagatttaaaatggaaggtgtttgtggttccttctgtgtccctttatgtccccttagcttgagtcctgaaggtcttcaagttattctacagccaccccttaccctctgtacaaagtgacataccaccacaacggttcccccccccccccagccacccttggtgtggcactgctgcctaacgaagtgaaaaacttcaggctgctgtgtcctggaggtcatttactccaaatggtttccaattttcagttttttcttcctttacttattagcctgtaggttttcattaaaattataagttatataaatgtgtatttttaacaaaggtgcttcttcagcaaaaaaataaattagaaaaattattattatatgtgcaggtgccatctgtaaatcagggactgccagtaacccaaacttgatttgtaattttttttacccccaacattcaccattttgatcaagagtttgtgatccattgatttaacatataagtcagccagatgggcaataacatggtatcatagttgatttgcaaaataatagacattagcccattaagcttttgtcattggcaactgtaggccctagttttgctctgaaagatagcccatgctgaaaattatatgtacaaattccataatttggtcaagtgtttacactgggttttgaccaccgaattcatttgaagctgggatataagccagttttgaatatctcttcccattctgaacagtctttggtttccatgccccaaatatttactaattcccaagtatataaagtattagtggttttaaggcattacaaattagaatgtaggaagttcaatttctctgccctcttgacgggggaggtaccacctgaggcttcacagagagcatacttgtctatactccctctccagccgtttatcctggaccaggctggaataaaacttgttctgcctctttggtgaaactattagtctgaccagaggtacaggaactggaaccacaaaaaaattctggaaagcacatttatactggctagtggttttaagtacttttcggaaataatcttgtatcctttaaaactgacccataattttcttttatggtttgtctaggttggttttagtcttcttcacttgatgttaataatttaaatgtttctaaattagccttgtttttattttatttcattttattaatttattgaaacctcaagacatgagggctttgtgttcttaagaatgatgtagatgataacaattacaggtatgaccctctttgagaaaacttgaaatttaatattcagacttacaggaaacccagggatggatttttggctatgaaagatctttgctttacaaaaggatttaacccttatattcctttaaatcagtggtccccaacctttttggcacaagggactagttttgtggaagacaatttttccatggactgggagaagaggatggtttcaggatgattcaagtacattacatttattgtgcactttattatacacaataaagtgtattatattaaattaattaaattaatacacaatattaatttattatacacaataaagtgtattaaattaattaatacaagttaatattacatattaaattgtaatatgtaatgaagtaattatacaactcaccataatgtagatcaatggaagccctgagcttgttttcctgcaattagatggtcccatctgagggtgatgggagacattggcagatcatcaggcattagattctcattgggaacacacaacctagaaccctcgcatgcgcagttcacaatagggttcaccatcctatgagaatctagtgctgccactgatctgacagaggcagggctcaggcagtaatgccagcaatggggagtggctataaatacagatgaagcttcactcattcacctgccgctcaccccctgctgtacagcccagttcctaacacgccacagaccagaactggggattggggcccctgggggttagagacccctgctttaaataacaagcatattgacgatattatttgcttttcaaaatttaattttatatgatctctgtagagatatagtttacttgaagagaggtacaccctcagcacatgtcaggcagtaaaagtgttttgcattttgcttacctgccttcactgtttcgtggtaatatctcaaaggcatatggagaagttaggttttcctatgccacaaactctttccgtaacccagagctgcgctgcagtgtgtcggatgtcatgacaattagacatgatgtaacccaataaaagtgatatagaaatgcgtcttaccatgttgctttgagaagacactttctgccaaaaacaacaacaaaatccttctagagctattgtatcctataggactaagaacttggaatcaagggccattttgaagttataaataactagtaccttataaaatctgttagggccctaagacaaaaggaaatcttgattaataagcattggatctaaatgcaaagtgactcattcttcaaaaataacaacaacaacaacaaaaacttatgtctgactctcacagttgcagactggaaaataagaaagatcttttagaaatgtagactaaatgttgttttaaaatagatttacatattttcctaaaatggctcgaattaagcagtttgaaaccagggacaacccagtctctcttcagcatagagacatgtctttataaataataaactgtcactgctagtgattttcttagtctctcttttcctatggcacacatggttttaatcactcgttcccaccttgggtatggaatgtgggacttcagccaagtgcactagcacacaggggcaaaaggtgtgagaccagggatttctgactgagcactgttcctgtgcagcgctcgcagcttcccttccggggggcagaggtgtgagttaatcctgccgtagccccagtgtgaagtatggagctgctcgggcaggggagtgttgttacaagtattatctcagcgatgtgtgtgtgtgtatgtgtttctttgtcctcagatgttcgcccaggatactgttacacagctctgacaaacgggcgctgctctaaccagctgccacagtccataaccaaaatgcagtgctgctgtgatgccggccgatgctggtctccaggggtcactgtcgcccctgagatgtgtcccatcagagcaaccggtaagagcccttccagttatctgcagaatatcccatcccagccctcacaagcccagtggcaatgtgcatgatgcagatgtaatggaaacttgggtaaatgagtagtctccaggaaatataagagatgacgtccagggaaatttccctagaaaatgcacaggaaaaaaaaaggggtctgtacaaagagtactgttttcaggtactgctttttacttagctggcttattactactaaacagaaaccttttggggaagtacttattctcattttagtacttaatggctctcatggagtactcaaaagctcagtagagtaaaactcagctttcagaatttttcaggtaagttgttcaggagacacatttcctttttcctaacattggactctttccttcctgctaagtcctgcttgttttttttttccttcacagtatctcttttatctgtccatttttttgtttctattagaagcgtattttctctagtctggactgttccagtagtctcctaactagtctctgaaatccaccattgccatgtacctttcccaaagtatgagtcagtgaagttcagtttaaaaaattgtgtctaggggagaaaaaggagacaccttttgactaattgagcctatttcaaaacaccatgttgtacacaatgaatgcatacaatttttattcattagtttaaaaatacataactaaacaaatacataaatacagcacactttcgttagtcgagaaagatgtccaaaaatatttccccaggatgaactcaggcaatatttagtggccaattcactccatttcttgcaaagaacatttgctacttagcacagtatttagagtcccaaatctaatcccagttcatctttttaattcttgttctttatagtagtttaaattatatgattgagttttcattgcacccaatccgagcatttctgaattcaagttggcttttttttctaaaacttcttgccagttcaggctctttctccctactcctgccatccttgcctgttatatatcctcttttcttgttaaggatctgctcaaacatgacctaatccatgaatatcccgaggtacctgcagctggaagtgctcccttcttccttgtgctcctgtggttctggctggtactatcactatggcatgagtgccatatgtgtgttcacatcttgctcttttactggttgatcaatctcattaggaaatctcattcattattgtagtctcatatttctcatgctttttacacttccatagtatttagcaaaatcttgcttataggaggcattcaaatacagagagcaacttattaggcaacatctttcccaccaattgagcatatttcaaaacatcacgttgtgcacaatgaatatatacaatttttacttgtcaattaaaatactaatacataaataaacaaatacatagatgaagtttaccttcctgagtccagtaggggaccatttagtagatcactgtttagaagcacatgacttcctactaagacatggcttaggtaccaggagaatggcttttaaaatgcatatgttaacttaggaatcagcagctttgatgtggattccttcctgtgttgaggctttgaatagagaagaggactagagcaggtttaggtgcctgcaggaagacctactttgggacagttggagcagaagaccaggttcctgtgtgtggctttacagggagctgtcctcccaggtataccactgagagatgcacagccctcagaggccttgggcaaaacagatttatagagcaaaataacttgcaggtaggtttttgtttgtccaaatgttccagtactggtgctacagagatctgggctcttacagagagtgatgcaggaaggattttagattggccagcttttcactctttaaaaaataaatcagcatcatcttgggttaagtggagataggaaagatggacatcagcttaacaaaattagccccacgttgctgatcctgaatgtaaaggggcaatgagaagattactaaatctgtaaaaaataggaagaaatatcagattcagtctgatacagtttcctagagaggttaagatgaatttaatggcattcttaaagtaaaatacccacctaattagcagaaatgctgataagctattaaatttcttttatataaattcaaaaagtcttaaaaagaaaggccgaattggtacctacaaatgcttggaagcaaagtgagttccttaatgtaactgtcatttaataaaattaacacatagttaatgaattcctgttatgtgcaatttgcagggcaaggctgagagtgggaactagtcatgagttagagatgatccctgacttcacagactacacagtcttagtggtgggaatttggtgagagcaggttcccagggaatggtggatatggcacgtacagatgataaatctataggaagaatcactgttggttgacaaacaggattgagacatcttgagtcagggaagcatgaacaacatagaattcctttacaaatacattcaagtacgtcagtatctctgtaatttgaaattccagtgaaatcgtaattaaaatgctgtaagagaattatctgaaaacataaacttgacctgagatggaaatgtcaaatatgaatgaagaaattttagaaatggaccagaaagtaccaacagtactttcctatttaacctcatgtaaattggcagaatgtcccgtgaggttgaaatatgaatgcatttcagtaagacctattactgtctgaaaataagttaaattttagtctgtaaggaaaagaaaaatattagtctaatttctattaatggctgaaactagcatagaaggtatccatgagaaaatcactgtacaactgtgaaaataaaattaccaaaatcctagcaaaagaggaaaaaaatgaaatttaaaagtcacataggttacttatagaagggaactatgaaaaaacatggctatttgtaggcaacatgaaaataaataaaataaatacatccttggaaacctggatactgcttaaaaacacctttttggaagcccagaacaaatgtgtggaaacctaaagatgatttatttgataaagacctgacactgtgaaaaatagtaatcatcctaaaaatgtagaatcatagggaagcagatgatgaagtcaggatgtcctcattcagagggtcactatgcagcattcatacccgacccacaccccttggtgtttctcctcccttatgggccacttctccattgatattgctttcttttacgaatcagtattcttcagggttctgtctttgcactcccttctcttccccttccacaccactcttacatgagctcatccatccccatggctttgagtatcacctctctgtactgatgactctgaaactcacgtctagccttgattcgtctaagcttcacactgtcttttacaactgcgaagtgatagctccacttggatgtctgatatctcaaaactcctatgttcaaaatggaacttggtttctacccaccaaatctgctatcaccatgatttttcccgtccaggcaagggcaccaacattcacccaattgctcaaccagaaaactaggagtcattcttgacttcttgtgtcctgagctctgacacttactacttcactgagcactatacatttatctcaaaaatctacttcactgaacactacacatttatctctaaaatgtgcttcagatttgtccacttctgtccgattcaatcactgactcccccatccggacatcatcatctcccccttggtcttctgcaacagccttgcctccccgcagtaatgttcttcatatgttgtaattgtaagcatgatcttctgaaaatggtcatctgatcatgtcccacccccgttgaagacatccagtggttttgcactgcgcataaaataaaattcaaattttttaatgtattctgtagagccctgtggaatccacaggtgggactggatggagaaagtagtacttttatgttttccatgaggtgaattttgatacagataaagactctgaggttttgggaggaacatggttttggatttgaattattgttccagagtggttgctgctgcaggtattaaaaatgggaatccagtcagttggttctttttcttttctccagttgacctgtgaattttgaggatcaattttattcaaaaatatctttaaaaaaataaggatgacttctgtgggcctatgatcataagctacagctcagctgttgtgttttgttttgttgtgtttttctagaggatttcaacaagctgtgctctgttcctatggtaattcctgggagaccagaatatcctcccccaccccttggccccattcctccagttctccctgttcctcctggctttcctcctggacctcaaattccggtccctcgaccaccagtggaatatctgtatccatctcgggagccaccaagtaagaattcaaaaatcatctagttatttttcttgcattgttcaagttaacatttttttattatttatttatgctactttagtcattaaataagtttgtaaattgttatattaatttttggtttacataatgttatctatatctatatcatatgtatgtctcaattttcctattgcatagagaaaaacgggaggcttcctattctccagagattaatgtccttttgttattggtgttttcaggcaactatgggagagttatgggcgatagttaaatctgattcacagaaaggattaatagaggaggtataatattagactttaggttacagagcttgcaaggcagttttataagtagttcaataccaatatctctctgcctttgttatttctgcaaactagaggtttgagagtgaggtggtgaagagggcagagaaaagcaggctgcagctgggttgtgagctccccagtgctcacagtgcaatgtgatctctgttggcagggtggaaatatgctctgttgtcaccagacgacctttgcccaaagagtatcctctttcctttctgattcaacatcttgttcattattgtcagattaagtactgatgaaagataccatagttaaaataattttaatggggcttaatgttcttctaggggtgctgccagtaaacgttactgattactgccagttggtccgctatctctgtcaaaatggacgctgcattccaactcctgggagttgccggtgtgagtgcaacaaagggttccagctggacctccgtggggagtgtattggtacgtgatccatcctaggttggcaccaagggtctgttgtaattctgttccttgactctactggttttctattgctgctgtaacaacttaccccaaacttggtggcttaatacaatacaaatttaaattatctttcagctctgtaggttagtagtccaacagaagtcttactgggctaacatccaggtgttgggagggctgtcttccttttggtggctcttgggaggaatccatctctttgcctttttcagctactagcagctgcctgtgtccttagctcatgaccccttcctccattttcaaagccagcagtgttgcatcttcaaatctctttgtctctctctggctctctcttgcaattccctcttccacatttaaggatatttgtgactgcatttggccacctgtataatccaggagactctccatctcaagatcactgattagctaccttaattccatctacaactttaattctcctttgctagctaaacatatccataggttctgggaattaagacatgagcatatttgggaggtcattattctgcctattaaagttacttttaactttcattgtaaaagatactcaaatcatttctggtaactccaatttaagacaccctaccaaaagccctaccattaaaagaaagcgttaaaaatatccccaaattatggaattttgcacattatactagtctaaatgtgtagcttaccaactctcttagactagttattttaaatggaagaaagaaagtttaaattgctgatgaggcatttaagctggtgaagggaggaaatgtaatgaaagaataatcaatttttggattggataagaacactcagctcctatcaacttgtttttaaaataagttcacctcttagttctgttatgaattctacttttataattataaatttatgatttgtcagaaatgatgagttcttactttcccaaactatttaatttcctgatgatatgaacaccccttctagaggtcatccagagctgagtagaagtgggaacatctaactcagggttgcggaatgtgaggtcaaatctgtatctggcactaagaagcatgtggacaagtgggttatctttgctaaattttagcttcctcttgtttacaagtagggtcatataaaccagtttatctctaaatgtactgataattctaagtgactgtaaaactagtgtgagcctgtgtattgaacacatctggggatgggggagactctgtggtgattgagaactgccctttaaacaacagttgcttcatgttttgttctaacattttagtggaactcagcagggaatgcttggatatggttagaccttctttttattggaaaaaaacagagcttcaagagatactcggaatcctatccagaagccacttctgaaatgttagtctgtttggtcctcttagatcagactcaaggaagaaaaaatgtttattagatcagattgttgagttgctacatgtttggaatttttctctgcaaaatgacacatgaaaataatacactttaactgctcaaccagtcttcaaatggctaatgacatattgtagtggaaagaaaaaagatccttttattatgttatttatttctcaaaaggaaaatgttttatatgtataaaaggaacccagaaagtcttagaattatgaggtattgctatgtaattttgcactaaaatacattgtgctttgcagatgttgatgaatgtgagaaaaacccctgtgctggtggtgagtgtattaacaaccagggttcgtacacctgtcagtgccgagctggatatcagagcacactcacgcggacagaatgccgaggtatggtcctggctcctgacgtggaatgtgggacatatatgctaactgggggttggcttcaaaggagttccatggagtttaaataacccatgccggaagagactaatacagtcccgtggcttttttgaacttagttccacctattgtcattctgaaagacagtgtcataaaatctggcaagcattgaagttattttataagatgcgtctatgcctgaaggaaaatcttattttcagtattgttgtctcgtcactattattgcctcttaagttttcatctgagaagtagagagtggaattgtcctttatgacacagcaactgaggaaaatttcagttgaaattatgtgcaattaatttcttaatggaaagttctaaaagatagggatgtcactctaagcccttgctgctttttagtgtggtcagcaacagcatctcctagagctgcttggaaaggcagaatctcaggttccaccacagacatactattgcagaatctatattttaacaagatcccccagcaatctgtatgtacattgaagtttgagaagcactgctataaatgtcccctcataaaaaatttcccatcaggtttattaactaatttattaagccacccaatatgccttttattaaatgactcttatgtactgagtttctaaaacagaaataaataagatacaatgatcactgtcagggagcccaaacatctatctccatctctatctctaaattaagcacaaaatgaactgtatcattaattcagtaaagacagaaaaaaaaaacaggcaaatactctgttaaagttaaataaaagggcccatcaatgatagactggataaagaaaatgtagtacatgtacaccatggaatattatgcagccataaaaaagaatgagatcatgtccgttgcagggacatggatggagccggaggtcattataattagtaaactaacataggaacagaaaaccaaatactgcatgttctcacttttaagtgggagctaaatggtgacacatggacacatagaagggaccaacacacaccggggcctattggagggtggagggttggaggagggagaggatcaggaaaaataaccaatgggtagtaggcttaatacctgggtaatgaaataatctgtacaacaaacccccatgacagaagtttacctatttaacaaacctgcacatgtatccctaaacttaaaagttttttaaaagttaagtaaaagatagcgaggtttatatcactttagaaaattggtagccattgacaagagttaatcttatttgcctcttttagcaaaagctcttcatgagttgaagacatatagaagttttaatttttatcagtgaactggcttcaaaatttatgaattttgttctcacgtagagatttcttgccaccagtgtattttagtgcactacatataaatgaccattttaagcagaaaaaaactggagcaaggactttgaactcactaacatttctattaattagttataaatatggataggttgaacacgtaactgagttgagaaccttcttaatattatgactattgtttaatataattaacatgtacaaatagcatactaggcattttgcaataacagaaaataaaatgaaatcaatgtccagagactgcactgttaaataagcaaagagaggtggttattgagagcactcagctggggcaaggaccagccagtataaactcatgtatgtggttgttatcaatctgagacttagtattggagactgaggatgacctgaatacttaaagcactgccttctttaagagctagcactaaggttatcctgaaaataagaagttgagaacgtgctcacattattttgctgatgaaagttgccacagaatggtccaaaaggctgtgcacataactgggaagtaagtgaggggccgagtagaaggggatagaaggatgggcagaaacacagtagaggagaactttgaatgacaagctttaaatttgtcttatagggcaatggggaaccccatgacattctgaaattgaggaagagagaaaaatatgaactttttatcctgtttattttaaccttgggcctcaaaaaattatgggatccttaaaaaaaaaaagtctgctcaagaatatgtggtttttaccatttttttttgagtgtggagcaagtctgatttttagcaaggattaagaaataaacgagagagaaaaagatcgtaggttgttggcacaaagatcagacagaagaaaagcccagactgcctcagctcgtccaatgacttgtgtggaaaccactgcaggatctgcccagaaagaaagtgcatctgagggccaaccacaagacaccacacagacacagggtaaacagtcagagtaactgacatgccatgaacgcacgtgctcattgttcaggggatatttagggcacttatactcagacaaatgtgacctcaactctgcatagataggaatgctcgcatccaactccacatagtttcttggtccctgtcttctgggaataagccctggaagtgattgtgtgcctgtgtagacaaagaggtttgtgttcatcctctttgatgtttatccaggtttgtagcttctagaaactgagagaaacagataatccagggaaccatgctatccactttgggtagattgttaatatttaagggagaaatcagatacaggttgtttcagttattgttattttaacacttccgtgtcaagctctgttgtgtaccttggcataatattaaccacaatagaaaaaaaggaaaaataccctcatagaatcaatattttatttggttggtagaatactcataaagttgttttttaaaagactaagaatctatcagcagtaaccctgcacgtaaaccagaattggtataaggaagatggacattttagagatgtgattgacggttttcaggcagaattaaggtgattgtttaaaaaaatagcatatgttgtattgttctgagatagctataaaatatgtcttttaaaattatatgtttaaagatgccagccaaatttcagtataaatagtgatttatactggttaaatagatgtgcttggaaaatggtgaagaagaatctattttgtttacagacttcggatttaaggagtcttattagaaattagagttacatctaatgccattatacaggttttttatcatgtcttttcaactctgataaccctaaatatcacattatttgataaccaatttatgttggagaatattattaagtaattaaaaccaaaagccaagatcatgagtttgcaaatggagggagggggaaataaaataattttaactcccctaaataaagctatttcttctttttaaactttgattttagacattgatgagtgtttacagaatggccggatctgcaataatggacgctgcatcaacacagatggcagttttcattgcgtgtgtaatgcgggctttcatgttacacgagatgggaagaactgtgaaggtaataatagtatactaatgttagtcctctccttccattgcagtttcaatatcaggggtctttaacaagaccaaataatgagtgaaatgtcaaagtatcaaatatgttttatatattttatctcaaaaggaagcctaattttccatgatattcatttcttaatttacatttgtgtgaatcaaataacattttaatatgctaggagagcttgccatttaaagatccctggtgtgatgaaacttctgtggcacaatttcatactttctaattttttacaatcagaatttgtacattttttaaaaataggacacacctaagtctgtgtattatctagccgtttataatctttttgtttaaagtgtctgcctagtaataaaatgctactaatcagtatctgaaatatatatctaaaatagatataatgtaaaaatacatgttatgtatattttctatatatgtaatatgtgtatatatattatgtatatatgtatttctgaatatgtaatagataatattcataaaatacatatttaaatataaataatatatatctaaaatataaataatatatatttaaaatacattatatatgtctaatatatatattatatatatctaaaatatgtatatataataaatcactttggtctttctaaagcctgtaagtgaaaacactgtgtctaaaagagcaagtgcctcccaagacagctttaatatcaaataaaataacatagtgatgaatttaaagaaccatccccaatgtttaagggatcttaaaggttcactgccacagctataatccatagttgagccatgtattctaaaagtccactttttacctgcccctatttaaaattgcttcaaactacaagttatcttctggttttcatctttaaaagaattaggatgtagcctaaatacatttcaaattccactaatcttagttttgacttatgttcatattcagagcattagaagtaatatgaatctgtgaaataaatatacccactaggctattagcacatttttcagtttgtaaactattattcctaaaaaggatcctgataacttctatggagtcaaattttataaatagatatacctatacatctagccctagagtttgcatgcacatgccaaaactcaagaacttgagatatgtatttcatatgtcccatcttctccttccttagatgatcttatttggatgaaagttagccttaggctgtaataacaaaaagaaagaaatacgaagaaacagaattattttcatccagattggtttccttcgtaagcttactcttctggtcataagaaaatgtatgttttgtattttcagatatggatgaatgcagcataaggaacatgtgccttaatggaatgtgtatcaatgaagatggcagttttaaatgtatttgcaaacctggattccagctggcatcagatggacgttattgcaaaggttcgtgctataaaaccctagatcatgttcttcacgtgccttttctcctccttatgttgtttagaggtactacctttctttactgattctccccacttaaagtaccttgaattttggtttgggaaacctgactgaaactccttcttaaatccagccatccaaagagctacagtttatgcccagaagactattgttatttcagaaagggtatttgaggtcttctcaaaggagtcaaaagctatgtagcaaataaataatccaaactgcctattggtcttccaacagatgtgggcattgttctcaagaagctgagttctacctcttctttccagttagggaataatggtggttaggcttcttggtggctgttatttgccacctcttacatctttacctggacagaatagtgtagactgttatttgcaatgatctcttcctcataatttcctctaggcatcttaagacacagaaattttttttaaggataatttatttcggctttatcaagttacataagcaagaagggaaacaggattaagcagaataaataaacaaccaagaaccatttttttagtttggtaaaccattttgaaataatctcattgccccaggtatcgaagcaaaaatgaggatttttatttttgctgttgagaattggggtcctaagaaaagttactggagacaaatttgtgcttagtgtctcctgtcttatgtagggatcagtgattactgcacttggtccaggatctgagttggaaccagacttcttaaagaacctcatactcaaagcaggtccagaaaatctgctaaaatgctgcacttagagcttctgggcatagtttcagatgcagaagtgtagagggtcaagctattcaaggtagaggaaagcagaataaagtcctatggtgcctcttctctgtgtgcccctagtggacagctttggtaaacgtgttatggaagaaagccttgtattaagtccttggcaagatgtgcattttctccaggcttaaaagaacttcaagcccttggttgtttacctacattctctatgaccttcacatcaatggctcttaatattgtgcaaacctgtcttcccagcaagagaaaacagttgggtgtttcaaatttgaaggaggaaggtggtttctgtacttttgagccctgtgctaggaggaacttatatgagaagacaggattaacacatagaaatattctacagtgtaaaatagcataaaacaaagtgccaaattgtgcaaatttagcactgtacaagtaaaaaagaaaagggaagagaatgattgctggaatatttggaattaggcttccaaaaaaaaataatagaaagagatatgaaagcccctttgtgagcagacctaggagaatacataatcttcttgatgatacacagagcacactaagattcactcttcatgcctctaggctcctgctgacccaggccacagcgtcccaacattaagtatggccaatagataatgctgtgacctcatagatgaaaccaggtttggcaaccattggcaaccagtgaaatagtatcctatcaataaattggttgttctattaatttgaaagtgctgatgatatggatggtttgttctgactttagcattctggcttaaggatctgagagagagagagagagagctccacagctctgtattattatcaatgtcttatttttttctagcttatagagcatagagtacacacactgtaataagactaaaggatgaaaaaagaaattaatcccatgtatactggatttcttcctttttataatttttgtctttatgccatagggtaagattttctcctagccctgagcacttagttctgagcccacaaagatgtgactgttcaaagctgaatcatcaatgctaattcagtctccacagttaactcatctgatcaacaacatggcttctctgttcactctctgaaagttgaagccactaactttgaccaaggttacctccctttggatctaccttacatctccgttcttattaaaaaccctttgtgttacctttcaggttgtagtctccacgttttgctgtgtgtcacaatttgaataaaaagttgaccagaataactaaccaatttgagttcctgtatttaaatataactgctgtttcaaatacaatctgtacacagaaccttggaccacccgaatatattttgtgccaaacaacacaagctaagtaaaacacgaaggtgttttactctcaatttgcctttttaaggtcaggagaaagttaatagtcccatacactagttgtatattataaaaggagttgttataaaatcatttgcttttttctttttctttttttttctaagacacagtctcactctgtctcccaggctggatggagtgcagtggcacaatctcagctcactgcaacctctgcttcctgggttcaagtaattcttgcgcctcagcctcccaagttgctgggattatagccgcatgccatcatgcccagctgatttttgtatttttagtagagatggagtttccccatgttggccaggctgatcttgaactcctggcctcaagtgatctgcccaccttagcctcccaaagtgctgggatcacaagtgtgagccactgcacctggcctaaaatcatttacttctaagtgttgtatgttttccaaaccacaattttggtgccttttgtacttccccatattaaggggggaaaaaaccctctgctattattaatatgtgtccgataaagtcttttaccagacctccttaagtatacacataaaataccataaagtgtttgtaaagtttaagaaagatttttctttgctgggttccaactgcatacagtgctgttattggccaagaatggtcatgaaaataatctatattcattttctgttctttttctgtggtgttccatcaaggctttagttgtatatcctttaattttaggcgaattttcccagagagccaagacatgggtgatactagaagtgatgccagtctgggtgatgaataccaaaaggaaagtcttcctgtagtttactattaccctagatttctgagagccctggaagagctaccctggttatacatttcacaaaaccctttgtcttttagcagccattgttctccttcctctgattctgtttttgcctttgtgattattttggatacaaaaatctcttgggagaatatattaaagttactttttatggaaaataagttccaacagttgatttctcttgattttgttactgttctttcaaaggaaaatgagaatgccatttgagcttttgttgctgatgctgcatattatttcctatcttccccattttcaagggttaaaacataattgtcaacatgttataattttagataaatgtcacttcatttttaataagtgcctttctctgccacagacattaacgagtgtgaaacccctgggatctgcatgaatgggcgttgcgtcaacactgatggctcctacagatgtgaatgcttccctggactggctgtgggtctggatggccgtgtgtgtgttggtaagaaaacatcatggctaaccttatgagagaggttcagcctctgtcactcaataaagcccaatggtaacaaacgctctctactgtagcagataagatataaagaatatttgcagagcaacaaaccaacagggtcagttctctttttgtgtaaattgaacattaatttgaggattagaaagatgagctaagtgaaaagcaagggaatccccacctatccttcccccttttcttccctaatcccgtagctgtcttcagttttctccaggcctcctttgttgatattggtcattgaaattgatgtgcatatgctattatctcatgatgaacattttaatagagaattgatgtccatgggcagtatagaatgcaaaggagaatatggataatccagaaacctgtatgatagtagttttatgaggctttataaaaagtatgagacttgttgaaaaattgataccaattttatccagattatttttaagaaaggtactcagtaagccatttgaattggaaaaggatagggcatagcaggagactgtcttcctggtggtaaagataacacagcttagttgaccaacatctacatatttatataacgaaccttttacagattaaactttctcctttttggaaagtatacctaattcagacattcagtaattgcgtgtttattttgggataggccgcatttctaataaaggtcttatttagcaggatgtgagattcaacattcatccatcattaattcaacatttattaagtgcctgctctgcacaggcccgagaaagacaaaataagtgagatataattccagcattgaagggcctcacattttagtaaaccatgatactccctagaaaactgaagcaatctggccattggtttccagtgcttagaagctgaacgtgttttgtttttctgtttttgtttattttttcttcaaatggagccccgatatcagaggcattccctgtgagttacaccagggatgatggataaataaagccctcttcaactttgacttggggggttctcatctgtttgaagtgacagtgtgatgacagatgcttcttcctgtttagacacacacatgcggagcacatgctatggtggatacaagagaggccagtgtatcaaacctttgtttggtgctgtcactaaatctgaatgctgttgcgccagcactgagtatgcatttggggaaccttgccagccgtgtcctgcacagaattcaggtatgtggtatcatggagatgccctcgtactgccagccttctgccaccattgaggtctttgcatttgtggaattcacagggaagatgacattttgctctccaggtacgccatgtgccttcttggggtcttggcagaggccagccagtgtctagtcacaggtacttatctaagcctcataattatttggaataggcattgcatttgtgcctctcgtataaactctcctacctcaataatactcaagctgtttgcaatacatgcaccttgccttgttttctaaagttgtttcatgatgtttgcattttgcagaaactattataaaagcagacttttacacagcgtaaaagtaaataactgtcatattacttgactatttccactagctttccaaaaggccatttgtaaattttgtttacatcccacgtattgattttggtgtggttttctttttctttcttcttcttcttcttcttttttttttttttttttgagatggagtctcgccctgttgcccaggctggagtgcagtggcgcgatctcagctcactgccacctccgcctcccgggttcaagtgattctctgcctcaaactcctgagtagctgggattacacgtgtgcgccaccacgcccggctaatttttgtatttttagtagagacgaggtttcaccatattggccaggctggtcttgaactcctgacctcgtgatccacctgcctcggcctcccaaagtgctgggattacaggtgtgagccaccgcgcccggaccggtgtggttttctttaatgatttgatttaacctgagagaaaaaactatttttctccagttgaagtgacatggcctaatgaaaagagaactggatagcgagtcagaattctcttcctccatcaacaggcagccaaattacttaatcaggggatttagttatttgtgtattttgcttatttctgaattttcctcacctacttttcaaaaggatttgaggtggcttatattaataaacataattataaaatagaataatgcagacaagctatccttagacacttcatctacaaaatgagttgccttagataatccaaaaggtcctgtccagttgtaaattatttctatttataaaacaagaatagattactgaaattaaaacaatgttctgccagtatttaaacacaattttaaggtagcttggcagtggacctctaatgtcctaaaataaagttagacctaatattgaaaatatgtagctctggttggttgtttttacatataggatttagtcagtttatttctgccctaaaggaaacaaattaaagagtaaatcataattttaaaagatttgttattttaaaaatgatagtatttgaaagtaacagttggaaattaaaatacactatgaaaagttagagaaagttaaatggaagactttaaaagaaatggggggccaggcatggtgcctcacacctgtaatcccagcactatgggaggccaaggcaggtgtatcacttgaggttaggagttcaagaccagcttggctgacatggtgaaatctcatctctactaaaaatacaaacgaacaaacaaacaaacaaaaagtcatgcgtggtggtgcgcgcctataaccccagctactcgggaggctgaggcaggagaatcacttgaatccaggaggtggaggtttcagtgagccaagatagcaccactgttctccagcgtgggtgacagagcgagactctgtctcaataaagaaagaaaaaggaaatgagggatgcctatttaaagaaaaaaactgctctggctaatgacttcacccggtgaataatatagaaattatcattttatgtatgatcaccaatcagttcaatatgtgtttataatacttttattatatacaaataccattctgttgaagacatttgcctataactttatagttgtatattattaatatcatccttttgtgtgttactttaacttttcaaagtactttacttacctactttgaatttgcaatacagacaagtatcatgaaagctggcacacaagagtacaggtgacttgttcacatgttgaatgattggaagagccaagatttagaatccaggaaccttggtgcatatagttatttgcctttgtattttcctctggaccaagtgcacttccaaagaattcttaaaatccacagggaaattatgtgggtttataaaaaggtgaccaaaagaccagatttctttaagcagttgtcttagtccagtttttgttgcagtaacagaaaaccacagattgagtaatttataaagaaaatgcattaatttctcccagttctggagcctgggaagtccaatatcaaggtgccagcatctgtggggggccttcttgccaagtcacttcacagctgaaagtggaagggcaacagagcatgcaggagtgagagaaagctagagaggactgaatgtgcttttataacaaagtcactctcatgataactaactcactcccataataatgacattaatccattcatgagggtagagccttcacgacctaatcacctcttattaggcctcacctcccagcattactattgaattggggatgaagtttccagcacatgaactttggaggacacattcaaaccaaagcaacagtaaagcttaaagagagttaaatgtaaggcccggttccactaacttttgtcttatatttgaatgaatttacccaaaaaagggtccacacatggaagtagtttcattcatttggtttctccacctctttggtcatgaaccatccgaatgtaggatatccctcatttcaagaatggggggtaggctgtttaaagtactgaaaatattcaaaaggaatgtcttcagtcagttgagggagagactccaaatatacaaaatctgaagttcatctttgtggtctgcaagtcaggcaagctacatatgaagctgtttctcactggttgctggagctgattcacattgttcagcaagccctcttgtgtcctcagccttctgacaatgacatttcacagacatggatcagttaaacccacgggagtgtaattggtcagttaaacccacaggagggtaattcggggggattttctcatggatccctcatgtcactgtctccatggcactacgcggagttagctcatcaacacctacccctcactatgtgtttataatacttttatttacttatttttttattcagggcctgagctgtgcacagtacacgttcaatcattaaacatgtaatgttaattctgtacagccaccaggtgaaatgggagttgtcattccaaatttatgggagaagaaactaacagaggaaaagggctgcttccaaaactcccagcaattagcgttgtcatcggtattaaaacccatgcttatttgaactcactacaaaaaatggtctagtaccagatcctgcctaaatggaaaacaatggtgacaataatttgcttccatttaggccaaacatcagcaaaattgtcattatctctaaaagtcctttttataaaactggtatgattttggttttcttgttttattacttacagtatttcatgcatattttagctttttgctgatacagcagaataaaaaagatgaatttctttttgttcccacacctggctttcaaacacaccttcccatctgttgtttttttgaccccttctaagatggtttgaaaattaaatcatcactgctttctcaaattcacatttgttagaagacatgataatctttggttgtataactcatttacctccaatgtcatcaggatgcaattctctggcatgcaggggataggaactatttgcttcagcagtgaggtgcagtcagcctctacaataagccccagccctgatatccagttctccttccacttaagcacagatgatttacatatgaccatgagactgtgtttgccagaaaccattggcaacttaaggggacactagtttcctttccttggatagtgtgattccagttagttctacattttcatcattcactcttatgttaagtattgttggaattgtatataaaacatggtattaattttaagaaatagaaatttgattctatctcaaatttggggacatattctttatacttcagttttttcaatatgatctcacagttttaacattaagcaatactttctctatggatataccatagagaatgaatccagtatcctgatacatattaactttaaaaatacacttaaatgcaagagtaggtattctgttgttgctcttgtgagaggaggctagagaatttgcagagagaaatgaggaaatgttaagaaccaattgtactgaaaaaacagctagcactgagaaacaaaattatccccaagatggtgggagaaagttttattaacagttaagaaaccacattttaacaggcacatttcaccgtaagtgtaaagtgttccctggtgaacaaaatcaagttataggaaaaacaccttttccgaaagggctttgcacaaggaattgctataacttgcctgtatccttaaaagttgttttccttgatgatgtgtagcctttaaaatgggagcctggtgtaaaggtgactccctggggagatacctccttttccgttaccacttaagtttggttctactcactttggaggaaatgatgtgtgcaaaaccaagggcaggatctacctgttctgcaaacaagggaatcatttactatctgttaatttattgcagcggaatatcaggcactctgcagcagtgggccaggaatgacgtcagcaggcagtggtaaggattcctttcaaaatttactaccttcagtatgtgcagaggcagcatcaggctttcttgtgggtttccagttgatccctttacactagtctggcctgactccctctctggccatcactgtgccatgtatctgggatgctcagaagccttcagtggcagagcagccggggcactgtgggctctaggatttctgggtgtggctgtgggacttggccactgagggggtcaggtgctctctcagtgtggttgatgggtgctcgcagatgatgtgtaatgacttttgttgctcatgcttgagaaggggcagcctgactctcttgtggatcttccactatcaagtaccactcgggatgatgggctagttgaaccattctccatctgcattctgaaggattctgaactgttaagtgctcagtattataaaatggcaatagagagcagtgacaacaattaactgagttaaaagagaatgaaatatttagctagagaaatattggtgccatgcaaggaattaaagttaaaaaggagaattggaacaagtatgacaataggtgacaagaaagaggaagggattattttattaatataaagctacatagtttgattcagggagatctgaaagaacatggactggctgaattgattgtcagttcattcagtatgattagtttcatcattgtgcgtgaatgaaaatgtggaggggatatttagaggaggaaagaggagaggtaaggaaacttataacgaataaggagttaatggggaataagtaagttgtgatagggacttggaagaaaaaaaaaaagtcaaccctaatttatagaagagtcaggcaccaggatttgagactatccattcactggttgtcattctgcacctgccttgactatgagattccctcctcagttgtgagggtacagaagagggagggccccacctcaggtgggcagagcaacggaggctttttcagagcatgtggtgttggagctggcttttgacctgtaaataggcctgctccaagcattcctgacacagagtgaagagggcattatatgttcatagaagagtgtgaagtctgggataagtaaacaaagaatttatattttagttttatcttgaggatattgttgaacctatgaaagtttgaaccatgagaacgatataataccttgtttttaggatggtaagaatggttgcagtgtagagtagtgcagggtagatggaagaaagaggggctggtggtagggagaccagttgtcgggacttgggatctgctgtcgatccatttttccatcttggtgcttggactaggagaagtccaggaggtctccttcagcttgattaaggattggttatcttgtagttccagctgagatgcaaagttcctctcaggaacttgtgggagaaagattggactcagaatatcttacagtgagaaaaagagacagagtgttctctttccagtgaaatcgatttttttcctcctgtagctcctaaggtcattacatttattgtagtgttatatttttaacaattcattcagtatttattttataatcttaattgattttgaccttttttgtggtgcagatataaatgaatgtgcactagatcctgatatttgcccaaatggaatctgtgaaaaccttcgtgggacctataaatgtatatgcaattcaggatatgaagtggattcaactgggaaaaactgcgttggtgagaagttttacccattttctgaaacattgcctgcataatgcattccttctttcattgctgggagaaaactgcctttgagtagcttagaggactgggcaaatggacactttatacttcggatgttagcacagcatatacatatctttagtaacaaaaatttacatcactgaatcttcacagtttatgaataacgatgtatcagattcactccttgaaatgatttgctccttaaaataatgatgtatcagatttcactccttcaaagagaagctccttagatataagatgcagagattctgagccattctcatgtgactacaaagtcaaccttgattttactgagagagaagcagctcttctcccaaccatttattagacttaatcagaaaaaaacacagcttattttcaggaatacctgctctcttaaagttgggttttgcttcagacaggcatattattcagctaaaagcaagcagttttcctgaggtccctgaatcatgaagctaaattccccatgacaatcataaatgctacagattactttgtactttataatcatacctggagacaatttgaattattataaggaagaaacacccattctggaactaacacatttcaaagttggaccatactttctaaatatttatttagttccttaaatcaataaggttaatccttttaattcgacaaaatgaattaaattatataaatttaattatataatgtaactctataaagattaatgatttccagcaaatctgtattttcttcctgctaaagaaataagtgaattaaatagcctagtgactttaggctttgtagatatttagtttagatacttagtttaaaaccaggtcaagcctctgttttcctaaaatgagatagtttaggtaaaagctaatgctacaggagttttgcctttttgcttgaattgatcacgtcgttatgactttaaagatctaatgtaaaagagcaaagtagatacaggcaaagtttgggccctttttaagtgtttattttcattgactttgcagatattaatgaatgtgtactgaacagtctcctttgtgacaatggacaatgtagaaatactcctggaagttttgtctgtacctgccccaagggatttatctacaaacctgatctaaaaacatgtgaaggtaaaccatatttttgttcttatactgtgtactttgctatcttttggaatgccattagaaaaccataagactgaattagagtctcctgtattttagacagttatgccagtttagttgaaattctgtggttctacatggcactagtatgtactttgtaagccacttatggtatttacttgtaattggcattttaattgccatcatttaatagataaagaaaatgttatgtgtctgctatttgagctattcattcagaaatcacatacacatttactccagattttctaaataaaaagattcagccaagtcccgtattctatactatagagatgtactagtctatactatagagttattattttggcattccatctagtgtaggaaaaactatttagcccagctttactgtgtgggattaaggatatgtagtagcaattggggtcaaagttgaagtactcttttaggcccaagactagattttagcagtaatgtagacctgtttttgtttcagacattgatgaatgcgaatcaagtccttgcattaatggagtctgcaagaacagcccaggctcttttatttgtgaatgttcttctgaaagtactttggatccaacaaaaaccatctgcataggtatttatctttctgagaatgatttttctatgtttatcaatgttgttatacttaatgtcagcttttcctgcaaaagaatttaagtatggatgaacaatattaaaaacttcattattccttgtttcaaatgctatttttgtctataattccaaggtgtatgtttgaatttttatatagattctattaaatattattccctcctctgcagaaaccatcaagggcacttgctggcagactgtcattgatgggcgatgtgagatcaacatcaatggagccaccttaaagtcccagtgctgctcctccctcggtgctgcgtggggaagcccgtgcaccctatgccaagttggtaagagaaacccatgctgtggttcctataccactccaatggtctttgcataaaaaggggaagcctagtatttcatttatctaggctcacatgagaattttcaaagatttaatcctgatggccccgaacatattgctgaatgggaaataagaagtgtcaaattttatgtgattttgttcatttattattttctatcttcacattgtaatgtggttagtttgtgttgcttccctggagcaccagtgcctgccagctctcttgggaaccttgtggttaggggttctgagctttttataggtacagattatctttcaaaaagctaattgatgtaaagaaaccggtattcatgactaaacttcataagggtttctggtgaacttctaaatctgttgggaacttgaggtttgagaaccttgctcatggttttgctgatttaatgtttaaatatataaatgtgtaaatttatgtgaatgctggaggccatgagatctccaaattatagacttgagttttctatattcaggttaaagtaattctatagtgtgattcctattttcaggtgaacagcaagagagaaagctaccttcagtttccctcttagctatcactttaacatgatctatagggcacgtctgtgtcttttggagtatcttagtggaattgagctttatttgaggagacatttcattactgttcttcctcacctatgcaatcgcagaaacattttgttatctcatacttatagcaacacaatctacttcatgttccaggtcatctttcatgtttcttacactatgtcagaactgcaaagtctggatattgttatctcaaatttgttttctgttttgtttttcgctttttattacagatcccatatgtggtaaagggtactcaagaattaaaggaacacaatgtgaaggtatttctgattacttataaaccatacatttttgtgtgcataatgaatgtttgtgttaactcggactggataaagctgtcatataacttcacagggagaaatatgcagcagagaaaaaaaataatgagaactacaaaacggaacagctgttaatttcacaagcatatatatactgttgctagtgtcagaacgctatgtccaaaggacagggtgggtggctgaaaatgttttaggttgatcgcagtttagagagactgcactttcaaaatgctatcaggaagagaaaaacaggaagtttttgatgagtctgtaaaatttgcctttctttggtttgtcctggcattttttatttgtttgtttcacagtcatgggtgatttagaaggacacattctgttttctctttgttgaaagtctgcatggagtttcttcagtttgctgtgattctttctcctggagtttcagatagacataggtcatggtgactaacacaacctgacatgacacagcagctgaaaaattttaaaaacagcaattagtcccatatgtgggatgaaatgaagttttttccctgttaaaacaaagaggcacactacaacccccacccaaggtcttgctttccaaatgatgactgaatcctttggcctttctctggtccagacccgctgttaataacttatctgacctcagcagcatattttgttgtacaagtggccaaaacaaaacaaaaaacccaaaaaggtagattccaccctctccccattgatctctcttacaaggaaagattcagaatattttttcaacattcctgttgtggaaagttatttcttctaaatagagacacagtgtgtatgagtttcttagctaatgttcccccctcttttttttttggcattggcaagtaagtgcctttcttttgattaacttggtggtgaatacttttccaaattaagtgcagagaacatattgctctccattaggcaaactgggaaggactggtacatttgagagagattggatgaatgatgaatgaatgaacatgagtatcttttaattcccctcaacccaagctgagaccaaagcatggacagaacagcctgagaccatggctgagttagaattgattgtacattttctggtgatttatcagaacttcttaaaagagacccttcactggcccacatattccttggtgggatatttttctatgctgaacttcaagctgtttcttctttgctagtttgaaaaaccaggtttttgcttctctactcatttccagacatctggtctcataaagcaaattatattgctgggaaccttacctgaaatgtccgcagctaccagagctgtctccaagaactcacaccagctgcctgtctctacaactcaaaagttattccctgaaaccaatggagaaactcttacatatttagtaataggtgggctcgttctggttgctattcaggcaccctagaaattctacacaaactacttgtaggcaaactagttttatgaacttaccaggttcaaaatggggaataattatgactctatgagtagaataaggtagaatgatattataaagatatattaactttatactttttttttctttttagatatagatgaatgtgaagtgttcccaggagtgtgtaaaaatggcctgtgtgttaacactagggggtcattcaagtgtcagtgtcccagtggaatgactttggatgccacaggaaggatctgtcttggtaaatactgagctcattatttttctaataataatttattaacgattattaaaaatgaagttaacaagatatagctgagcacttagcttcaggtacagacacacactccaaaattcagcatgtccgatagggtccatggccactcctttgacagtctttcaaatagtaagcagcaactgtagtttctgttgatatgcaactattccttaaatcactagcatcacagttatttttccagagctcttaaatcggccccatatgccgtgaactataaaatacaagctgagtggtggagaaaagaacaatatttgcacatatttggaaactgtagcccatgtcttctaagcataccctgacattggccagaaggacaggtccttgcaaaaacacctgtggagatcaggagtgaagatgccactcccctgaaaagtgaacctgagaaagctcagcccagggtaggtatcactgctagtcatagtgggatattctgtgccaactgctagagcccaaatgggatcctctagccaaattgtctcaccccaaccctaagtccttagaactctaagtcctaagtccctatgggctcgtgatagtggcaagtttgagatcgcacatctcatgcatctaaggtctggcagacttattctggtgttactactatggcttctgcctgcctagagtatatcccttggatcactggtttctgagttcatgactctggaaatgatgcttacctgtactttgcatctgaaaccacattactttgaagtgtaggctcagtgaagactattgtaggtagttaaaaaagtgggccgggtgcgatggctcacgcctgtaatcccagcacttcgggaggccgaggcaggtggatcacgaggtcaggagatcgagaccatctttgctaacatggtgaaaccccgtttctactaaaaatacaaaaaaagtagccaggcacggtggcgggcacctgtaatcccagctactcgggaggctgaggcaggagaatggcatgaacccgggagttggagcttgcagtgagccgagatagtgccactgcagtccggcctaggcaaaagagtgagactccgtctctaaaaaaaaaaaaagaaaagaaaaagaaaaagaaagtggtatacagtgaaggattttgatcacttacgaattagaattaacaaacctttaaatattgaactttatagtttatagtgtaaataaataatatggaatggaaccgggaattcaaagccaaaagtatttttgtaattaaggatgtcagttaatgctattctgagtcttagtttatttgtttaggaagaatcagtatttaatgagaatcttcttctaggttcttcagttgaaagatgcttcagtgtttaatttaggattcacttaaaaataatttatcttaatatgggcagtctgaatataaagctgaatataaagacttcaaaaactttctaacgttagaggaaacccagggagttagatatattgttaatgaccccattgtgaaggagaaagagaaggaagatacatcttacatttcaattacacttcattattttcagatgcataatctcagttgagcttcacagaaccttctgagagatgagtgcaacatcctgtaacagatgtggaaattcaggtttaggataatttattgaagacaatccactgagttacagaagaggaccaaaatccagctcttctgacctctgctctgctaggctttctgctcttctttataatcccatgaatttgggtttggggctagaggtatcccacaagtaccttgaagaatgtgcccttaagcacgtgtttaggtgaaagaaatatttgagaagtaaagtgaatggcttttctttgcatttttctctttaatctcaagtaaagcagtcctctttccagagttcatcattccacctttccaaaaatgaagtgggtcggaggaaaaggtgattgcactagggcagacacgctccaacaataaagagtacagttggcttttagctgtggaggacatgccaagacatcatggcatgcacgcatcggtgataggtatttctgtacaggagaaaaacatctcccgaaagaacactgtgggatctctcagaataccattccttatgtagaattatcagatgttgaaagggaacttttcagaagtaggaggtgcaaacatgggctgacaaagagagtctttattaggcaaggatacttaccccagagcctggggttttttttgaggaataaaactaattccagtcaataagtatacagcaaattattatgtgtgcagtattttacctaacagagtgttggcagtttggggcagtggaagccgtgtggctctatttaacctcccttgattccctctgacagatatccgcctggaaacctgcttcctgaggtacgaggacgaggagtgcaccctgcctattgctggccgccaccgcatggacgcctgctgctgctccgtcggggcagcctggggtactgaggaatgcgaggagtgtcccatgagaaatactcctgagtacgaggagctgtgtccgagaggacccggatttgccacaaaagaaattacaaatggaaagcctttcttcaaaggtacaatgttacgttttccatggccaattgcctccctttttagacaaataggatgcattttcatgatctcagcactctacttgatcatcccagcatggactttttgctttctgaattatataattatctttgtttagaaaagtatgaactttttgtttttaactgtttggtccaagaagtcctgggggttaaaattgttctgtatggagagatagtttcagatagtttctaggtggccctcttaaatgtcagttacgtaaactcaaaggaactttaattttgcttccaaaagctatggtaattcattgctgaagaaggacttggtgttctggagatttaatctcccagttctgtcttacatgtagaaattacttgcgtatttcttgagtgtttggtcttgttttggaaaaaggccctgtagtgggaaactcaggtcacatgttacatgtatgcagttttctagtgtacaagaagctctttaaattatattaatgagatcttgagctggatgcggtggctcatgcctataatcccagcactttgagaggccaaggtgggcagattacttgagtccaggagttcaagaccagcctgggcaacatggtgaaaccctgtgtctacaaaaaaaaaaaaaaaaaaaaaaaaaaaaatatctaggcatggtggtgcacacctgtaatcccagctactcagatggctgaggcacaagaattgcttgaatctgggaggcagaggttgcagtgagccaagcacaccactgtactccagccttgatgacagagcagatcctgtctcaaaaaaagaaagaaagacatcttaaggtatatacattaagaaaatatttttaaattgtacaaattatttgcaaataatttaaattataaattatatctttgaaatttttatatttttggcatatccaaaaaagcaccaaacagtattaagtgaatatctcattctgctacacagtcaattgatagctgtaggataatatattctaataatgttctatgtgctttaaatatagatactagtggtttagaatatattatctattcactcagcaagtagtggttaaatattcactatgtgtcaggcagtgtgctgggccctagaagtctgaatagacacattatttgcttctttaacaatgctttataaaatgtagaaatttgaaaggctagaaatgtttacaaagtcatatatctcatggatcatcacacattcttggaaatgtatactgccaagaccttaaatcaagaacttccaaccttcatgatttaaaatggtgggcattgagacctcctgactgcttgctcataaacttattttgccccacattttcttattcttgaagatatcaatgagtgcaagatgatacccagcctctgcacccacggcaagtgcagaaacaccattggcagctttaagtgcaggtgtgacagcggctttgctcttgattctgaagaaaggaactgcacaggtcagttaatgagccttaagggccaggagaggggacgtcctttaaaactctttatctttaacatattgtcgcaagaattaaggctgtcctgagactcatttgctgccacttgctgtttttgtgcagacattgacgaatgccgcatatctcctgacctctgtggcagaggccagtgtgtgaacacccctggggactttgaatgcaagtgtgacgaaggctatgaaagtggattcatgatgatgaagaactgcatgggtaagtttgggatcatttgatcaacacagaaagagaaggattccatgaagctttgatggctcatagcctatgttccaggttcttcctgctgccccagtgcaaccagtgaagttaggaatcagtctgcaacagagggagactgaggtagaaagaatgagggaattcatgctgtgggtttgtgggtgatggcggagaccagttgtgggcccttgagaagtgattttaacacctgaaatggatacccaggcggaagagaggacaattgagacagaagctgtagtagaggtccctttacaagatgtctgtccaacacttctagaaaaggtgattggtaaacttgttgctttaggtctggtttcctagaaacaaagtttgaaatggagattcttgcaaaagtggtatttcttactgtgagcaaattctctcagaaggtacttgtcaggaagtaaggagagcagggtagtgcaggagaagaaaataaaccaagagtttggctgcattttggttttagtctgatcctgcagggagatctggtgtatgaatagcaccagagagttgtcccaccttgagacaaggaggtcaagatggacacccagcaatgggtgggggaggagtgcttggtctggtggaggagatgaggcccccacctttaacatggtcatttccattttgcagatattgatgagtgtcagagagatcctctcctatgccgaggtggtgtttgccataacacagagggaagttaccgctgtgaatgcccgcctggccatcagctgtcccccaacatctccgcgtgtatcggtaaggagaaagactttcacaccatttacttgtggtcagttgtttgaatgacatcattgccaaagttggaagcttatgtttgggtgtttgttcttcttattttcccgacagacatcaatgaatgtgagctgagtgcacacctgtgccccaatggccgttgcgtgaacctcatagggaagtatcagtgtgcctgcaaccctggctaccattcaactcccgataggctattttgtgttggtaagttcttttttattttattttattttattttattttactttattttatgttatgttatgttatgttattttattttattttatttcatctctccctaaaacactctatgtactctgagttttgttttcatcgctacttttacttatctttcttgtttccctgcaatattctttttatagtggctcacgatctttggatctcatctccattatctgtttaaagagccagttaagtgaaggacataggatgttttagctctaataagcataatttgacccatgccgtttggatagggaacagtagcagcatgtgctttgtctacacacatgcataccaatgcacattaacaaatggtaactaaccacctgaaataaactaaacacggtgagtgctgtggaaaagagcagaaagctgagttgaaatcactgcccttatgtggtttagatcagctaaaagatttcaaaaaaataactattggaaagaagaccatggaatgttcatatcttacactgcaattgaggctatgcctggctctccttaaagatgggtttttgtgggacaagaattttgctttgtggtcagccctctgtaggtttagtcgtgctgtgaagagtggcacagacagtcctgtggctttattgtgccccgagtcaaagtgaaactttgtagaaactgccagtttttgcctggtttggggtgtacaccatgtggaactgccaagtctcacatggtttccacccaaaaccataaatcagcccaaagttttctgaaacatggcccaggacaactcagaacttcaactcaggttattgaaaaagattggaacctcagccaatcaaactgaatttcaagtttataagtgaatctgtggccaagagaatttcatccacgtgcctattatcataactgagatgtgttctcctagcacccaatacttctcctgcattgcaaatggcacatcatgcatggtgcaattaattgttcatctgtctcctggccacagtgtaatcattttgaagtcaaagattgtgtctgtcccattcactattagagtctcatctctagcatatagtaggtatgtcattaacatttgttgaaggaatcagtgactcagttgccctagaatgctttttcccctttatttgacgtatgcctggaaatgttaaaaatgtgccatgctcataaacacagagggaggtgtgttagcccatttttgtgatactgtaatagaatacctgaaactgggtgatttataatgaatagaaattattagttcacagttctggagggtgggaaatccaatatcaagaagccaggattttgcatggtccttcttcctacgttatcccattgaagaaagcacgagggtgaaagagagcaagagggggctgaacttgatcttttataacagcaccgatcccaccatgagggtagagccctcataggatgattacctcttttaaaggccctgcctcttaaatagtgttacaatggcagttaaatttcaacacgagtattggaggggacagacatccaaaccatatcagaaggtgatattattttcatttcttttagacattgatgaatgcagcataatgaatggtggttgtgaaaccttctgcacaaactctgaaggcagctatgaatgtagctgtcagccgggatttgcactaatgcctgaccagagatcatgcaccggtgagtaggttctagcctcatgttgaatctctcagtaggttcctaagtaaagtagtttagggcccaggctttggagtcaagcaggcttgagtccaaacccttgtttgtcatatattttaactgtatccttaatcaagatacctattattagaatcctcatctataaaatgaagttcaaattgcctgcataaaatagtatttacagagcttaccatagtacctggcatataataaatggaatataaaatacattttccttcattgaccagacttttgaagagtttgatgttttggcctaattcagtgcaactccaggtttattccttgaaccattggcaacagcatcacctgagaacttgttaaaaaaatgtaaaatctcaggccccattccagatctaccgtatcagaaactactgaggtagatcccaggaatttgttttcacaatctctccaaatgatttggatgcatgctaaagtttgagaaccagtggtctaatttacacttccttttgtatcaccctggctgcgagagctgtgagccaggtagaggtgagaaacaaagtgggtaataacataggctttgattttggcttggcttaagaagagaatttggatttaggaaccaaaattattttactgacctagaaaaatgtcccttaaaaaatctagatataaatttggctacaaaaattgttgaaaataaggccaggcacggtggcttacacttgtaatcccagcactgtgggaggctgaggcaggcagatcacctgagttcaggagttcaagaccagcctgaccaacatggtgaaaccccatttctactaaaaatacaaaattagttgggtgtggtggcacatgcctgtaatcccagctacttgggaggctgaggcaggagaatcgcttgaacctgggaggcggtggttgcagtgagccaagatcgcgccattgcactccagcctggtgacagagtgagactctgtctcaaaaaaaaaaaaaaattgttgaaagtaaatattattactaagagcatctaagtaggtatggttatttcaagtaattcttaccttaaaatattgctaaaacagttgatagaattcaggcatttataatttgacaatagggaaaataagatttataataatttttgaatgataaattaaatgaaagaaagattttaaataaataatagacttttaagcaggtgtggacgttgcccttgagcagtatattataaatattgaaaaatattttttccttttttaccaaggataacccaatgggctagtttatgcaaagcttcatttggatttgagagttaatagtcttatgctagtaggctaagtttatttgactgcggtcagttaatgttttctcactgaacagtggaaccaatatcaacaacctgtggttgttggttttattctttgcagacatcgatgagtgtgaagataatcccaatatctgtgatggtggtcagtgcacaaatatccctggagagtacaggtgcttgtgttatgatggattcatggcatctgaagacatgaagacttgtgtaggtaagcaaagaagacagaatttttcatcttgtcttgttagtcataagcactgttaaattacataaagttagtttgggtcagtgatagaaagattccataggaaaagtaaggatatttagaggcacaatactcatattttaaccagcattccaaagagagctttcttgtggctattaaatggtactcttgtcagatatgttatgaggactgactggccattcgtcagctccagatggacatttcttttatgcctatccattacttttgtccacttaaccctccttctgctttgactatcatgtaggctttttaaatccttgactaaaggcaaacaaaatttacttctgacaagaatgcagtaaactttagaactgatctatttgttttgtatagtttctattgttatgccttcaaatttgataaacttttcttctacgatctctaatctgcctttcctcacatacagtgtatttttcatctcagatgttgtagttttcacctctaaaagttcgacttgggtattttttcatatattctgtgtctctgcataagttcaatcattcctctagctgtttgaacacatggaatacagttataacaacttttagtgtctttgtctcctaattctgtcatctgcattggttctaggtcatttgaataaattgactttcttccttattttaggtcatattttcctgcttcattgagtgactggtaatttttgattggataccagatagtgtaaattgtgccttactgagtgctagatatttttgtattcctagaaatatttttgaactttgttctgaagtgtaaattacttggaaacacatggatccctttcaaagtcttgcttttaagcttttaagctacacttagtctaggggtaattttgctctgttagtgaggtaagacccttctggatattctacccaattccctgtgaattatgaggctttccagtcaggctggtgggaacaggcacaatcccagaccccctgtgaactttgaggattgttccctctcattttcttgggtagtgctttccccagccttgagtagtttgtttccttatatgaatgtgctggtcactactcatctgaatacttgcagaagactcttagcaaatctctggcattgctttcttctgtgtagctctctcctgtcctttactctgccctatgaaccctaactacctcagccttccaggatgcccagattcatctcctcaactcaaggacagtgcctggctccatctggtacctcctccttatgccatgaagttaaaactctcctattcagtaatctcgggcaattgtaggattcacctagtttttctttctctcagggatcactgtcttttgttgcctaatgtccaatgtctagaaaaccactttttaaggtatctattgtctattttttttggttgtttcatctgagaatataattttaattcctgttattctatcttggccagaagcaagagtctggtattgattatatttacatttttatcacatttatcttctgaaagcctttactgaaaatgtttgaagtcctagaattaaaatgaatgtcataaaaaatgaataatttttaatttggaaaagaagtgaagtcttaaactacttacactaagacaaccagttcatctatcctttctttcaaaatatgaaaactaaattgttatcatcatgcagactgaattaaacttttcatcctgcaatagagtatgctgttctaaaaagttttctagactgtcacataaacgagctctaaactcagcatggagcccatctgtttatttgattaactggcctgctgcttatgggccagatgaaagccagtctgaataatgagcttgcaatgtaaagaatgaagagcaaatgtaaattggcctctaaaatttaacattgtttttctgagggaaagcattttaccttttctaatgtatttgtcatagttattatgtctcgaggggaaagtactcaatgatatcaaatagctacatatattaatagtatatatgttttacagatgtcaatgagtgtgacctgaatccaaatatctgcctaagtgggacctgtgaaaacacgaaaggctcatttatctgccactgtgatatgggctactccggcaaaaaaggaaaaactggctgtacaggtgtgtttgttcaagtagaacaataaaatattaagtagttaagagattggtatcataattatagattgatacatgttttaaaactcatacattttaactatattataaaacattttgcataacatttttcattaatttagcttccacttctttgaaatttgtcatcgtttatattggatccaagttgcaggtttttttcttgacctgtggggggaaaaaggtgtattgaataaattaacactgtaaatagcacatttttatgaggttaaaaatcacattttcatatcaaattagtgaacatgctaattaccaaatattcatggcccttcaccgaagcaagccttttccaataacctcctttgccaacacttcatttaaggtttataactggaattgctctttaaaggaaaacatcctacaattcatatatttcatcaattctcactagtcttccagtgccttaaataggagtacttttgatgtattaagtcatattagtccaaggaagtctttattcatgggacttagcaaatcttatgaagtgataatgaaaccatttgcaatgttgtctgttaccaatagcacatgagaaaatgttttcacaatatttgtaggagactatcctattaaatgccaaatggaagaagttactctgtgctaatgacattgtgtttagtttataagtgtttagttggtattttcaaatatgaggcaatgacattaagtccatggaatgatataataaagttttactctagttacttatattaatttgacagattatggcatataacataatttaaaacataatggaaaccatggtgagcttgaattaggtaactgaataatttcttaataaataacagtctttaattccaaaaaccagtttggcaagctcttatgacttaaaacaaatattaaaatatttgcagattggcagtggggcaaatgtgcagatcctcctcttaattatatcaacatatttcaagaaaacaccaaaatatatttattattgtttcaaactggccaataatgctatttcaaatttattgatatgtaggataagggcaataatattattgttggttcaaaaataacagatgctagccaaattatgagaagaagcatgaagctggaatgttttcattttcactatgctactccttacatgaagcctgtctaggggtccattctgataaatggcacagtgtttaaactctcaactcctatacggcctctcggtacaaatggtgcctagctttgtatgtctatggttcaagctttatttttagcttccagtataaatataggacttggtaagggatgatggtctggcagtagtgaaaagaaaggtaagatagttctgtattatgttttaactaatagaggataatactactgttttgttaagctgagcacattgaaattcaacccagaggcagtgatgcttatgaaagaagttaatctcatggaacaaccttcattccccataagaaagaggtctctagaattcaatgctccaaattctagctaactgggtcatgtgcagtggctgattattttaggccttaccctgaagaaagcttaaattttcatgttatttaatgtagttttaggtaaatgacatataatgtatacaatgctgttggcgcagtgctggtcaataaataaaagctattgtcaaatgaaacatagacacagtgtctagaggccattttagtgaaagccattgcttctagtctatatctattgtccattgttttgttgtttcatttgagaatttaacagtctagcaaaaattttatgctactgtttactgattcatgcttgaactcagtttaaagaaggaaaatcttactctttatattgaaaggcttgtttttcgtagttgaatttgcacagatactaagaccatggtaacagagctgtgcactacagttgcatgaagtgacaccagctttacgttaagaacagcagcctttgagtcaatcacatgaacatagatttgaagtcaaagaaacatttgatcctcttcaaatctttttcatagatttgaagtcaaagaaacacttgagctcttcctccagttttgaaaattacagcctaaaatgattttccaatttgctaaaatccagctagcactgtaggaagacttgagttttatgcccctttgataccagagtaacatggcatgtgatattctcatctgaaggagtagtaccctgaattgtgttcttagtaaatccactcattcatgatcttgaacaaatcaccagggtgctctgcagttactcaaatgttctccttgggtaagtaacagccctgacctgtggaagggcatcacatttgattggaaatggcttaaccaaacagtaagtttggtatacttgaaaacgtgtttttaaaaatctggggcaaaatgttttttgaatgccatgtcactaaggctcttttagctgcttttagtttaaaattcgtgtcattcacaacttagaacaccgtcaggttaccttggtgatggctttgctaataatgttccaggcaactaatgtaagtagagataggtatcttgcctaattggataagcaagcagacaaaaggaatatgtctacttatttatctatttatttatttagatagattattgtttaatgaaaagaattatgaaaatatgtatgctattttataaggagaaattttgcttcatgagaactaagaaaaagacctctgggctccattacagttttgtctaaatatttcagctccctgtcattactgagtatttccattttaacaaataaacatgttttttcccccaatcactttagcaatgttcagaatccacccactgacttacattcccagcccacacagatgctaagggtttctttttactccgtaagctttgttcagaccctgggtattgccaagggggaatgttccatttaatggagagagaacacatttgcttgaaacgcagaacacagctcttctatccttggcttaagtgggctggattacaatttttctatgacccaatgtaaggcttctgctgcttgttctacataattaaggccctgctaggtgtcatctttgatgggtggtcctggctttcacaagctaattttaagaccctacctcccatcatgtgcttacttagttaatgaataaagcaagcataccattaagtggaattaaatcagacttgttttcagttaaaatagcgggatttctgggtaattccatattggaaactagctggtttctttcataagagaaatgtctctggtggatcttggttcataggagagaatcatatatttcaaccaccaacagtcagtgagaatttgtgttcatttccttccagtttcttatcactgctaattttccttcactggctgtcggcctgtgaaaactccatgggtgttcagttaatagtgttggctcaaatttggatccaaattaagaaatccaagtagccttcacgtttggcctctccattcatggtaacgccctcttcctcaatgcctaatcaaggagtttctgcagtgcacagctctgccaggttaggatccaggagacagatgcccagatggcagagaaggcaggtgtttgtgtgggtgatacagcctctccctgcgtgactgtaagaggaggccacagcagccccgggcacaagcccatacttggatgacatacttgcatgggacatacccagagcctgtgagcagggtctgctcacaccacacccttgcccttcaagagagccatgcaagaggacctttgagtctttgtgacaaaggtttggtggggttaagaaggttgcggtgtcactttaagtttgaatttctttgcttttcttggcttatgctattcttaatcttaaacaggaattttctgtttgcagcgaacttgtgcaggaaagagaacatttttacagaaagagatattcttggcaaacatgtactatgtttccttcatgttattgaagagtgtttcaatacagcatttttgtttgcttgttttccttatggctcactttccccttctgtttgcttttatgatgaattacagtccaagtctgccacagaaacaattaatgaatgatagttggtgcatgcatgcacacacacccacatgcaaaaaccttttatttggagatgcttttatactttatgaccacttgaagtctctccaattgttacatactgagagtgtaaaacattgagataataacttatacaaatagtcacaaaatggagaattgaatattggctcctgagttactctctcctattacccaaaagcccatgatacacagcctgttgtaaatatagtttcttttcaccttgaaaacattgccataaaactgaaaacactttctaaagttgtaaatttctattagcatattactgatgatttttaaaggagactttccattaaaaagaaatgataattttcttaattgcaagattaaacatggaaggtaaaagccatatgaaaatgataatactcataaaataagagtacctctggtcattagaaaactggaaagaaaaagattacagaattactagattaataggttgtggtcatctctgaaaattatgcttagtagaagatattagtgagtatttctataagtcagttaatattcaccaatattttggtaactccataaagcaaggcttagaataaaatcctgatatgactaaagaaatgcgctcagctgggcgcagtggttcacgccttaatcccaacactttgggaggccaaggcgggtggatcacctgaggttaggagttcaggaccagcctcaccaacatggtgataccccatccctactaaaaatacaaaaaaaaaaaaaaaaaaaaaaaaaagccaggcgtggtggcaggcacctgtaatcccagctactagggaggctgaggcaggagaattgcttgaacccaggtggcggaggttgctgtgaaccgagatcgcaccattgcactccagcctgggcgacaagagcaaaactccatcaaaaaaaaaaaaaaaaaaagaaaagaaaagaaagaaagaagctcagctaggcagctgtggcccaagggaaggagtgccaatcaccagatggggaaactgagtttcaggaggtcctggctctgcccctcactgacttgtagggcccaacttctttgtcttcttctgagaaactgagattgggagaatggaattacgagttctttccacttagaaaattccttgattctataacatctggaggctttgatacttatgcaattgaagctttttgtgtccacataagattatttgtcagagatcatgacaaatataggagagaaatttaggcaaaactccacaaaaatggtgatttgttgcattacctctgaggggagcaattacctgaggcagaaagaagtttcgacagccctgcttgggagtatttgtgctagttctgcgggatctgttaggtcaggtatggaaagacatacattcttgaattcctgtgcctacttagcactgttatccctgaattggccttcctcctcatttccttggaatgtgccatgctcaattatttagctggttaaagctcccagtcacagtctaaagctatgtgtctctcttgacctgcagtaataacttgataggtccatgtggctgccaaggttacactaaaatccacctatacaatgtgtcatgactgaaaggacattcttccaggcatgctgcttcatttttatgatcattagtgatattataaagttcttttgtaggagcaatctgttcttatttcattttgtgtttgctctagaagttatgaagaagccaaagatcccaggaccatttcagagcttcagatggaacacttggcagatagcatgtttgcaaacactttcaaatcatttaattgggcttcataagtaaacaaaaaggcaaacatgaattacttgcccagtttctttttcatgccactattcaagtgttcactggaaattcttgcagtgttttgtatggcaaaattgttcttcttgacctaagattggtgttagatgttggtttccatatagagtaccatatttatgagttcttgttcttagttaatgacaaagttgattatgagggtaacccattatagaatgggctcgttttggaaaattttcacttagtactttatgttcttttctgtaacatatttatgttagagagtctatcttggctaaagttgacaatagaattttggagaatagagcattttggaaaatttggagtcttttagtaatgtgaccctaatctggtattccttatattctgacaaaatccccattggattaacttgagttttacatgaaatatacaagaaggcttggctctccaatgtgctaggactctaagaagctagggaaaagatggcttatatactgtcttaaggaacattttctgcaaatgcttaaattagcaatacctaaaggaaagcttttgtagaaataaagcataattaaataagtgttttaagtttaagaataaaatatattttatatatagaatataatgcaaaaattttctaatttgccaacaagtttgtattttttgtctatacaagatatgaaaataatgtgcatcattactccatagttgacttactaaaaatactagcaaaagaaaatatgtgacaaggagtattaaaaccatagaaaattaagcaactcattttttatggtcttcagctgtaaaaagtcactttgcagtgactggaaacttacattaaaatacggaaaataattagagttaacaatagctagtacaatcatattgttatatctttataatttgaaatttaaagctgtttgatatatgtagagtttatatatggatgcaaaaccagtctatactataccatgggaagtttgaaggcaagtcaacttttgaatattacttattttaaaaaccaaaagacatttgtgctgagcctttttctaaatcactgctcatttttccagacatcaatgaatgtgaaattggagcacacaactgtggcaaacatgctgtatgtaccaatacagcaggaagcttcaaatgtagctgcagtcccgggtggattggagatggcattaagtgcactggtgagtaggaaagtaacagaggttgcttatcaaggactgcatagattacacatatgaaaatattaattatgtaaagttattttaatttgtgtattattggttttaaataccaccctttctgttaataatgatataacctttttctataagatctggacgaatgttccaatggaacccatatgtgcagccagcatgcagactgcaagaataccatgggatcttaccgctgtctgtgcaaggaaggatacacaggtgatggcttcacttgtacaggtatgttcacgctggaaacaactgtgtcaacactagtcagagaagccaggcattccacatttctcaggctagcaattcttttttgaagactgggtcagttaatagaaaagattcatcatttggcactagagctctgtgggaaaaaaaaaattggaaccaggtcaattagggagacctcaaaagcttctcgataggtagatacgtaggtagatagatagatagatagatatttaggtgccattatcacatcatttacagtgatctgtgctctaacataaaatgataccaaaaaagtcataccattctccacctcaagtcagctaggccttataatagttacaattggcatatatatcattatatgactgtatataatgatgtcattagtttaaacaaatcatacttccttttatatgcctagcctttatttattattattttttttttgcctatttctcaccaatgacttcctttctgtaccaacacaaggataagcttgctgtagggaactatgtaaggagaagggattagatgttctagattagaagaacagtatgtatttctctccaacaggccatcatcatcatcattatcgtcatcatcaacattccatattggtataagtaaaaatttcaaacctgctatggaattcattcacttccagttttgcaataatatattaatgaaattttctttttggctctaattaatagccatagaattaacataaacttctatacacatgtaaacatacatgattagacttgtcattacataaattatacatatacttacatgtgcatatatttacagacagcactttttatatcagagctctggagttaaataaaataataagatccattagccattaggtcgcatagctgctcctataacttaaaacattgatttatcctgagcactttgttcataaaaagtcatttaagcacaatagaggctaaggctcattaagtgatttacctggaatttttttttattccctgaaagttttatctcagatgaaatcatttttgcctaacttattgatgttttgtcatcaaaaacctcccatcattttgagaacatattcaaattccatgtattaggcatgtgtggtttatgtgtttgatatttaaatgcctgtgattattaagaaaactaggtagagattaagcagatggaatttttcttctccctatggttgccattcttttgcacttttggtgcccatctaagctaagcctgaaacttgagaaatagacacaaacatgatgtgtcatttcctgtcatgggtgtgccctccatgcggatgacccttcttgaacaggccttagtttgcatgattccttcggcttattcattttatatcattcagggtaaattatcattcaggattctgaatcagccacatgtaaatttcatattcagtgttagcctaccaaagagaaaaataaatgactttaaatgtgtcaaattgaagttatgccaaaacattgctgcactggaaagttgatagacctgaggaattagaaagcccctaaccgaggaagagtaacgtgtgtttctttctggctgtagaccttgatgagtgctctgagaacctgaatctctgtggcaatggccagtgcctcaatgcaccaggaggataccgctgtgaatgcgacatgggcttcgtgcccagtgctgacgggaaagcctgtgaaggtaactgatggggaagccactgggagccttgctgggcttgatgagattaggttatttaaacattcctgatgcttttttttttttttttttttaaactgaggtgtgttttagcttcatttctaagctggtcagttcagtttgtagagggattaggtttccagctgaccatttctcttgctgcacagaaaacctcagctgactggccacaagctgtacatccagccttggccgcatggtctgcaagggtgtatccattggtcaatgagggtaaccaagtgtggttaaatcagtgcaacccatttatccctacggagggggatgcaacctgttaatccctactgagggagaaaagagctgaaagtgcaagttccctgataatgtcctgttgtgggattatcactaaatatggaaacacaggttttaatctccactgtatttggtttgtagaaataaaagcagagcaaatagtcttgtccatacgtagaatggtatgtctcacatttgctctaaatatctaacatatatgaacatggaacagttttgcaaatctgttcaataggggacccttgggatactgccatatggcatggtatcgctcagctttaggctctgtcattctgataagtgttggtcagacacgaagagtcctgggaacctgttagctaaggctggatcccattagggaacacaagattcttccctttacccacatttgtcaaatttaagcacattctccttcattgaaaagaagatttcagtagaaataaacaaatgataacgattgtcagtagaagtttaaacaagaccctgattaatgtattagttaatagttgttccttgttaacaagacgtgaactcaaaatcagtcattagctatgacatgtatactaattccctcatgtatttttatgtgaatacttttctttgttatggaaccgttgggtgttctttatacagtttatattaaatatgcagagtttgatataaaactccttggagtcaagaaaccagattatgctcttgatcatgtgcctaataccttgtttacttttgttactccaaatatccaaggaaaacaggtactgtgccacctctggtgacacaaatagtcacagtgaaagttttgcttctcttattgctataagagaaggttttgtttgtttgtttgttcttaatataaatcatggctggtggagtggtcatggctatttaaagctagtctcaagcctgaaaatgtgactgtgtgtcaactgcacacgaagaatgttaacaggaggcagagacagaggcctggaagaagcgtgtgcggttttccaatctccgtcaacaaaggcaaacacatgccataggactagggacactggagattatgcaactaattatgacagttccctgaaagacattgtggcttgtgaaattttaattcacaacaaaaacagtgactacatagatagattaaaaaaaaaaaacgaatttagcgtaaggtggcttgcttgcctcttactttacgaaagtgatgtggacctacgtggaacactacaaatgagatatgtatctataaaatgctcagcccgctgcttggcatgtaatagagactgaggaaaagtaacctctcacctacgagacttcactgtgcatggcaaatcatctaaaagtctataggagaagtgcccagattggtgttagatactctgcattttcttagtatttacattagttgcctaattatatttggcaggttttttttagaaaaatataagttaagttttttgcttttttctccctccccccaagatattgatgagtgctcccttccgaacatctgtgtctttggaacttgccacaacctccctggcctgttccgctgtgagtgtgagataggctacgaactggacagaagcggcgggaactgcacaggtaagacctccactggcatcaaaatcagctccctggtgtcccgggggacccagctattggagcctccctgggactacacaagggccgtcacagaagacaagaaaagcaagggggaagtattaagaatcacagataccttttctcagacctggaactgattggaggtgaggatccagaggaaagagtctaagacaattgaaggagcacagtttgtagccttgaaattgagtttgtggctacaaaggaatgttctaggggtgctctagtggtgtagcttcccagccatttccttttctacttgggtacatttttggagagtttcgttttggaggccatgccccgggatcatgggttttctccttgtacttcgttgttgcaatacccaccccactccttcctacccctgccctgctcgtggtcaccagagtactgggtacacagagctcagccacctatctctagtgtataaatcattttcttgttgagccaaggactctcagggaacattagaaaaagcttagaaaaactacaggcacccagcagactgacactcggttctctttggcactaagactttgaaagccatttgcatttccccttcctaattcacccctctgttcaaggatactgaagaaacaacttatgttctgtatgagttcaaatttccggaaaaaatctggtcttttcaaccacctaaacaaaccatgactcaggggctctccagatcatgaccaccaccaccaccctgcaaatgctctggatggagtattcctctccagccacacattcttcccttggttttccttaaagctattacgagaccaggctgggtctcttgcatgcctcaggaagtccccctctccatggcctgtaccctgtcctgcgtgccccagatcactatcaacatcattctgtctaatctcgtttctgttactctggccctgtccgtccaaattcacatgcaatttgaacaaaaaaatcatctgcagcgcaacccgcaggagggttgccagatccaaggggaggaccaaggcaaaggtgttgtccctcttctccagtccctcctcacagaagccgtttgtctattcttgagtatttcatgagtgttcaaaacagacaaaaggaattgtacagagtggaatttgccaaaacccatgtcctaaatatctggaattctgtacatatttttggaatagaaactgaaagggaaatattcaactcagcatggatgatgggagagacactccttgccgacctcagggaacacactaagcctcacgcgtgtgtgtcaggggaagcagcaagagttgcccttctgagggtttcctgggacatcttgctctaatttgatgaaataacaagccacatatactcaatatattttcttaaaacctgtgtctgaatttttggttgaccgaggtcacaacagtgttttgccttcagttaccttgactggaatatttttcctagtgccaaagttatatatatatatgtaatatatattatattttatatatatatgtaatatatattatattttatatatatatatatttttttttttttgagacggagtctcgctctgtcgcccaggctggagtacagtggtaccatcttggctcactgcaagctccgcctcccaggttcatgccattctcctgcctcagcctcccgagtagctgggactacaggcacccaccaccacgcctggctaattttttgtatttttagtagagatgaggtttcactgtgttagccaggatggtctcgatctcctgacctcgtgatctgcctgcctcggcctcccaaagtgctgggattacaggcgtgagccaccgtgcccggcccaaagttatattttatcctgatgacaaatttgaatggtaaatgtgttctggggaaagaccaccaaagactatatcatatttccttcctgaggtgttttatctctgaagtggaagactgcatttctagatgtagttataactagtagctttaaaattcttgtttggagctctagattgggccctgttcttttatggtgatgtctgcctacactggctcaggtgataactccactactcactgttcggttttagatgtgaatgaatgcctggatccaaccacgtgcatcagtgggaactgtgtcaacactccaggcagctatatctgtgactgcccacctgattttgaactgaacccaactcgagttggctgtgttggtaagaccttaaaaacttttcagagaagcaagcatactgtgtattattttgaaaacagcaccaaacattccattctcaaagtttgcaaaatgaatgatacagaaatttaaacatttcctaactctactttagattcagatatcttttccatagggaaaattctcggtagtgtataatgttcatgggcactttttagtttctcagtaaaagtaaattacggtttttgaacagttcctgaagtgggtttgaattttcaaccccagtagaaagattctgcctgatgcttttgtgtttgtatatggtaaatagatacccgctctggaaattgctatttggatattcgacctcgaggagacaatggagatacagcctgcagcaatgaaattggagttggtgtttccaaagcttcctgctgctgttctctgggtaaagcctggggtactccttgtgagatgtgtcctgctgtgaacacatgtaagtggacatcctcctatttattattatttcaactccagccagttctcctttctagatcagaagacaaaccttttctactcttagatcagagaagaaagatcagtcctctcagccctgtagaggggaccttattcccaattcgagagtcagaaaatattcctggttggctcacactaaaagatcaggtagggcaggtaacatctcacttctgtgtaagtgaaaagcagatagcattactttaaagattttccagactagggtactttcaccatgttgcttacgttccagggacacattgattatctctcctcttctcatctattgactagtttggaaggctgtacgccagactcagtgtcccggggtttgaagagaagcaattagttaagcaactataaaatggaagattattccattgttatggggtggcttgaaagaaggctttagcatatgattgtaaggacatacaaactatgtctcctaaaaatataaaagggttttcgtttttccaagtgagtcctgtattatgattcagaattagatgtagcttctttggcaaaattcagtggctactgcttatagcgtatgttgggataggtatggattctttttttgctgaagggtcatttattcaattcttctaaaaatatttgttgagtacctagaatgtgtactctggatgtgcaaagatgaattagactagatcctgcccttcaggagaatacagcatagtaggcaaattatgacctaaacataagcgctataattcaaaataggcctcagaaagagaagaaagagcaggcacagtgctgtgttggtacaaagagcacacctggtgcacattaggactccactagttgtcacccatgtaaccttgggcaagttccttagcattcataaaatacctcataggattaaatgaaatcactcatgcagagcacccagcacaggggtgagtgctcagctggctcctccttctctcttctcttcagaaagggaggtcagttctgcttgggagagggtggggacttagtgtgttttttaattgagccttcaagaaggttgtgacatgaaagaagaaattcaaaaagtatggatgattgcagaaagaggagaacaagtaaaagaggaggacttttcatttcattggtgtcgaagggggcaaactaagacacttaatttggggagtcagctttgtagattaatgacagtagcaaaacaatagatatccacaccacaccagatctggaccagagttagaactggaatatatacatataggcatgtgtacatataatttcagggagccaggacagggattagcagatctggacagaccatgacattatgaaagaactgatcttatagctcctcactgggatgatgcagcaggttacagacattcttattcacatgtcctgtacatatcaccgtcctggtgcataccactgaaataaatgtttctgggtaaaatacttggatgaaagaattaatgggggaaacccaaggacactatagaaagttgtttttggaaaccaagagaatcaatattgccacccatagaaacagaggtgcaagaaatgtctctagtcattaaggagagaattgggatgggaatcaacagagaacagcttttcctaaggctctatttggaaagggttttggaaagaagccaattaagattattaagggaagctgtagttcccagaaagtaggctgaacagaacataaaaatgaagatgaagtttttcagaaaataaaaagggaaagaaaatctgtaaaaagaaataagggatgaaggtaaggtataaaacagtccacacacatgtaagaccagggagtggttagagttcaaggactgaggacagtggccttgcactggggacacataataaaaaccactggaaaatgggaagtgtacacaaaggtgttaacttacttcagacgggcagagtaacaactaaagattcctgaaaatgaacattttcagttggatatgtgagtatttctcttgaggatactatttctaaaaactttagattcaaaacaactcaatttgaatttttgtttcaatagccgagtacaaaattctttgtcctggaggggaaggtttccgaccaaatcctatcaccgttatattggaaggtaattgtgtttcctttgtcttaaagcacacacaacttgaatttccttgggtttatttacaatgctaaaggaatgcctttgttttgattttgatagatattgatgagtgccaggagctaccagggctgtgccaaggaggaaaatgtatcaacacctttgggagtttccagtgccgctgtccaaccggctactacctgaatgaagatacacgagtgtgtgatggtaaatggtcctggtaggatgataaggtcttgcagatatcaagaactgacctgcaaaaccagaatatggttactaggaaaatagaatttagcagtgtagcacaatgttctaaacacgaacatagccaggtagatatgtctcacatgtggcaatttggactaatgttactcaagtgatgtcatttctggtaagtcctaaatctccctcttttcctgagaaaaacagaatcttattctgctggaccatagcctcatttatgcttacaaaatatttttccatgctcttcagaaaagccattttttacatgaatggcacaggtccaatttcagtgttccttctctatttggaggagttctgggccctcttcttttaatccttcaccacttaccattggtgctcatgtattcaaataagcttctcctagaaggcggccctttggctttatgctatgagtggtggcccttgttcatcctgtgttactggaaaggtggagaatattaaccacttacaggtttcagagcacttcagccatgagccatggttttcatctacatggaggaatcacacaattgtttaggaaagagacctccttgtgctctgcataagaaatattcccctggctctttaatggcttattaggtcacccagacaatggcaaccttattgagtattagttgaacatcacagtgtatatggcacagctctaagacccatggagttaacaaagattagaatcaactccttcatttggaagtggggagaggatgtgaaatatgctccatgctgccttaccaatgcagattcatgaagccagctgttaatggcttcgggatactatataccctatcatagattttgtgagcataagaagcgtacttgtcttcctaagggatatttgatattttaatttctccacatttctatctctgcctacctttgaggatattataggttaatttattaggagactcattattatatttgataatgcctcatgtcagaaggcaagagttccttttcttttttgtttttgttttttgtttgtttgtttcgagacagagtcttgctctgttgcccaggctggagtgcaatggcatgatcttggctcactgcaacctctgcatgtagagttcaagcaattctcctgcctcagcctcccgagtagagtagctgggactacaggtgtgcaccaccacgcctggctaatttttgtatttttagtagagatggggtttcaccatgttggccaggctagtctggaactcctgacctcaagtgatccacccaccttggcctcccaaaatgctgggattacaggcatgagccgccatgcccagccaagagttccttttctaaaaccctctttcctcaaaaggcacacatttacacagagagaggacacggatgaatgaaatacctattttcgttatcttatttgaaaataccctatagattttctcctctaatgtcaacattcattaagtatcaggccattccaaaatgtgaagttttcatattcacataccactttctctttggattatagatgtgaatgaatgtgagactcctggaatctgtggtccagggacatgttacaacaccgttggcaactacacctgtatctgtcctccagactacatgcaagtgaatgggggaaataattgcatgggtaagtccaagcttttctcagtaatgcatgtttggttctcatctacaaagaggaagagagctcacaagttcatcaccttagggtgatgttactcatcagactgagtgctggcatcccttcactgtcttgttaggagactcttcccctataaatcataacttggcattttttcaccaccacgggtgggtggttgggagttttctctaaaatgtatgttggaaaatcccaaacaacagttaatagtacttcttttgtttgacttttgggtgtatctttgtacaattatatttacagtgctgacctacagtattaaaacatcacgagtcggaaacgagaaacttattgccaaatggcagtagggaattgttactaggagactgggcagagagtcatttaaagtttattaatgctacagctatataatgacttagttctgtggcatgaaatatcagggaatgtatttctcaaagtcctttatcttgtagcagcataggtagctagaaagttgtgtaagagcaagttttttgtgtccttatcaaagtcaagctacaatacaattcaaatgaaacttgcttgttgagtatccacttagaaatttgttgtgatttcccacatggcatcaccaaccctccaatccttttttttacctcccttctagatatgagaagaagtttgtgctacagaaactactatgctgacaaccagacctgtgatggagaattgttattcaacatgaccaagaagatgtgctgctgttcctacaacattggccgggcgtggaacaagccctgtgaacagtgtcccatcccaagtacaggtgagttttagtttctccattatcaaaaatataggttgaaaaattacccatgaattgttggggaaatcagtcttagcgaaggaagcaaagtgtgcattgtttatctttacagggaaaaaaacggctcatgatttaaattcacagttggtgctggtcattccagccgaacactgagtcacagaatatgttttctaatgtataccctaatacgtaaccagacttgtagactcagcatatcacaaaaatataaactataaacaatgttctcattgttactgaattcttcatgtatctaaaagactgtaaacattagacaaatcaatgtgacagtaagggaaacataattccttgtctttttacttatttaaagctaaacttgttccaaaaatagttaaaggcagcctacaaagatgtaaatgttaaacaagaaataagcataaggcaaatggcaaacaagaataagaaagagccaggagcaggactaatacacaaaattcaagccgggaattctacacacttgcctgaaataagcaataattttagccccaaactttctagcagctcctatgaaaagggagatgtgatcaagtacaaaattctcaatgagcataaagaaaactcaaaatgaaaggaaagtgcaacttttcttgatattgagatcgagataaatttcttcttatattctcatggagaaagaaactaaataatgttatttgtcttaaaaaaaaaaggctaaattgcatcctttgaataaataaagacattagtgtactgttcttatatcatatggtatatgctgtgcattatgtatatgatgatgacatcatttgccaagattatgatttgggttagttgaaattatcatgcaaggaattgattagggtattctataaagggaatcctacaccattttccacagtgatatataaaatattaaatctgttgtttggtactacctgacattgcatgcaacagaaaattgttttttagtaaaatgtattattccatccattgtttactccagaaataatataataaccaccacttagaattctgatttacctccaccctgcaaaatgtttctagaccagggcttggcaaaatacaccccatgggccaaatctgtcccaccatctacttttgaatggcctgcaagctaagaaggatttctacattttaaatggttggaaaaaatcaggagaatcgtatttcataatatgaaagttacatgaacttcagattttgtttcccataaataaaacttttttagagctcactaatttatttccatattgtctactactgctttcatggcaacattaaatagttttgactgactgtacagcctgcaaagcctaagatatttactctctgtccctttattaaaaagtttgctgacccttgatcttgaataatggtctttacaactttaggtggtacttacctgttggtaaaaaatctgaagcttatgcacacctggtgtgcatttatatgtaaaagtctatgtatatatatctatgtatgtgtatatgtatttgttttcaattatattgaaaaatacatttattatttttctgagctgttctaatataaagtgtacacaaaattaatttttttaaagattagatttttccaaagatagatagaagtcctcgcattttcttttttatcctaatggattattgcatattcctctggagaccactttggaaacccttaatgtagactaacatttacttttagaaatgattgcctgagttttgaatatctacatactcttgtgtaaaatgcaagatttcttcttgatgttggatattcaccaaattcagtcatggcttttcattagctgtgaaatctgcacatattttaagagtccctgtaatttctttaggtgaccaatgtcagctggcgttacagtgttggaagtgaacactcatagattaaggagacaaaacacaaggagaataacatgctgtattttgattaaaatacttccagaaatcttttactgattttcactgagcgtgaccaataaggcaatggccatctgaagcttagattgataccataccttaccagttacagtcatgatctggaatcacaaaatctcacagttagaagggactgctgatagaatttagttcatcctttattatctgttaaatttgactaattcaagtgagagaaagacagagagagacagaaaaggagagagggagagggagagaatatgacagagctgtaccaaatgaaatccagctccaaaaactgaaaaactggtgaaggttggttgattgacccaaattagtcattaatagatctgatgtcaagaatgtggctagatttgctatggtctcctataatctaccgagaaaatggcttttatacgtgttcctcaaaccctagatctctaaatgcagagtagagagaggcactcttaccagtccctgagttcagagctgaataacatccatattgaaatccaaactcctacaggtaaactcatgtgaatgagtggcatgtgatctggggatctctacttctccttcattatcacgtcaacattaggtcatttttttcttcaatatttgtcttacaggcaagattatatctgtaggaattttcaggtttactttttattttaaattcttcaaactacagacaaatacctttcaagaatgcttacaaaataatttttttcagtccaattattgttctttgctgacccctatcctcccatcccacctttgtttaatcattgcagatgagtttgctacactctgtggaagtcaaaggccaggctttgtcatcgacatttataccggtttacccgttggtgagtcatgacggcattgtcagaactttctggttttttgcctttgtgttagcattattttttcagttcccatttttttcttaaaggaaaaaaaatattaaacaatgcctttcactttattgaaacactgattcttagtttgaaacaaactgtgcaaacaccctgtgcagctccacctaattggcaacaacatttgttgttcatgattaaggggattggaaagcttttcccaaaattacaatcaagcatagttacaccaaccttaggcatcaacatggggagagattctgggagtggggccagttgacatttgatttaactgtaattctcaatccttccttctgactaagaccaggttaagtgacttcacaccaatccttacgtgtagattgtttacataaagtcctttcgtggatcaattttatcttacatggaatctcctcaggtcatctgctttgggaatttcagatgtgaaataaaaatcttttcggtctgaggccctgcctggtaaatgaagcagagaacacaacattgggagagatgcttgtgcaagaatcagaagtattacacagcactcagccagtgcaggcaatgcccttgtggtttaaaaccaaataacataaaagtagatggaaagctattgcattctctgagtttttccctggtgtgatttatatgcatccttagatgccctcttaagtctgcacagttgtgtctagtagcaaacatcaccacttgctttattccaccttattcataataagtaaactaaaatccacatcagcctttccagtgaccttgtttaagaaaacaagagtctggtccagcaatcagcctggctcccttagtgccaaatccatatggctccacagtctcgtccacgtccaaagaaacttcatggtttggaaagaaaaactgctaaatgacattggcatggaacacctggccctagctgctttgtttttccccttcccaaaacagatcttttaacctccctagaatctgtgatcacaagataagtggtctgtaatggtagtggttctccacggaccaaccaggcatgtaccccagcaaggctgccctccaagtttggcagtaagcaaagactagaaagaacattagcgttgtccactaggagagctggaaaggcttcagacttcatctagtccaaatgccttgcttcatatttgaggagacagaggcccagagaggggaagggactcacccaaggccacccagctaattaataacagagctgggaccagaacacagtcctgactcatggcttagtttgcttctagctcttgaaaactggacatctgttatttagctatatgcttattgttaccaaattccagcatgacaaaatatttagatgactgaaaaactttgttttatttaagctttatactctccttttggaagatcttatgattgttggcatgtggagtccattcatatagggttaaaactatagcatgtttatcaatcttgtcttaaaatataaacttcactaagttgaagttcaaataaaatcctgacaggaaaagaaaatataatttttaatatatccttttgctattttatacctaacaatggctggaaattagactcagcccgttattgttaaacttgataataatatatcacttatatttaaaacgaatgtgaatatgatgtttcgtgttctaacccacactgaatgaatggcatctgaatttgttttttgtttacttatgatacacagttgtgatgtaactttatatggcattttcatgacatgaatgacaaaggtgtgaaagatctaaagacataattgcgtgtattcaaaatagcaatgaaccctttgagattctaagctgtttcttttcattaaataggtcaattttgccttcacacaaaatcaagcccttttttaaaaagggtctaaaataaatctatgacatcaaatttctcctttaaaacagattggttatagagtgtggttcttctaaaattgcagcagctcttgtaggctccacttcagtccgtgatcatcttctcacaagtatgcaagcaaagtatgtaccttgcaaaggctcctgactataataagtaaacaacgtatctcaacaacagtcatagaaactagtgaattggaagactttggattgtagaccaaggctttgcatacctcccagctgaggtgtttcatcaaacccagccaaggggctgatggaagggccctccaggataacaaaagtgttgatgacagttctgtgaagattgtattagggtgatgcaggaaatcaccataatacgatcttcccttatatgataagggaggcaggatggcctgttaactgagtcccagtgtcaaatcctgactctgcctttcattggctgcttggtcttgggcaggttatatcctgtggcttggcctcacttgcttcatctcttagttagaatagtcatagtaccgagaccatctcatggggtggctgtgataattcagccaataaatacaggttgaatgcttgagaaatgtaccagtcatgcagcaaatgagatactgtcactattaatactattaccattattactactattactactcttatcctagagggcacttcagtggtcaggagttcagagtgggtaagacagagatgggaccactccaggctggggacatggccaagctggtgaggtgtccaaagtctctatccatagctggccagccctgccttagcagcctggatcctggctgtgttctcactcttggtcctgttttagtgctcaccaacacactgccagacacttgctcttaactgaacaaatttgaattgagcacttactacctgtcatgtagagtgctaaggaaccataacacagtgttggagagccaagcccaactcccagtcttaggaagcacacattctactgcgacagttcttccttggtgctgacctcgtttttattgtcagccccagcccagctgacatccccacacctgacttacctcctttctaaagccacatgaagtaggaagggggagttaaactggaatttgaaagatcagagttccatatgaccatgtgctcctctgtggttctttaccagctcacctctgcctttttccctaaatataggcacacttgggtggagaggctgtttacccttgaccatccctctattctactcatctggtgcatccacagtgcccagaggatacaaagatatctcctacctgtacaaaattgacattctgaagcaaaacccagaacatatatttaaatccagttagactcatgtctggaaagtggtttagttatctcaatttgctattcgttgatgtccctattgccatcaccaccaccccaacacatgcacgcacacacacacacacacacacacacacacgcacgcactttccatcttgtcttaccctgcacagggatcatgtgctgtcctgtcactcatgaatgactactctgtctctagatattgatgagtgccgggagatcccaggggtctgtgaaaatggagtgtgtatcaacatggttggcagcttccgatgtgaatgtccagtgggattcttctataatgacaagttgttggtttgtgaaggtaagtggcatcatgactttatcatatccagaaaagagctaactgatgagctacttgatacacacttggcgaatttcacaacattgaaatttcagaaatgcattaagctctagaaatagtaaagggcatggtgtggaacaacatgaaatttcatgcaaaaaaaaaaaattcactaacttcagtggaaaaaccaggaggcacattcccagcccctttcccccaacacacagtgtgttaatattagacttcccagctgatatgaaaaagctttgagttcctgggtgtgtcacatagattgctttcgtttcacattgctggaaaatcagtatgagtggacagtcatcctagttgactctcaaaatcatttctcttccagacagagactttgctactcccaagtgaaaacaaggttaatgcagatattccaaatgcatgagagaattccaaatggcaagaacagcaaatttgattttatatgaagaatgttggcatgcacatgtacttttttcattttcaaattacctcctgttgccatgtatatgtactgtgattcggagcattccttatagcacttcatattttttcctgcatctgggaaagatagttctcttacattttagtaaaagggacattactggttattaaatataccatgtgcccaggatagttggaataattttctatttaatacttacacttcaggcctctagcagaatttttattcatgttagaaagggttattaccccttagagcacgtattatagcacatatgtcaacattttaatgttaaaaaaaaaacttttttgtctatactgaagacaacttatataccacaagtaaagttatagtcctaaccacatacttgttaagttcctgtcaccaggctttcagttactgtgtccaagtgggcacatgtcccttactctgcctgctgtgtgagttagtgggaatggggtaatagcccttccgagccttcctaagaagatagccagttcagaccttggcccaagtccctgggctctgggaagccatcaaggatcaggtacctggagaggaagcatggatgtgggagagggaacccacggcagatgatcttacagtgctagagttggctgcctccctcacagccgcacttttccccctctcaaacatgctcagcatgcctgccacctgcctgtggcattttcctccccacccttcccctcagagatggctttgatgatgactgtacccaggtaccttttaaccacttatatttgctgaagctgcaggccttggccagaacccatagacaagaccacccatgaccaccaagtcaacttagaccttgctagatccatgagattaaacacatgcaactgtaccaatgcaaggcattttgctgtcagggtagcattctgtggatattgagataactaagtgctccaacttctgatttccatttcacagaatatccgtcttcagggtgaatgtttaatccagggtcagctgcttcctagcatactcttagctcttagaataggaaaatgaaggttgagtgcatacatgcctcagcaatgctgaaattggaatggattgtagaggtgatttagggagcttccacgcctctgctcttgccaagtagccacattatcagatgccacatcatagaagtgcttctctgtgacactactcagtttctccagtggcgcaatctgccccctgtgtttctatacatcctgaatacaaagcagggcagacctggtgagtgaggtggtgctgggtcccttgtaacccaaggcagacacactcctgctcctgtgtctgttgcccagagaggcacaatccacctgccttagacaggaacccccactgactgactgacagtcctgagggttttccaccacagaatcacgcccaagaggcatcggctgatgtatttgccacccccttgtaggaacttctttggtcgagccaacttctgtgtaaaagcccagaactggtactaagggccaaccttcacctgtgttataggccatcccctttattggacttagtctgtaaattagattgttccactggagcagggaagagggaaacatgtattttgccccatgatatagcatggacatgtagtaacttttgtgatgccatgaatttgaactatattagtatctgttttttgttgttgttgtttgttgttgttgttttgttttgtagacagacaaccccctaagcaaagtcaaaactctggaacacacaatatccattatccaaaatcttttctgttttaatgagagttggtttgttttcagtagttttatgataactcccatgttaggttttcttgatttgattgccttgtggtagtaatttgagcaggtgtctttacagccctgtacctcaaagcactctctacagaccaggagcacctgcatcagctgggaacttattagaaattcagactctcaggccattttccagacatgccaagtcagaatctgcattttagcaagatcccaagtgattcatgtggactttaagatttgagacattctgctcttgcagcctttcagacaatagcaaccttattgaatcataaaatccagatctttgagtaaatacaaggcttcctaggatattaatctatacccatgtcaagtgctggccctagcagccaagtttcatgacttttttttagatgtgagcatcattagagtccatatgtggtcataaatcaagccttgcatttataaatattactaagtgggaaagtttagataatggactttcggtcttcctttctttctttcttttttttttaatagactttattttctagtgcagttttaggtccacagcgatattgagaagaaggcacaaagatttatcatatattccctacccctacacatgcacagcctcccccatcatcagcatcctccatcagagtggtgcatttgttacaattgaatctccgttgacatcattatcactcagagtccactctgatgatttacattagagctcgctcttggtgttgtacattctatgggtttggaaaaatttataatgacatgtatccaccattccataactattcatagaataatctcattgccctaaaaattctctgtgctttgcctgtgtatcccctaatctcccctaacccctggcaaccactgattttttactgtctccagagttttgccttttccagaatgttatatggttggaatcatacattatgtcgcctttccagattggcttctgattcgcttagtaatatacatttaattttcttttttcttctttttctttttcctttttttttcctttttttttgtgtgtgttttttttttgtttgttttattttttgtttgtttgtttgtttgttttggacttggagttttgcacttgttgcccaggctggaatgcaatggcatgatcttggctcgctgctacctccatctcccaggctcaaacggttctcctgccccagcttcccaagtagctgggattgcaggtgcccgccaccatgcccagctaactttgtatttttagtagagacggggtttcaccatgttggtcaggctggtctcaaactcctgacctcaggtgatccgcccgccttagcttcccaaagtgctaggattacaggtgtgagcaaccgcacctggccatatttaattttcttccatgtcttttcatggcttgatagctcatttctttttagtgctaagtaacattccattgtctgaatgtaccacagtttatttgttaattcacctatcgaaggacatcttggttgcttccaaattctggcaataaataaagctgctgtacacatctatgttgtcttttcaatagaacagatcaaaataaaatataaatttgttttcatgtgagaggctttgttgactggacaccagattctgttctccttcaaattcagttctcttctgctcgtagatattgacgagtgtcagaacggcccagtgtgccagcgcaacgccgaatgcatcaacactgcaggcagctaccgctgtgactgtaagcccggctaccgcttcacctccacaggacagtgcaatggtatgtagtgccccacaggctggacatgcctacccaagagtttgtcttcatgaagcttcagatatctggatttattttcagatagttaagctgaagaatatatgagttaagatttagattgatgaactctaatattaaactaaattggaaaaagggatattgtcaaaatatctaaacacttagctttttaatcctctttctggatgagatattttcaaaacaagaagtaaatcattcgcatacatagatttcgtatttgcctgtctgctgccctgcctgcaaacactcacccccacacattacacacacacacaattatgcatacacacattcccctaagcaacatttaggaccaaatgatttttttccttccacagaatccctctcagaaaggtgaggttttcaccatcttggctgcataccccaaatctagacagtgaagctctcctgagctgggtcagattaatctgcagaaacagaacaaacaaagccatcgcttttcttcccagtcatcttacagggaaagggtcactcactgaaggcagcaaacatcaacagcctttattagctatttattcccatgacccctagagattagatttttttggtgttcacttttgtcagggatgtgatagaaataggaagcacgttggcatgttatcaacttcagtgtacggtgaagttattcagtatctgatggtatcttgtagccagtggtgtgaaaatttaaaagactgctgtttcagcccagaaacaaaataatatctcagaatgattttcttgtaagtttttaagtaattctgaatctgtatatttagcaaaaatcactgtatatttagcaaagcaaatcattgtatattagtcaggaagaatgtgttattttgctcacggttcatttcacggggggtttcctggatattttatgcatttgtgaatgaaacaacacaggggaacgtggtcagattttccttggatttccttgcctaccagtgattaagtggtaggaagtgcactgttctctttagggtattttgcattgttttatgagaccttggtgggaagagggtgtaattgccaaacaaaaaaatcgcattgagaatcaagacttgttttgttgagtttaaaggaaaatgtgtaagtatttagcattttgtcaacagagctgttgctatccatgtattaaaaatacaggacaggaaaagcagggacgtctctgatatgaaccacaataccctagagaaacttggcattgataccacttccctgcattttgctcataatttatatttctttagaactggatgaaataattccagtcaaaataaagaattgctgataatatagaatgagtcatttcacaccatttcacactcaggtaagaagtgggacagagctatttatagatcaagataagacattcagccatagcctgctggagcttaagtcatttactgttttcttgtaggagactatcatacataaaatgcagccagccataagtgttgtgagtgagcatcatttgcagccaaaagcttgatttcctttattcattgaaatcctcagaagaaagggaattaacttgagttttgcaaccattcagcctgttgggttgaagacctcattctagaaatgtctttatttatgtcttacttttaaaatatctttaaatgctattctatacttggcattttttttttcaggcatgctgcaaagtactcctttgtgcatctgtttaaaatgaaaataactaaaactttctctccatcatgagatccttatttgaattcataagcacattatttcaaatcccaaatcacacctggccatagcacccacattattgctgagagagctgagagaataattagatatctgagctcaggatgctagtctgacagcagaagctggatagttagaacaaatgcaacccccttctgaaatgtcttgccccacaaaagacaaggaacagtttcttcccagctacttccttgtggtttcctctctttctctgttgactatttgggtttctttccacagtagcctgttcagacctcctatcccaacctcaaatatgatcatctaagagttcaaattctggtgcttgtggaaacctagatttctgctctagttttaccagtagaactccaaagtactccccatgtttcatttttcatttatttaaaccatcatgaaatagggcagtagatgaaaggaaattcctaattggggatccctttctaataagatccttaaggctctccatttccttgtggaactcagatatgagacagacctcgtcccctgcatacctccaggtccagtcctacctgaaggtgccaaagttttgggccaactatggtaggacctgagacacccttcctcaagatcggaaatcagtctcctctgcctatactgggaagcagttggctcactttaaattcattttctcaaaagggaataatcataatttgttaaatagcatttctgcataggctagtagtagttcctaagctgctctatttcaatttcccctcataatgatatactccacttcacttggaacttctaaatggtatgatgattcatctactaaataggagataaccataacagtggcatcccggacacatgaaatggaggagatgtccatgattctggcacagggagggttgctgtgtgcagcaaaaagtgtccattcatgattactgtgttctgagtagacattgcaggcaaacggcaagtctggattatttaactaagagcgaaatgccatctgccctacagcatctgcagcaaagatgacactccatttgctttcttctgtgacagtaggaaaatcagaatggcacagtgctcttcaaagtacatttactctaaacatagagctttaaaaaattagagacgtaagttggcatataattatgtcatatgtgaattcatgcattaaattctgcccctcagataatcagatttcaggaaagcaacaaagattcagttgatgataaatataatttagaacttaaagactggcagaagcaagatgagagggcttccttttgaatggatgagagtaaaaagaaagagacagtgttcaggttgtcacatgctaaaaggagccctgtgtagacgtgaatacttggtgaagatggaacaaaaagttacaggcataagacaaaacaaagagatgcaacttgaacaagcagccatgtaggttgtccatcaagaaaaacttaatcttagtcataggatttgactttgatataaatttacaaaggaagccatgaactatccatgacttaaggcaccaaatcttaactagacaaaatacttcaattaattccacagtctgtggtgctgcgtaggccgataatcaaacagaaaatcctcccggcttgaatccccccattttacttctaagttttctcatctttcagaatattttttgattacttacccttattttttattgtgtcaagtattgttaacatactctgactatgcctggtaaatgagagtaagttttaatccattttgatgcaaaaataaatatatctgtttcactaacttagtttagagctaggattactcctgagaatgatagctagaagtaagttattcaattatattttgtcttctaagttctcacttaagatgcttcttatttacagatcgtaatgaatgtcaagaaatccccaatatatgcagtcatgggcagtgcattgacacagttggaagcttttattgcctttgccacactggttttaaaacaaatgatgaccaaaccatgtgcttgggtaagtatgcaattattattatttttttcatatgctgttgaaagcttcatttgattctaaatatggataaaatttaatactaagtcttttagtagtatttttgctatatacaaaataaaaacacagacagatatgcagcagtgatatcctatttaatctttggcaatctgaacatgataaacctcttcctttgttattcatttggctgtcagtttagaaaaaattgactaaggggtaaattgaaaaagatattaatacaaaaatattaatgttaataggctattattcatatgtaatattgatgtggattttcttttgagtttttgagtgtgagatgaccatttttttggaagggtttatagtgtgtaccagattctcaaaggcaaatttataaatcctacaaaggcaaagaaaagttaatcatttttctagaggaaaaagagctcaggattttaaatctctttcctgatttctctattatcaggatgctgatttagaataaacttcagtgtgtaatgaatcattttcttcttttccttcctttatttttctactttaaagcaataccattaagtctttttgggacattaagaacataaatcagattcacagctgaaagaacaattaatatagtaatgtttaagtccttgactttggctatgactgggttcatccatttgggaacatttctcataaagttgtatcttctccagagtaatgacaagagcactgacagccctactcatcactgggcagctaacctgtgtaaaagctatgatgatcctgcccaactttctttctacatctctcatctgaattttctggagccccctaacatagaaccttcccaaccaaagaacttcaccagtttggctaaaaatgaatcaaggcaaaaattcttgattactagcaatgactcatctgggtgtagtcttcaaccacagacacacattagagtccctttgggttagcaatagcttcctgattcaggaatcacagatcatttatcttcatgtccaaaatgtgaaaagaaagggaatcctagctctaatcattacattttgctattctccgttgttaccttccactctctctctctctcatttcatccttgtccctcttcatggtgcctcattctttcaaaccagcagtaacaactttctttcattaaattttttattacttcctccttaatataatgtgcatctactctttataagaaatatgctagctgctgtgatgagatgcaaagacatataagatgtcagagtagctttacaaaatcatcagagaaaagtacggaccaatcaaaaggcgaataagaatgcaagcatgtatgaaaagaacaaattaagtgccatctctttggggtagtttagaaaagtgagagaagtcatcattggtggaagttgttctatgtttttatgggtgtagggaaaaaggaaaagttgtctgaaatgacaggtgagctagaaagctgagttattttgttgctgattgtggggtaatgccaggtgagtcactgctttttggtaaactggagtgagaatcttgaaggttgaagtttgccaaaggtggcaacacctcaagacccagatgcacacagagttttttccattttcaagtgaaaatatttgagaaaagtggcaagggtggagaattctagaagtaaatagaataaaataattcttgttcaggtctcatgtccttagcttgcctcctttcactggccagccaaggaaaccatttattcccaagatttagagctttgccgctgcctggtatcttgcagggatgactgctgctggagctgataccaacatcaagaagttctcagcctatggatgaggcctggtgaaccctaaaatgctctttagccactgtaaccgtgtaaccactttttctacttataattatgtttctttatggcctttcttcctactagacataaatgaatgtgaaagagatgcctgtgggaatggaacttgccggaacacaattggttccttcaactgccgctgcaatcatggtttcatcctttctcacaacaatgactgtataggtgcgtgtgcaaaattgtgcatcagcaaaggaagtcagttttatatgtgttctttgtaattagcatcatctctagtgttccagctgtcttttaaaaatgtatgctatcttatgcataacaattggttatgggacttgtcaaatacaatgtgctcaacatgaaatatattacagaagtctccccttatccgtgagggatacattctgagacccccagcagatgcctgaaaccacagatagtactgaaccctctatataccatgttttttcctacacatacatacctaaagtttaatttataaattaggcatggtaatagattaacatcaataactaataagaaaatagaacaattataacagtatactgtaataaaagttatatgactgtactttcttgtgcactgtctctctctctctcaaaatattttattgtactatactcacctatttttgggtagcagctgaccttggataactgaacccccagaaagcaaaaccatagataagagggaaccactgtaactatatccattacttttattaaaatgcttattagcagctataatttttatgtctactttgctgtaaattaaataaatttcaaaataaatggaattagattaagccaaaaaatttttaaatatacaaaagtgattctttgtatagaaattatatgattcaggactatgaaccttctggtctagatgtttcatgtagcctctcttaaataaatcattgaatctacagaatctccttctaaaacatactaggcaagagtaataagccaaattctttaaattttattgtgctataggctaatttaaatctaattgcaagaatacaaaggaatgcccttagctgaattgtgtattaggattttattttttaaatcaaaaaatttttaaatctaaaatttaaaaataaaatctaaaggaaaatcaaggaaaaactgataggaaatttgaatgtaaattgtcagtctctaatataataatgtaatcttattgttaaatgtgtataggtgcttaaagccagttctgttgttgcaaactagatcttcattggcatttcttgtttggctaagccagcaaaggccactaaaattcagaaaaagtattttttcttttagaagttttgattattgctgggattatgacatctttggaatatattaaaggattgttggggatttttctgcagatgttgatgaatgtgcaagtggaaatgggaatctttgcagaaatggccaatgcattaatacagtggggtctttccagtgccagtgcaatgaaggctatgaggtggctccagatgggaggacctgtgtgggtaagtacaggacttagaaagacctggaaagaatgcttccagagaccactcaaggaatcatgcagtctctgttctaatgcttctttctggaaacctggaggaaaagtcagagtagaattatattaatcctccctataaaggcttgtttttatttaagtatatatacacatatatatatgtatatatatatacatatatatatgtgtgtatatatatatgtatatatatatgtgtgtgtgtatatatatatatgtgtatatatatatataatcactttttcccttattttaaaaattaagctattgtactcaccaagaatactcaaactattaaacagtgaaattgctaaattgctctgtaagcaattgtgatttcccttcttaaatatttttctttaaaatacttttgtagtaagctctcatatcttttgagtatccttaaaatctatatactcactgacttttcacatgctacaattttctggaaacatttaatttgatgcaggtaaaataaaatatggttgttatgctatacatttttgaaagctgataaagcttatttttattattgcttatttttctccatggtggaattttatgaactttaatttgctttatgtatttctttgattcattctagtttttttgaattttaattgtttgatggaagtcatgccagtgggaacctcttccttatttttcccttttctttgcagatatcaatgaatgtcttctagaacccagaaaatgtgcaccaggtacctgtcaaaacttggatgggtcctacagatgcatttgcccacctggatacagtcttcaaaatgagaagtgtgaaggtaggaaagctatcagttgtagcaaatgaggagtgtcgggtgtccactggacttagcagaatgagaatttttgtaatgacgtcttcattttggaatactttatcagaaacaaatgcaagggcataggtatgacatggtctcatccttctggcaagacaagaagcactaattatcatgctaatctctaatgaagttattttgttctgtgcatatgactgatcatatgatcctgactcttttccactgtgctttcacacatttgttaggaatgctgtgtcctactcccagtatttccgaactacattttttaagtggcgattctttgcagctaaaaatagctcctgattccatttaaaaactttaaatgaccacattcaaggttggatgaatgtggttatatcgtttgtctattttgtttttacctatagagcagtggaaatgtcttatttcaaataaattctcagcaaattttacagtattacattcctttttgtttgtttgtttttaatggagacagggtcttactctgtcaccaggttgaagtacagtggcacgagtatagctcactgtaagcttgaactcctgggctcaagtgatcatcctgtctcagcctctggagtagctgggactacaggcatgtgccaccatgcctggctgattttttaattctttgtagagatggggcctccctatgttgccaggctggcctcaaactcctggcctcaaatgatcctccttcctcagcctcccaagggccttcctttaacctcaacaaatatgtcatatcattaagtgaaggacattaattgctagaatttcataaataagtagggttgaaaggattttcaagaagtcacctagttcacacccctgactttaaacaggtctgcatctaatccacaatgagaattttctctacttttaatatcgtcaattagaaattttattatatatccaatttaagtaacaatcaagtggtgatatttaaaatggaaacaccttattgaaattgtctagatgcaaattttttaagcatgttattttacttttattaaaaattggctttattatcaatacataagttcgctaaattgaacagaatatatatagaaagaaaaataactgcacagtcaatgaatgtgcccattctacaatatttggccctatcctaataagttggcatgtacaggctaatttctaccataatataaatagtcatagtaataattaaaaacaactgaaaacatttgagcattttcacaaaagttaacttttatattaagaaaaggttggatataggggtggaaggagtgtcagaatggagtaattcaatcggcaatagaagatcagattcattaataaaccacagggaacataacacaggtataaatgcaacccaataacatggcatgatggagaagctgattttgcgttgcacagaaagagaatcacttggcattgcacatttctagaatatttattgtgtggtatttacaatattaagtcaagataataaggttaatttctcaacttttccttagttgggcctcttgagaataaagttgtataatgcaagtacattttggtgtgagtagaaacctttgcacaaatataaaaataaagagcccaggatacaaggatattttgtgttttgttgaaaaaataaaaaagtattctcataaaagtagcatggctcagaattaagacttaccactttgttcactaaaaattcctgctgaaagtcaggaggaaagataagtgagtttgttggaatagagtgggcatatttttccataggtaatcgtatgttttattgaccaacccaagccaattttgaaagtagaaaagggcactattaacaataaagtcaggccaactggcatgagctggggctcccccaggcaaactaggacatatggttactcaagccattcaaacttcttattggctactcttaactaccactgtacaggagctaagatgtataatatactaaagaaaacatgccacaattctaagtgtacagtttcctattgtctatatgatgaaagaaaaagcctgtacaagaaaggtatttttgtgtcttcagaaagattaacccacaaatcaggagcgtcatcttctatgatatcgttagtttgcacttcataggattatacttattttcatgagtcttagtgttcttgtaaaattcacagttttagggctatagcatagggtattgggaaaagttctgtgggtggttggaggggagtaaatttggatcaaaggcctagatctcacattgagtgagtcactagcaatgtgcttaaagtctcagcatttctgcttcctgaacaatggtgcagtgtgactctagaatttcatgcttctttcctggcctagggtactatgaaattactctgacttttctagttagccaagcaactcagtctgggtaagagacgtttgtcactgcaccccttagaaggcagttgcacattccatttttatatcaataactgtcaaaactaattcttttgaagtcatgacaacctagaagtccagtccacagtgttatggtacagaaaaatacctttattattgtaagagtttggaaactcagttgccctttgtgtgtccacattgtgtgtttggtacctgatgatgtctccatcgtgttttgactttgtttgactcatgtgattcttttagatattgatgagtgtgtcgaagagccagaaatttgtgccctgggcacatgcagtaacactgaaggcagcttcaaatgtctgtgtccagaagggttttccttgtcctccagtggaagaaggtgccaaggtaagtgtctttgaaggctttgggctttcaatgctgcatgtttatttgtggtggtcttatttttcaaacatggcaaagctctgtttctttgtgaacaggaagatggagagttttcattcacccagaggtctaatgataaccatatgtcagaaggttcattttcacttttaaggttaaaaactcatccatcaagttatggttgcttatacaattgtactgacacataaacctctctcccactaagaacacaaatgctgataggcccatcagtggggaaacaccttgagccaccgaaacagcaaagcctgggggaagttgagctacatatcccctacctctgaagagataagctgaaaaatgtgggtccaaagttagacttgagactgaaaaactgcacattaacccatttgcccccacaatatggtaaccatcccttatatcacaaattctccaagaaaacaaaaataaatttaaactgatcaggattcttgctgggccattgttcatttttaggaataatacttgtcaactatttgagtaaagattttcaagggtttgccaatgactttcaaattttaaacaaaaatcaaaaggatcctgaactttggcataacacagtatgtacttaagtcccagaaaactgtttagacttttctaaacaatacagttgtgtatggatatctacatacacaaactagtttcatgaattccggggaagggagatgaaacaaacacatgtatttcttttttttccacttgtagcttttgttgtttggttgttactgttgttttgatgttgagttgggttttttttttttttcatggttttttggttttgcttccgtattaccaaatatggaagaggcactggatatcatttaaggttcaaaaaattgagtttggggtcccagccctgccatatttagtctagagcaagtcatttaatcttttggaagctcaatttcctcattttaaacaacaataatatctgcccaaccagccttactgtgacaaagctttgttagtttctgagtcctttgtagactcttgttgttattctaatgatctgattaactttttacttttcaactagttatttgggaagtaagaaggagagggttgagagttctccggttgatttcagcttgttggtagttgtcagtggtctgtgtggatttcagggtggtgcttaattcgaacagatattctgcatggtacagaccagtcagataaattctaactcctactcccttgtttttgtgtgcctttggcttggcctgaatttggaaagaaagcagtgagaaaccaggtgtgaatctgccgatgtggcaggccagaggaaactcctaggctattaattcaatttgcactggcccatcacagagcaagctaacgctgcaggaagaatcagcccagctgtgagcagccctgccacatgctcagctccaggaggcagagccagaactgaggaatgcaagcagggaaagtgacttttgtagttctgatgaaatttcgaggtcattaagggctctttgcagatggactggtaaacaggcatcccagtgagtcctgaagtatgtgggcaagcacagctctcttccccaatgcaagacacccttgattaataagccaattctagagaatcaccacaagctaaagtaagtctcctacagagcacagattttgctggagccaggaaattgagagctgggtttttcttgtaagatgacaaattaggagtcagacttctattgctcatgaaatgagaaaattccacagaaccgtggataatgttttttaaaaagcgaatgccatgggactcaggtggacagagcctggcacaaaagaccacaggtgtaaatgagccactcccacttgcaaagttcaacgaagagaatttgccacttagactgactcaagacttcgtgcatttgagtctctgtctaatgccaagatttttttttttcggggtggagtggtgtgggggagatagagctggggtctgggacgaagtcagctattaaaggaaaagagaatgagaattttaatacaccaatattacaacatacatatttaaagaaacactacaaactggaagacaaagcagagttaagttttcatatatttgttgagacatttttgtgagtagtcactgaattatatctaaaggtagttggaggcataaataacaaaaacaagactgataaatacaaaacattatatgtgacaaagaacttgaagaataaaagagatcaaaagtgttctccaagaaacaagaatttgttcagtcttgaagtttctcagcaaagcaaacatttgggtggcagagatgccgcaggattgacttttattgctcttgaccttcagaaggataattcattgaaaggtgcttgccaggtccttgccacaacagatggggaagtggaatagaaattagagagatgatttatctggatgagttggtagccatgaaaggttgagcaggtttactggggaggctacctgaatttgatttacataacttggtaaatataatagatagatagatagaaactttaattcatgaaaacctttcctttgttatctctggcaactctgttattcctacattgtcttctttgtcatgaaataaaagctggtgagactgtcttaacagaagtgcttaggtggttatgatagtatggttcctgggattgaaaaacagtgatggaagtgaatgaaaaaggcagaggtggtcagatataaagaaagaagaatagtacaatatgggtatgaaagcatttcttttaaacctgcagattgtggcctctgtgtaatgagaggagttttggaaggctttaagaagtcaagttcgagggaaaacacagtccatacctctggttgagctcactttttggagtcaatgtgttgtatgagaaatggaaaagcccgtttccaaaattatgtcaagcaatgttggagaattttataggaagtagatcccatcttctttgttggagtcatcaaagcaataatcaatattgaaatatattctttcaaagaaagactattctgttcccacccacccacagccctgccctcctcttccttccctctctgtgttgagctaaacaagcttcttttaaaaatttaacattgacacagctctgcatatgtgtgtgtgtgtaaaatctacaaaaagccccacttgcattttgtagccagcatctccgggagtatctgcttcagtgaccaacccttgtgttgtatttttgcccatctacaaagttgccacttctgtatttgttctgtgcctgtgatctgggattttattttagttccagagtttaggggacacagaataaaccacaaagtgtgatatcacagtaaatattagaactaagaggattctcttactctagtgtgctcattaaacatgatattgcaagcagagctatcaatgaaggaatcttgtgaatgattccttctgtggactttccaatcctgaagtcactgacagatgtcagttttgaaaactgtcagttttggattttattggattcacatcgggttactttgaaatagtgactaaaatgagaagtaataaatttaagttcatagagttgttcatcagatctcactatacaaaagatacccatgactttaacaatctcagctcagttaccattagaatcacgtaaggagtattgctgtggtcctgagaggagaacatatataacatagtgggttgttctttatttgctatggtgcaatacggactcagtaggaaagcaactgaagggtgtcataaatttatgctgcagatttgcgaatgagctactgttatgcgaagtttgaaggaggaaagtgttcatcacccaaatccagaaatcactccaagcaggaatgctgctgtgccttgaagggagaaggctggggagacccctgcgagctctgccccacggaacctgatggtatgtctgtcatctgcatttctctctgggccatgcagggtgcagactggccatgatgtaagtaagactgtaggccttaaagacagtaacacaatttaatttaattgtaagtctaattagaatgttcattaaaaattattttatctcaggagcttggtagttattttctttttaattatgtcatgaatcacagatgcccaaggagtagacacaacatcttagggagtctcgttaaataacttcctctggtttctgggcttgttttttccatcatttatcaatatgcacagcatgtagcaattttctacctcaaaatacttgtggagaagcttgtaatgaattgctattgttctatctattaatgagtgtctccaccacagaggccttccgccagatatgtccttatggaagtgggatcatcgtgggacctgatgattcagcagttggtcagttgcctgtgctggattctcagcatttctcagtattctcaatctgcttcttctctagttattcttatttttctccatctatcttggaaaattaagtgctacttttttgtcccttcatttagatagcaattatattattgcattattagataatcttttgattaaacactgaaatgatcataatttatcttcacgtttaaaaaataccttgttattcactattttttttctcttgcttaagatatggacgaatgcaaagaacccgatgtctgtaaacatggacagtgcatcaatacagatggttcctatcgctgcgagtgtccctttggttatattctagcagggaatgaatgtgtaggtgagtaataagttttcttccataggaactttacaaattaaaaattaagctatacagtattcactgtatagccatgaatataggtaccaagatggcactgaaataagttttatccatccactcatacatcattcatttagaatactagtgagtcaccatcaggtcccaggcactgtgctaggctctggagctgcagcactgaaccacaaagacaagttccttcctttcatggaccttacagcctaatggtgaaggcagacactggacatatcagaagagatactagaaaggacaacatcataatgaaagtctttgtgaaattttttaaaaattgttaatggtcataatcttattcccttatcaaataaaaattttatctggattcttttacatttagtaagatgaaaggctatataaccagtacacaatcttttttttgtaaccctgtttttaaaatgtcaaataatggctcctctggctggcctttgacccttaatcaacactaactctaacttaaatccaaggatcatatttagttatctaagaattccagagtgattcaatataacataattaatactagcataaatgctgagagtttgtctgtgtgaattagaaagtactttttccatacaagaaatcaggttatgaagatttcagctccagctatggctgtgggagtttaagcagtttttttagcttttctaggccttagaatataatattatgcaagtaaaataacatttctaattacctttgcagctctaaagatcaatggtatcgggatttttattaacttgaaacagaaataatattcttgacagtaattgaatattatagtagaacaaaagcaaatatttcaatgttttctcctcagaatcttcagttagtgctaatatgtgcatatgaaatgagcctcttcgcctaggagctccccaccatagcctcttgcctttacttttgacttaagaacctcagcacaagaaacaactgttgacaagagccattactcttctgtgccttagatagctaaaatatcaatgttatttctcaaaattatttctttcctaaggggagatattctccccaagggatgtgtcagaataagaatggtgagtattctaggtggatgggttagaaggcatatatacacacacacacacacacacacacacacacacacacacatatacacatatatatacacacatatatatacacacatatatatacacatatatatacacacatatatatacacacacacatgcacacacacacacacacacacacattttaggtctctggtcaaagatttgttctctccgcctgtgttttagagcggtcataacctaaacatatttttttctagcctttcctcttcctaatgtaaaccatctggtttcaacagaatcaacacaatctacttgaatcttgattttatttgatgtattaattttacttaacctctggtcttttattttacgtaagtttagtcttttattttatatctggcaaaaatccatcatgtttaaggcttcttggggagtgatgtaatgtaaggccaaactgtggatgtatttctgctttaaacaagcagaaacttttgacgagtgataggggcctttttttttttaacccttagagcatctactccaagtagaagatttagtttataatgtgggaggctggagaaactcatggagaagagcactgtaagggctatatgtccaggcactgtcattctcactgtcattgccactgccactgagcaagtcgaatttcacggctataaacctgagataataagacatgcacactccctttttgcaagaacagaatgagaattaaacattacagatcaggctgggcttggtggctcacacctttaatctcagcactttgggatgccgaggtgggcagattgcttgaggtcaagagttcaagaccagcctggccaacatggcgaaaccctgtctctactaaaaatacaaaaattacctgagcgtggtgatgtgcacccataattccagctactcaggaggctgaggcatgagattcacttgaacctgagaggcagagtttgcatgagctgaaatcgcgccacagcactgcagtctggatgtcaaagtgagactctgtctcaaaacaacaacaacaacaaaattacagtttaaaatcctctgatagaataaaaggtattatctcaattcatcatgttttggacacattcctggtttcttgcagatactgatgaatgttctgttggcaatccttgtggaaatggaacctgcaagaatgtgattggaggttttgaatgcacctgcgaggagggatttgagcccggtccaatgatgacatgtgaaggtacatctcttaaacagagaacagttgattacgtgtactgatcctgggaacaattggttgattacaagtcttaatattaaatacaactcagggtgtatataataaagatcatctaggcctgatgggccatttgatcattcttcttttgtggcctcttctctgtagggaaagagagatatccaagaatgatacagttgtgtgttcatggcacatctacactgtatatcacagagagttctcattggtgtttccctaccacttatatttagatgcttccgtgttgtttaataccttctttcttactctcactttctccttctttctgtctctcatactccctttctttttcttttctctttttctcttcttttctatttctaggagcactgcacactaagatacccaccatcatcctgtagccatttggaggcaatcacagcaaaagcggttgcctgtaatatataagcatctgaaaagtgtccatccgtaagcctggtggaatgtatggaaagaaggaaagggagggagtgtctagagcagtggctctcaaagggtggttcccaggagcagctgtatcagcatcacctgggaacttattagaaatgcacattgtgaggcctcatccaagacctcctaaatcagaaactccgagagtggggtggagcccagcagccctctaggtgatctgatacactctcaagtagggattcactggcctaaggaaagaatgaaggagaggtgaaggcagagaataaagttggtagcaaagagagctcttcatcagatatgatctatcaaatgcccattgtcagagttgtggtaaatctttaaaggttgtgactaagtcatgatctgggctctcactcgtgttcttagtcagcactggccttggggagcaacatgatagttgagatggtctattttaatcctgcttttccaaaacacattctgatggttccaaactctgcagtctgcagaaatgactttttttccattaacagtaaactcattcccatctatttaaggtttgaacatgggcatctgtgtaaactgagtgtctctgtcagtataaaatgatctggaacactatttgcttgggcagaagaattgctgttatttcacaggagcctctttgtttgggggaaagagaggtggttaacaatattggaggagttggtttctgttctgaccacaattgttttggcggaatggggcaaaactgattcccacgccatgtaactgttgggagtgacaaatggtcaacctgagccttctaagccaaaatttcagaagagcccctcaaatgttgggtggcctgtaatttcccatccacctaaataatcattaataattataccaggacaacaaacataaactgggactgtgctgggagaaccgggatggagagtcactctgtttataccaaatataaaataatcaacccattttataatttccgggaaatgggagaccacttgatccatccatgtttatgacaatgaagcattgcaacttttggtaaagttttagagttttagttcaattggtaggttcccttttgttgctgtccatgatcccttatttacttactctcctctgctgcagatataaatgaatgtgcccagaatcctctgctctgtgccttccgatgtgtgaacacttatgggtcatatgaatgcaaatgtcccgtgggatatgtgctcagagaagaccgtaggatgtgcaaaggtgagtcatcgtgttcaaggtcatctaagccaggaagctttatctgtgaggggagatgtccctcaaagcttcccttagtaggagaaggctgggaattggaatataaatagtccgtggacaatacgggggttgtcactgccacgtttccccctaaattgtagctggaagcatcatcaagccaagttgaggactgcactgcacatcctttattaggtctcactgtgcatcgcatgctcacaacacgccagtatttctacaagatatgggaatagaaagaaaaagacatttccccacgttcaaaaaacccaatatgaagagattgagacagatataaatacgttctcataatacagtgtgataaatgctatggtgattatatatacaaaatgctctgagaacaccaaaggatattctatttcaagaatggggtaacacgtggaatctactttagctaaaccatctccattaaaaatacctcctgaacacctgcaatttcctaagcactgaactaggctctatttcacaaactgcagtaatcatagagtttgctcttgaagagctctgatttgctcctgtcaatatcttaaatgaacagacacctgttctctcaagatggcgtaaatataattttgcttaagggtggggaaatttcctaaatgaaaggtcctaatcatatgcagaataaatttcaaatttctcagctcagagcatgtaaacgggaaagatagaaaaataaagaagtacaataggacagaaagtaaagactgaggaaggcccaaccaagtccagaaaaggaaatgaaggagggaagaaccagtagagaataagatatttgagatatataatataaaatagtcatttactattatatcctgtttactaatattatcatataaaaataatgtcatattggccaggcacggtggcttatgcctgtaatcccagcactttgggaggccgaggtgggtggataaccagaggtcaggagtttgagaccagcctgaccaacatagtgaaaccctgtctctactaaaaatacaaaaaattagctggcgtgatggcgcattcttgtaatctcacctacttgggaggctgaggcagaagaattgcttgaaccccggaggtggaggttgcagtgagctgagatcatgccactgcactccagactggatgacggagtgagactccatctcaaaaaaataataatatcatattataatatattgtgttattattataattattgcataatgtaagctttggtttgttactcttacaatccattatgattgtagtactattataattattgccttatcatatattgtgattataatgctgttataattattgttatattaagatatatccattatattataattacatgaggcccttttagttcaattagtcaacaagaattagaaatcatgcttcaacaaaggagtataaaacataaagggacagccaggcacgatggctcatgcctgtaatcccagcactttgggaggctgaggtgggtggatcacttgaggccaggagtttgagaccagactggacaacatggtgaaaccccatctctactaaaaatacaaaaaaaattagccaggcgtggtggtgcatgcctgtaatcccagatacttgggagactgaggtatgagaatcacttgaacccgggaggcagaggttgaagtgagctgagatcgggccactgcactccagcctgggcaacagagagagactctttcaaaaacataaataaataaaaataaaaataaataaaaaataagggaaggagaagagagaaaaggcatgatcagaatcatgcttcttgaagaggtcatcagttgattagggagcaatttcttcaagttcaaaggtggttagaagattcctttccattctttagagatcatactcaacagagcagaaggaaatacagccagtagtgaaataacagatgaaaattggttacttactaacattttatgtttaaaagtcaggtaattaaggcagatatatgcattttctttgacaaatttgtgattgtacattttttacagatgaggatgagtgtgaagagggaaaacatgactgtactgaaaaacaaatggaatgcaagaacctcattggcacatatatgtgcatctgtggacccgggtatcagcggagacctgatggagaaggctgtgtaggtaagaggatccctgtggaaggagctttgagtgcatcagaagtgacagtggacagaaggaacctgggctctgagttcttgggatactgttcttggcgagacccattttgttctcttaaccgcatgtcaggactctccatggtggttcccttgcctcgtgatcatttgtgaattccaagagcactgtcattgtccctctgatctggcctttgtctgctttcttgacccatttgctgccaggatttgaacagcatgccttttctctattctcctcctttactttccatactcttttgttgatttgggggtcaattctccccatcacattggaatgcttccctattgacttagctttgctacaaatgccaggtacctctgaatcaggaatatctcaaaaccattgggatctacctccagaaaatctggtcttgtctagagtagcatccaggcactgatatttttttaaagctcctcagctgattctaatagggatccaacattgaggacttcagccttagaccaggagttggcaaactgcctacaggctaattccagcctgccagcccactgtgtgtttttataaataaggttttattaaacataggtataaccattcatttgcatattgtccatggctactttcatgccacaatggcagagctaagtggttgcaactgagaccatatgacccacaaagcctaaaatatttcctatttgaccctaacaaaaagtttcctgacctctgcttagataataattacaggagaaaattattaaaaccttctcacacgcattctctttctttttaataataaatggtattataaagatatattttatgttgtcattcaagaagattaagaatcccattgcccttttactctgtacaatacagattgaagcaggaattaaagaacagattctaaaagcacagaatcagaaaatatgtagattaattgtcacacactggatcctcctggatcagtaattctcaacctctgctgcactttggaatcatttggggagctcaagtccaacctcagatattctgattgaattgttctgggggtggctggggcattgcattggggttttgaacctgttttaacactgttctggattcaccttccaactttctctctttcctagtgagagctccatctgagggaccctgaactattctcaaaggaagggaagcacctcagcaaattatttttgatctttctaaataatcatcagataattctaagaatctgtagatattttaatgtttttttaaacctgggaaactgagttgtagtttatgatttcttaataatattgttgaaatattacaataaatgcaacctatattggagatataatctaggttaatctgaagattaatctagacaaactcccccagatcaatattgaccattacagatattattctaacatgtattaaaatatttctttcatatgctgatattcacatttttccctccttcacttgaaataacactttgagagtcctttttatgtcctaatatgaaaagatttaaattttactaagtgaaaaatgtaagtgtgcataaaatgctaccatctatgtttaagtatataaaatgctatcagttaggcttttaaaagatctgaagtgcacacacacatacacatattatgtatgtatttgcttttatatgcataatccagctctggaaggatacattagaaatcggccccagaattggttgcttttcaggaggggagtttggtgtctgggaaataggaaatgaagggggtacttttgctgaatctccttttgtacctttttaattttgaaccatgtgaagagataagctatttacaaactatataggaaagaagaaaatctattcttctataaaagattcagatggctctttctgttttcagtctttcaatgaaaccaaacagttaagaatgaattgaagtctcttttataccttttaaattttgagccatgtgaacagattagtgattcaaaagctaagttaagaaggaaagatgtgagagagggaaggaaggtgagagggagggaagggaggaaggaaaggagaaaggaacaaagggagggaaggagggagggaggaaggaaggaacgaaggaaggagctccatcctctataaaatggtcagatgactcttcttgtttttggtccttcaataaaatcaaacagatgagaatgaatgtcagacgaagccagggatctgtgagaatgggcgctgcctcaacacccgtgggagctacacctgtgagtgtaatgatgggtttaccgccagccccaaccaggacgagtgccttggtgagtacagttggcaccgcactttcctaacctcagcctccacactgggatgctggaaacccagacttcttatttaaaatacaagaaaatgtcaaaatctgaggaaggataaaaaatgttcatattttggagatgccgtaatgactgtgattgtccattgggctcagcaccaccctgcagctaaattcttcctttgctaattggatcctgaatcacttgtttggaatttcttggctgcctttgaagcccttggtgatcaggatccacttccgtatgtttctctgcccctctgtctgtaagcatggctattcccctgtatttctgggagcagagagagttataagcttgtctaggccaatgtctttctgcctacttactgaatgtcttatttgtttccctcagacgtcatcctttctcttttactgctgtctccagctttcccctcttgcttcttctcacccagggtaaagtgttacatccttttttggtttttatatctgaccaaatttttaatattttgtttgctcttaaaatttcctgacatcccctttgccatataatgtcccttccagacaatcgggaagggtactgcttcacagaggtgctacaaaacatgtgtcagatcggctccagcaacaggaaccccgtcaccaaatcggaatgctgctgtgacggagggagaggctggggtccccactgtgagatctgccctttccaggggactgtggctttcaagaaactctgtccccatggccgaggattcatgaccaatggagcaggtacttcatttatagtccaaaaatacttgcagggaatctatttatttgttttttgtgtgaaacacagatgaaaatatggagtttgcaatatgtgcctaggttgaattgcacagctgaggccaacaaaaattcttcattatggagttttagacatttgaggtcatgctgccaaagtggccttggtccacttgattaagctgtgtgtgcttaggaccctccctctgcattccagcgagtcttcaactttttaaaccgtttactataagtcaattggctactcagaatataatttttaaattttttagataaactttgaaataaatgattattaaatgtgcaaaccagtccaccaagatgtggaactcctaaaactggccaaactgtattgcataaaagaagtataaatcatgctgatatcctggcaattagacacaattgcatctggaaaagcacaagctccttaactagagcaggatgaggaagtgtcagactgtctaaggcaactctagagatatctaggcctgtcaccaatatgattcctgtgtttatcaactgtaactacaattggtttttagttcataaaaggactgagaaaaggtgagagcttttttgagcttcttgggagggaattagaagtgaaaggggaagaaggaggttaagaaggatttgtgtttgtattggaaagatgtggctgaaggcagaataatggaactggatgtgatttaaaaaaaaagaaaaaacagacctagaaaggtaagatggagtgaccaaaagcaatttatgattctttggaggatgtagcaataagatagccgaaaaaactcacttctggagaccaataagagtgtgctaaattgcacttcagagtagacttgtaaaggtcagatacacccagctgttggtataaaatggttatttggcagtcaagggctgagaacccatgtagaaagtgcttgtatcggcacttcgccaagcagtaaggaggtaaaatgggtcaagatgtggaagacagtggttttaatgctcaacagtgcatattgacccagtctttctctctgtggtacagccatgagtgagggtctcccttccttagcaggctgcaaaaacccagcactgtcatccacctcagagccctggttagtttcccccctcaccagaggacagaagttcatctcatttccccaatattatgtaatttgaactttttcaggattaaccacaaagacaacaaaaataatgtaaaaacaaaaaacaaaaaaccttacttattttgagcatgcaatactagggggtggaaatggggtttcctcatcaaaaggatctgcttctgtgattcatttattagatgtcagcaggaggcaagcttaatggcatgagatgacacaaaaagccaaatatgtctagatggggtggctgttctatggatccagaagagaaaaatatacatttagaagaccagttgtttttaaagtttttctgtggctgaattattttatcaattgtagtctaatgaagttatttgtttaccttttgatatagctactgttacatattaaatttatgctgtcatcttactggtttaatttcttaggcccaaaatatagtaacacaatttattagtatttacactgaagtgaccccctacatattaatgttgtcaattttatgatatatttcttaatttatatttgttaaattacagatatcgatgaatgcaaggttattcacgatgtttgccgaaatggggaatgtgtcaatgacagaggatcatatcattgcatttgtaaaactgggtacactccagatataactgggacttcctgtgtaggtaagtgtctatttctgatggcttatcctcaagtggaaattttagattatggaaaaaaaaaaacccaaagctaaaaatctaaaaagtctgtgcagtttcataggaaagcacaggacaatcatcaaagtctacacagagtttcctttttctttccccgaaactaaaattcttcgttagaccctgtggaaattgagcgtgtacacatcatttttagatgcacagtcacgctgtatttctttgatcatagatctgaacgagtgcaaccaggctcccaaaccctgcaattttatctgcaaaaacacagaagggagttaccagtgttcatgcccgaaaggctacattctgcaagaggatggaaggagctgcaaaggtaaagtagaattgaccattgcccctcacctagctcctgacacatggctgcattcctttgcctgtaagaactccacaggcaagccgaaagacctgctctacaggcaggaggtgcttccctggggttaatgcctccatgggacctacctcctgtgctggagggaaggaggctaaagccagggagattgtggaggaagcagctgtccttgctgcatgccccctgggcatccatggtggccatccatgactgtctcagagatagcagggccagcttcaatggctctggtggggcagattcttaattggtgacctcctctctgctttctgttttttgtatttattctttatagctatatagttcaggtttccaggaaggtcctgcctcggaataatcagtgccatgatcgtagaggacattgtgcctaatgaattagatgctgtgtccagatttttgttctgcagaaaaagtctatttctgccctgtaggagcttccctgagacataaatatcacacagaattaagaaccagaaaagctctgggcagaaatcccttctcaaccagaagttatcctttgcaaaatttttttggtttaattttactcctgtaaacatcttcctccacaataagaacattatatttagtgaatagcactagtgagtcatacttaacaataatttgggaaatcagagatttggagaagaaaagatagaccaagtggtagagcaagagatatcatgtcatgccatgaaactttgaaggaaatttatagaaacatacagaagtaaggaaggtaaaggatagagtggagtctttttcctattttttctcataaagcttaagttcttccacttacttggtatatataactaaatatcaaatgaatgatgcagctgtgtgtaccactgaactgagaagaggctagaagggtggagggtgggaccagcacatccccacggaggatccagattggaggagaggagaggagagaagtggagagcagagagaagttgggctcttgacctctttcctgtgtctgctgaaagggagagttaagagacatgtaatagtggatgacatcatgggcaagtgcctgaggccttcctgtgcagcacaaagcctgtataatcctgtagtttggggagaggaagttgagagacctacttacacattctaaacatcttaaatgaagtcgctcatagctttgttcttctcaaatgtggaacttattttacatctggggtcactgtgagttctaggcaatgtgaagctataactcagagccataaatttattcatataaatgaagaaccaaattcaaggggaaaatatctctcattgtatatattatctgtaacaagcaaaacaaatttatagcattttttctaacctctgggggcagaaaattctcaaaagtttccagcaattaaaagatgaaaaatgaaaatgcatcaataaagttctctttatggctttaggagtgcaaagagcaactgtaatttttacatgtccactcacaacttgtcccttttcctgttttttcccataaggttcaaattcttccacttacttggtatatataactaaatatcaaatgaatagtgcagatagttgcaccacagtcactgagaaggaggaagccagaagggtggccgtgggagcagcacatccccagtgagagatgggtagaatgcagattagaggggagaagaggaggaagggcatcttggaggcaagagcagcaagtgctgctgttcttcatgtgttgtactcatgaaatggtgttaggagaaatcactgagtcatcttcctcacctgttgcaggtgagcttcagcaaatgtgtcatgatgctccagccaagctccttgggccatagacaggggaaaccagtccacagactctgagaaagctgaacagagagtgcatatcagtcaagatctcagcagtggaaagagcacaggacaggcagcattataagagaagccggaactaggacaggtctcgggagggtctctcagtgtaggtccactccagatgttactctagccaggaactggccctgtggagtggaagcagtcactggcaaagctggcactgatctgcagctccaaagcagttgtgcagatggtgagggcatagtggttgaatttgtgataaaataaagtcactaatgttttttcctgaatatgcgacaattttaaaattatcattaaagtttagctagaagctagaacacaacatttcatctcttggtattttgaaataacattggagttgagaatgcaacttagaagttgaggcgttgagaaaagaggcctggtcaaagcagagggttttattgagatgtgggaaacaatgttggataaacactgcaggcagttgtcagttttggatttttgttttttttgttttttgttttttgtttttgtttttgtttttgttttgagacgaagtttcactctgttgcccaggctggagtgcagtggtgcgatctcagctcactgcaacctctgcctcccaggtagctgggattacatgcacacaccaccacacccagctaatttttgtatattcactagagacaggttttgccatgttgcccaggctggtctcaaactcgtgagctcaaagtgatcagcctgccttggcctcccaaagtgctgggaatacaggcatgagccaccacgcttggcctggaggcagttttattaaaagtgcctttagctattaaaatgaatttttcctttgctttgtttccttcctgattgctcaattttggtttatcctaagaagaatcacgactaaagaaatcagattttgtttttgatgacttcatttgagtagattaaaaacagcaaacagaagagaactaagccagcaaattcatttccagcttcaacatttctctttatgttttaacttaaatagatcttttcaaagctctggaaaatttgcagaatcattcatctttcgcttcatttaaaaatttgtttaaaatgtcatgatttatttgaaattcctttgttgaggaattcctgcatttctccaattagaattgtgttttcttggatcccctaaagatctctttatatttttttgaggggaggagggtctaaattgacaccttgttttatctttcagatctttaccccctgtgtctctccttgccttttgctgtggcttctttctagtcagggtcatttgagacctccaaatcaaacgtggagctgcttcatagggtcagcttccctgatcctgttttgttggcttgactcaaatgcctctcttgcattttcttgtagatcttgatgagtgtgcaaccaagcaacacaactgccagttcctatgtgttaacaccattggcggcttcacatgcaaatgtcctcccggatttacccaacaccatacgtcctgcattggtgagtaggagaggaaaaaatcctacatggattgtagcgattcttttaagggattattttctatttcctctgctgttgggataagaaaataaaagctcaaagaaatatatgagtgcatgtatgtgtgagcacacctgtacatgtatgtgaagcgttgttggccttatttggccttttccgagttatccttctaattttcttttaaatgatacaaagagagctttggggaattttaacccctctttgcccccactgcttctcatagataacaatgaatgcacctctgacatcaatctgtgcgggtctaagggcatttgccagaacactcctggaagcttcacctgtgaatgccagcggggattctcacttgatcagaccggctccagctgtgaaggtgggtggagacttcagctgcgatccagctggtgaatccttgtggaggtggcctgtgtggctattggcaccttcatcatcagcctctatgagatagcagatctgagcccaggggggcactcagctaaaatagtgtgcacaggtcctgtatcttagagagtcgtgttttgtttcatgcttgattgtgtctaacacacatgcctttcctaagtatatcaagactttttctgctaagtttttaatttaacctaatagggaataactcagtcaagaaaaatatacttgattttgattcattaattttctggtcactgggtccagagccataaagggatttcccccatgtggactaaacatatgaggaatagctcttctgatgacatttaattagaagtttaaatgatatttttagaagttgactgtggctttgacacgttttggtttctaattgtggcaccaaaaataaaaaaaaaaaagagcaaacacaaataacttataacttacagagctgtcccagagagtgctttgggctttgcactaatttcctgacaatttttatttgtagactttgccagggctctctgaatgattttctccttggacttagcagcagttccagaagagagattcttgaagtttttggtggtagaataatgtgtaggatgtgtaggggccagatttcttattagaatccatctggcttcagagagagatgttgagttggcatcatggtggctctgcttctttttcagacgtggacgagtgtgagggtaaccaccgctgccagcatggctgccagaacatcattgggggctacaggtgcagctgcccccagggctacctccagcactaccagtggaaccagtgtgttggcaagtaacttttcctcactctcaagatgcatggctatcaggtcctatgaagcaaaacactgcttgctttctgaagctgtaaatgtgttattgaagcaacaaatactcatttaaaattgccctaacctggttgaaacccgaggtaagtaacagtctttgcaaaacagcaaactaagaaaaaaaattataattgagggtgctttgagagcatctgaaatgaaatgcccccagaatttcttgaagcgcaatatcctccaccctcccgctgcactgctagtcatcagcccacacttgagttatgttcatatcaggggtcaaaaaatcttacttatgactgaaaaatatcagccagccaaaggctattttgagtggcttttggcctgaagatgccaaagtagttctgttcagctctacacattttgagacagagcgcaagcaggaaacacagcaaggttgtgtttttttgtgtgttttgttttgttttgttttgtttttcaagattgctaaattcttttgataattaagggagatctactgactctctcattaaattgaaatgatgtcatctttgattctacaatgtcatgggaaaataactcttaatgcacatcagagaatcaaaacattgtgagtttggagggataccagaagccacttagctcaggcactttgttttacagataaggacctagaagtccagaaagggacggtaatatttccttgcccagttcttttgtgacatgcttggaactagaacccacaactcttaactttctgatgtagagctgcctttcaagtgtcacattcacttgtttatgttcattcagcaagcgtctgtgaagtgccactgcaagcttggtgctttggtaacctgttctagttgccacattattctgtacagagccctccttagcaaaaactcaaagaattactgcttcccgggtgcaggctctgcattgcaggggttcactttcatgcagatgaagacatatttggtgtgttttcatttatcaaaatcatctctgtcatctagtttgattctacacaagacagttttgcagtggcatgtagggttgactgaagtgacccctgtgctataggagtttcgactgcgtgagtctctggctagctatctggttttaataaaaatgtctttgttcattagcagctcagggaggtctttgattttaatcaccagtttctgacattgttcacagaacttccagagtgaactttgttgattcaacacccagtttatgagcctgtctgttctcattatttaggtcattttaataacactggagctaagtgaaaaaaacataagagaggaaaggtatgtcgctcctgtaccttatcctcctcctcctaccatcagtctgaggatggtagaggcgaccaggccatgcactagtgtcctggagattctgctctggtctcgtgaagatcatctcctggctggacactctaaaaaaacaagttgatttagaagtcagaagaagtttggggttcttaatgtctccaaatgccaaattgctctcatcaatcttgagaattagagttatctagaatgagcattgccgtgggctaaaatagcttccccagaaccacaagaaacagagcagatctcttagaccagccctccctggatcctcactcccaggtggctggaagttcactctttggggtaagagggccactaatttcattgctttctagaagtaaatttcaaaaaattcagcttgcagatagatagagttgacccattttcccctagagaaaatgagtaaaagaaagcccatcctgcatttgtgaagtttcctatcggtactcccttaaggccacagctaacatgaacagtgcaagctggatgctgaaacctttgattttagaggacagagtggtgggtttcaatccacttttaaggagtagttttcagactttaatgctattttggtaaaattcgaattgtctctttttataaaacaaacaaaaccctcaccaatctaagtaccaactggaagaataaaacaaatattttggagtgtaaaaaaattccttgtggagtcatttgctccagagtgcagaggatgaaaaaggtcaggaaaagtgcaaaacatgttaaccaaatcgtggtgtttgtatattgataaaaagggcgagtgcacaaacatgctgttttcaaactgtaaacactgaatatttgccaatttcttattttaatctgtgctctactccatcctacctctccaacctagataagcaagtttaatttaaactttattaaattctcagggaagggagaaaatgtaaaataaaatttaaaagaatgtgaaaggagagggggagaactcttgatagttgtagtaacacagatagatgctcaaagttaaaaagaaccttagagatctagccttctctctttcctaatatataaatccttctctaacttccttgcttatcccagtttggcttaaataccaccttgaagggtgcccactttctcccaagatagcccaatctatgtatagacagcttttaatacttagaaatgtctttttttgctataaaaaaaatcatttctcctccctctaatttctcaccattggtcctacttctgctctttggaggaaaaaacacagaataaatctaagctatagaatgacaagtcttccccctcatatacccacgccttgcaggttttattagtcagggtcccagcaagaagcagatggctgaggccaaccaaaagtgagggacaggggagcagagcttgctcatgctccatagatcagccacctggggccaagagcaagtggagaggatggaggatggacgtggaggagcaagaagacatcagcccaggggtgttctctccaatgaagtaaatatgcttcgttcttcattctttgtttgacatggagcttggtgccagtggtttctgttgctctctattgcacacttcgtcctcaatttaaaataaggagaaagaacacagataacgtgttgagcacagaaagagaaagggaagaatgagaaagataaaattattatttatattttaagagccctggagcctaagtgaccttgggtgaagacttgaaggtctttggatacaaaagattttcagacaggcagttaagatcaaagacctgtagctgaagggaaggagggaaagagagaaggaaggaggggaggagagaaggaaggaaggaaggaaaggaaggaaggaaggaaggaaaggagggaggggaggggaggggggaaggaaggaaggaagaaagggaaggagagaaggaaagaaggtaggagggaaggagacatggaaggagggaaggcaggcaggcaggcaggtaggaaatgtgaatatatactaagtatatacaagtgagcatccttccccaccacttttatccacctgttttctaatttaaaaaaaaagaaaaaatagatttgttgagaaacattatttttctttataaatgaatgtgccttagcaaagaaggtaaactaattacaggagaaaggaagcaccagcttaaatgtggagcgtctcttgagaggcactgtggtataaaggaaagcgcatggatggcctttgcagtccaacagacctggctgtgaatttctgccctgctgctgctggctgtgagatcttggaagagctttctgagcctcactttcttcagctgtaaaacagagaatataatacctctttctcaggattgttaggaaagctaaggaaatggtcaatacctgtatcctatctatcataaaataggtatctaataaacattcattcccttccccttcctctcttccataggaagtggttattcgctaagtgaagagaaggccaatctatctacattcaaatgaacgtatgcctgaaaatggactatggcagttaagaaatgtcttaccagcaactttccaacctgccctgcaaaggcagatctacaaaaatatattagagacttccaaaaattataaatcagaaataatgagaaactcatggttttcccccttctagctgatttttttaaagtaagatttctttttcctgcttcttagcatcagacttggcaggtccctgtgggtagccagccctgcagcttctgtctcacttgtgggttttccccaattactgcttgtgaagtctgcaccaaatctcttccagccacacttagttttagacagggctcagacactctgggcaggaggctggtttgaataaggagggggccgattcggtgatgggagcagacataccagaaggcattattcatctcccagaacaggtacctgggggcttttgcagaattttgaaaaggaagtccaagtggggcagacacgtggggcagacacttggggcaggatatcagcctttgccagatcagcatatcctgaaataggctgacagggaaagcagcctgcgggaaaatggttggtctctgcttttgagagatttgtctcctcgctgggcacttgtgaagcaagtacgcagagaactgcaagattcctttcctccccccttgaaccctaaatcttagctacggaccagccccatgttggttcatgaccggatgtttacatggagcagaagataccagtgttgacttctgatgagaactggagtctgctggtcctcagaatgccatcctctaatgccctctgcctggtgcatttgacttcatcttccatgtttcatcttccatgtttactcacaacatagcaagaagccacatccatgcccgcatctttctctgctgttgctctccccacccagccacctctgcctgtcttaccttcctgagagcctagctgagggccagctggccggcagcaagtggccagatccaatgtcctcaatagaaatctctggctgctgccacacatgccgcttcttattttgcctgcagatgaaaacgaatgcctcagcgctcacatctgcggaggagcctcctgtcacaacaccctggggagctacaagtgcatgtgtcccgccggcttccagtatgaacagttcagtggaggatgccaagacatcaatgaatgtggctctgcgcaggccccctgcagctatggctgttccaataccgagggcggttacctgtgtggctgtccacctggttacttccgcataggccaagggtaagcagtgctcttcctggtcatggttggagattctttcattcgtaatataattaagtatactgaactcaaaattacctgtcctagcagaggagaaccatgctttttgtaatcctaaaattaattccagttagcttggcaaaagttttaggttattttatttggaaggaagcatctggatttctggaaacgtcaaacaaagtaatgaaactacattgtaaatatctcgctatatgacttctctatcttattctcttgatcttcacatcttgttgggaagtgattcatctctctgtaaatacacctctctgccaacccatgacagaactgggctcaccctgcacacgactgatccactcttctcctggggcagggaggattctatctggacttaaaatgcctttgtatctagctcctgttagaataagtcaaagacatccctttgggttgaaaattatttagggttttaaattatattttacatttcagacttgaatttacattaaattttaccaaaggtgcattgaaacacttactgtattttcctggttaaaaaaagaaaaacaaaaaaaacacttcaccaaattataggtgtgtctgtgtgagagttggggcagggaaggccttttttttttttttttagacggagtcttgctctgtcgcccaggctggagtgcagtggtgcaatctcagctcactgcaagctctgcctcccgggttcacgcgattctcctgcctcagcctctggagtagctgggactacaggtgcccgccaccacgcccggctaattttttgtatttttaatagaaacggggtttcaccgtgttagccaggatggtctcgatctccggacctcgtgatctgcccgtcttgacctcccaaagtgctgagattacaggcgagagccactgtacccggccgggaaggcctatttttattttacccagtgatttaaaagtttagtgttaagttttcaaagtttggatcttttttcctgctgaattaatctggactcgggtgtccacctagttttagctatcctgagaggaagtgcacattttaactttttaattaggaacacatagacattaaatatatatatacattatgtactcctccacatgcgtgtacacacacacccccacacacatccacacttataccaaattattaatgtagcagtctttgatttcttgacatacaaacatcaagtgattcattttggatctgggtaggtagaagaatgtttcgtgggaagcacacagaatgccagcaatcagacacaaattcccagatgtttgtgtctggctctcagtagactcattctttatagtttaatgccagaaccatttcttcccagcaaaaattgtgacactctaaactggcttttggccagtgggattttgtagtcacacttcttataagtggtgctcccgggatatgaaaatactggaaaggagttctgagaaaggaaccaaagcctgcaaatttgcagtttacctcctaataatttaatcattgtgtgaatgtatacgcatgcgcacacacccacaggatgagcatttatcacttcatccattgtattgtttctacatatttcatgttgcaagataaagaggaaaggaaatgtattggactctggcaagattgggggaaacagtaggaacctataaactgctttgaaatacaacagatattctgttcattggcaacatattttgaatcctaagggtatataggaaaattagttctaaagagcagatcagctattacagaaaaacagataaataatttttggtctatattatgacccattgttagaaatctacccatttaaaacagttttggcctctccgaatcactagaatggactctgcccccaaataaagattcttttaaggaccattcaaatgtttcaacacatttggaaagaggagcttgataaatacacattccaagtggcctctgaaatagtaagcagaataacaaaacaaggtacttgtgaaacattcgagcctccctccgtaacttggctttgataactgaaaggcaaagaaaaacagctgaacgagttctctcttgggcatgggtttgtttatccatcttcacatgagtcggagccagtggccctagtggttttgaatgacttgaaacagtttcccacagttgggcaaactctgatacatgcattttatatacggcatatcttcatagtttattattaaattaaccttcattatcaaccggagctttcttcttatcctcagtagcataagcaaaagtgaaacgtcaaggaataggagcaattgctccaaagcttgagtgaggaaaagtaatgatggaagtgggagaatgcaagaaactcaacagtgatgtctcacaccttgctcactcccatggagcctgtttcataaaaagaagccatttttatttagcctcccaagttacatggcctccctcatctactattctcttgtttccactctgtgtctcctccccagtataagtactgcaaaatgctttccatgttaggtttgggaatgaagagataaataaatatccaagacagggtcttgataggcagtagaaggaaatcaatacattcagggaactgggaattagaggccaaacagaggacctcaatgtagttctcagaactagctgatcctccagtggacaagcaagggctgtatctcacaactgcaaggaacaggcttcaccagaactcttgtaccacctaccttgtcttcccattctaatgaaaaacatctatgctccccttctgctgcaggcactgtgtttctggaatgggcatgggccgaggaaacccagagccacctgtcagtggtgaaatggatgacaattcactctccccagaggcttgttacgagtgtaagatcaatggctaccccaaacggggcaggaaacggagaagcacaaacgaaactgatgcctccaatatcgaggtgggtcagaagttagtttctcctgatgtctcctgtggtggaaagcccttccagattcctgtggtttcctccaaggatgctccaaagtgtgaaaaagctccccagggagaaactccagacattccctgagctctaggctgtattttacaagaggctgtggggctttctggagtttcttgctgcttttcgggagtggccatttgaaggttttcacatacttgctcatttcctctgtctcgccaaaaaaaagtcaaatacccacccaaagtctgctgaaaggataaggtctgagatccaggacagcaagtgggcagaatagcgaagtgacatagtgctccctacataggaatgccaagttctgaaagctagaggctcctctactgaaaagagccatgtggagtgtgagggaacttggattgtagacaaaaataacgtggagctgaagcagcctggtttcctttgcctacggctgctgcagcctttcagtcaactcagaagtgcacagatattcacccagacctctggctctgggcccatagaatccagcacatgtggtcccagagaggcaagtaagaagccaggtgaaaagcattgaatattagcagatcatcacagtcaggaagtaggctcataggtgtgtccttaggagaagatggttttacgtcaatgaatcaaattgaaatagtctggttcttcgtattggtgctgcaacccatctgctgtcatttaagaaatgagataagtctttggaaagaacataatctattaaaacagtggttctcaaactttagcatgcatctgaatcacctactaggtcttgttaaaattgattgttgggagacatcccagggtttctgattcagtagttctggggtgatgccgagaatttgcatttctaacagattcccaggtgatgctgatgcagcttgttcagggactacattttgagacctccagatacaaatgatttcaacctgcctttcttcctgacatcagttaatattttcaaatattacaaatatgtgccaatttaatacacttgtggtctaaacaaaatgctttcaatattgtgtatgcagcataaggcagaaaattgtattagtgtgaaatttgagtcattttttctttaatatgagagctaagtggcatatgtacattgtatttaacatattgccatgtgtctttccaggatcagtctgagacagaagccaatgtgagtcttgcaagttgggatgttgagaagacagccatctttgctttcaatatttcccacgtcagtaacaaggttcgaatcctagaactccttccagctcttacaactctgacgaatcacaacagatacttgatcgaatctggaaatgaagatggcttctttaaaatcaaccaaaaggaagggatcagctacctccacttcacaaagaagaagccagtggctggaacctattcattacaaatcagtagtactccactttataaaaagaaagaacttaaccaactagaagacaaatatgacaaagactacctcagtggtgaactgggtgataatctgaagatgaaaatccaggttttgcttcattaattcaccatccagagaccaaataattaaaagaaaaacaaatatagataggtagaactatattttcccccaatcagaatcatcatatcataggtacaatctttcaccaagtaaatttgtataaataagcactattctttgtattaccaaagcaaggtacaggtgactaccctagttcaaaacaaccactttctcaggcttctcatgtgtgtagctaagctaccttgtcatatgtgttgattcttgaaaactgggacgtgtatttccattgggggttggccatttatgctgacatgccatccttccagcaaacgtacgggaatgtgctttcaattgatggactactctattttttgcaaatttgtaaactttgcttctccaaatacaagtactaggttgtccatttatggtacctatttggtgctagtaaattttcaaactagatttataaatgcactgtaatatgtacacaacttagaaaccaaattacaagtattcagttccaatacttcattaatttcaatcaaccaaagttagttcagtagcttatctcagttatgagtataatacattacatgtaaattaagtgtgtgtatactgtaatcgtgctattttttatcattgaaacatttataaactagaataataatgcccttaatgtgagggtttgtaatggtgcttattaagaccaaagacttgttaaatgtatacaccaagtggtaatgaaatttcggtgactggcccacacgtgcatagaggtctgggaggaccaggaaacagcctcagtggccagaggatcaccagtgcatccttcatcacagcatgtgcaatatgccaagattaccctcggtcattcctgtcaacaaggggtcaatgtcataaatgtcacaataaaacaatctcttcttttttttagtttaccccttggctttgtgttcttgcatggatttggggttggaggggccattccggaggctaaataaagtctcctggatttaaattatcctgggtctcttacttatggcttatgaaagtaccaaatgtataaccactagaagaaaatttaacatatgagtcgatcccttgttttatccattgaaagtagcagagtctggtgtcattaacctgacttgcttgtgagaaatttagattgtagagtcatttctgaaacatgacctaattcatcttgtgacttttaaatagtcttaaataccaagttcagtcattgtcttagagcacatgaatttcattataatagatttatcatgcccccctctcaaatatacacagttttggcaagccttaggtgttctgttccatttttttttcccctaaacatctttcgttagtcaatgctcatctaattacaaagggataatcccagactgtatccaattgctgtaacttttggtttcttaatgtcataatttttaaagtctgttttattttaagtgcaatattgagtatttagctgttaggctcaatccgtcgatatgaaataattttttaaatccctaagggcaggaaagcatttcgtggtagtgaaaataagaggaaataagatggcatgaaggtggtgggcggagaaactaggtaggacacaggaaagtgctctcaaaaatctttgaagagctcagctgaaaaaaatggagtagatttggctcatactattccggaaggcaaaaccagggtcagctgatgtcagccccagtttaatacacacggtcccaattatagagctactcactgaaagaatgggtttccttgcattgtggtgagctccctgtcacaagatagaagagtttcagtctaggcttaatggcaaccattggacaaagatgctttcttccacctaacaggccattaacatcttaaaggtatttttgtatctctaattttgtttataataggtgctcaacagaatgagctgaatggctgttacaaagggggtttgtaccttgggtaagagattaaaatataactcaaaatttccttctaacgctgcacctatggaaccatgtgatagaggtgtattaaaattgttatcgaagaatatatagcatatggtaaacaacagtttgcatatggaaaatgtctttgataatttaaccagaactgcattatattcaataacggattttctttataacaaacaacaggggaaaatggagttggcacacagtggatcactttgatatttttaatagtccaagtctggattttatttattcctgagccaacaattttgaacagcatattttccatgtttctgactgtaacaaaacattttcctcattgttccattgtaaatattcctcttgttggaactctttttaatcctgagatttaaacctgtacctttcaattgtctgtgacctttcaatttcactttcaatagttgaagaacttggctttgtaaatctctcagaagcttgaaaatatcttgtctctaccccctcagcccatttcatttgccaataattattttgtaagtagggttgaaatgaactcagctggccttgtgaaatgtttaaacttgcacaaacaactacatttttgttcaacaaatagcagtttactcagccaaaatcactttggatattgccattacaaatactgttaaacttcagaaatcatgtctgtaaattagatgagccaaaataaaggacaattgggttgatgctgca

SEQ ID NO: 23 - DNA, 232030 bp, Homo sapiens
acacagtactctcagcttgttggtggaagcccctcatctgccttcattctgaaggcagggcccggcagaggaaggatcagagggtcgcggccggagggtcccggccggtggggccaactcagagggagaggaaagggctagagacacgaagaacgcaaaccatcaaatttagaagaaaaagccctttgactttttccccctctccctccccaatggctgtgtagcaaacatccctggcgataccttggaaaggacgaagttggtctgcagtcgcaatttcgtgggttgagttcacagttgtgagtgcggggctcggagatggagccgtggtcctctaggtggaaaacgaaacggtggctctgggatttcaccgtaacaaccctcgcattgaccttcctcttccaagctagagaggtcagaggaggtaagaaaaaatggatttggggaggtgggagattgccgtcggtcctactgcttctgcgcccctccccccactttacccttcctccccgctcttcaagaaaaaaaaaaaaaagcaattcccttaaatacaatccagattgtagctgctaccaggttggaattggaaactggagaaagagatgaatgtaggcgggacaataaagggagacgaggtaggtagcaggaaaaaaagatctgtcaggaggagagcctgctgaaaatgcccttcaccactttccagcctctttgaaaagaggaaaaatattaccttgaacacaagggcagttatacaaagcttttgtttgaggcacagtctttagactgcccttggaacacatctggtttcttcagattctaactaatgggaatatctttttaagggtgagctgaggagaaaatataaagggtataaaatgaaccttgataaagttctttgtctgcaaccaagtgagaagcaggctgttttagttttggggatataagagaaaccaggggggtgaatctagaagattaggaacactctgtgtgtttggggggcgggggagggtcaatctattttaagtggacaaaaattggcagattattaggaataggttcaagatagggagaacactttcccctgaatttcagtgactccccccaccccacccctccgcttcttcttgcaggttggacgtgcagttctcttggagaatgatgaaagtcgccaagcaaatggggtgggggcggaggactagggattgggagggaaggggagggggtgtgggtagggtgggaggagagaggtaaggaacagttcctacgtggcaccaccaaatattcaatggccagacctgctcggaagtctgcaaccctgtcagtacccacggagggagagcgacttcactcctcccctccgccttctccctccctctttcccccgccctttcccgaaaaggcatctggctggagcggtccgttaggtgccttagaatcgactggcaggcgaaagcctttggaggtcagggagcccagacagcttagagtagaaagcaagctttgtgaggagtgcagaaagaagctgggggataggaaggagggtgactgacgaggttgggtcaagggagataaaaatggtcaagcccaaatgcgtaggctttagcagaaacttgagtgtggccctgggtctagatgccaagatctgagctctccctaatgagagtcagccctcccggaggccgatctctgagaccaggttattccttccacacgcttagtggctttcagcttcccgagtagcaggcagcgctagattattcccttgggtgacttttcctgctaaatacagtgaaagtcctattaggactatatttgaattttgaaaggagttattatgttgattaattatgttgattcattcatttccacattttcaaggatagataagagtgtctttgaaagtgaaatccatcaaaaagtttgtattttacttttggtacctggtcaccggttggattggtcaattctgtcagcagttctgccctctgctggttttgtttattatttagaattcctgcgtctaccgtgggacatgaggcctctgtaagtccctcttaactacagtggtactggaaaaggacctttgattaaggaaaaatggatatgccatttctttttcagcatgtcacacacgcatgtaaatgagaatattgtaatggcagctatttattgaaaattataggaactgagaatttcttcggtgatggatgaaatacaagctccgagagacacttttgcatggattcagggattattttactgaagctatttatttttattttccacattgagcctttctgtggcgatatgtgaatattttttaatatcaaatttctgtacttttcatgcataaattttctattttcagtctagcaacatacctgaaacacttttaaacagcatcccagtaccacatcaaataaatggtgggaaaacaactttccctatttttatgaagccaagtaatgatagaaatagcaaagtataaggattagattttgttgggtttcttcttcatgaaatgccctgaaagttaagtggtagtttagatatttatattttaagattttgttatgtgttttatcaagctgtttagtgctcatttttcctgggaggccacatattaacataaatccacttttgtaggcattcttatcccttaattaacttcaaaaagggaataatagtatattaatgcttaaaaagaaaacattggctacaaatcctgaatcaccacacaagggaaaaataaacccagtgtccacttctgataataacctttagatttgtggttgaagtaagattttataccaatttctaaataaagatattatatcccagcatcatactatgacattgatttcattgaggtacagtgataagatttggatattaagcacaaagataatttaaaacagatactacttttatataaaattaaaacattaaaaccttaaaacatctgagttcaaaacaaagttagactctaaagaaaataatatagagaaatttcttggaagtgaatggattaaagaaaatttatgacttcatacctagtcatattattttactttgaaaaatcaaactataacttggaaatatttattatactcattaaaaatcaatccttgctgtgatttagaataacaaggttaagtgtgatttttataaatatttatttacattaacttcaattttatgtttcatatatatgtttatttttaaagtaaatgatgtatctcagcgatttattgatattctttggcagttagtccattacttactattcacaggaggtggggtttacctggaattcatagtgaccacactatgattatcttaagatagatgagtttatgtaagggttttaagtaagagttagacttagctataatgaagcactaaaaaaaaaaaatctaattgaatcactttttactaattaaaattacatttaacctttggcagttaagccaatactgtatcttgtaaaaggctgatcaaactgggaactttggaagcttgtcaggaatcgatagtgagccctgaagaagtgtagttttgagtgcccaggatcagcaggtgaaatggtcctggcttccagagtatgtgctagtccaacagtgcaaagagatcgaatttgtccatttggttccttaatcagaaatcagaaactcagatatgcttctgataagaaatgcagtgtttgctaaactcattaatattatgtctttccatttgttttttaaattcaaaattgatcaggactataatagagaaagaatatagactaaagagaaacacctttctgcatgctttacacacatagcttcagtttaggtggcacagattcttttacctagttgtccattagttttgaaattaagtttcttaatatcttaaagtgacaatttgcttcataattaatacttaactgaggggatactttatagaagttattctctaaaaggtatttgtatagttttaaacaaagttatgcagtagcaaagtgagaaatgtatttgcataacataattggtaaaaaattaatattttttcggttttttattttcttcaatttgtgactaaaatagaaccacatggttgttcatgttaagttatccttaaaatacagcaaagcaaacatctcttttcaaatttatgggttggctttctagctaagaaaattgtataaagagtcacctttcttttctaaaaatttgctttttcctaggataaattctcttcactctgattaatttagtgagatgctggctatttcatgataacaaggatttaaatcaagtttggttgagagtctctgtgtaatacaagctgaatttttaaaaggttaaaaaaaggtgtttatataagatttttaaaagagaatgctagcactagaaattatagaaattgctaatcaatcttaccttctcaataaatgaggaaactaagacacaaaaagttgtcagctgaatactcttcctcataaaaaatattcttgtaatattcaaggtttttctgagtagagtgaagatctgtaatggtgatcaaaagaattttaaataatagaagtctgagacaatggaatgagaggagagaacttagtagtgcaagttctaattaaagttttattttggattgtcaaaacacctgaaactaatgtaagtaccttttagctcaggaaaaaattgacatttaatttatgggaagtactcactctcaatggactaccatgatatctgttgtgcaatcaacaactattacaaatttaattaccatatgtgaaattacaaggaagtaaaagagaaagaattcgatatattatcgctatatttatttccagaagtctgaaattattagaccatatatttgctagagtttagattagtgagaaggtagatatagtgaaaatgtcttatataaagaaatttaaatagaaaatagttacagaatgaattttttaaatactctatttactacctttgaagaaaggtaatttttgatcatttgtattcttaattatgtcattttataagattacatcaaagtagaaggcgtaatactctattcattgctggattaagaacatagttttgtatgctctctaaagttgttaatagaagactaggtccaactttgaatttctaagaagcttagaaaattatatatttatttcaaataaaaaatggcaaatttctgatattttcaggttaatttcaattgattggatgacatatattttatgtatacatatagtatgacttttattaatgtcagataatcattatgacacacttgtgtgttgtttgtttaacagtttttttttaaacaagtggcaaactgaagaaaaaaataggagagaacgtagtagtgcaaattctaataaaggtttttattttggattgtcaaagtatctgaaattacataagtatctgttagcttaggcataaatgggcagttaatgtataggaagtagtcactcttagtaggctaccatgatatctgttgtgttgtcaacaactattacaaatttaattaccacatgtgaaattgcagggatgtaagggaggaaaattttgattttctatctcaaaatttatttctagaagtccagtcttcaactagtattcccaccaaattaagagtctttctgtttttagggaaaagcaatacatggccatagggtcctgaagattatactgtgaaagcatttatcatgagtttttatactcacaattaactataccattttatgtaaatatggagtttaaaaaatgctgagatatctccatcattgtatacaatttttaatgattatgtttaggtatttaaaagccagaattttattagatacacttttattttctccttacttttggagaagtaatcaagcatggatggcgtgatcattaggaattcaaggcaactgcaagtggggactgagcgttggtcagcatttctgcttttactccttcacttccctcatgtaatactggggaaatgtgacctgagttgggagtggtgagaggaaaccaaactttttcttttttgaccattcaagttttgttccttagcaaagaagagagataaacgctgatgttataaaaagttgcaatgttccctaagttctttcactaaagagtcaactttaaatgcagttttcagtgtagctttcagtatacactaacgcactttctacatgaggacatattccttctaaattctcttgcaatttaattcaaaacctaaaggtattttttttccattttaaaatactttctgttttagaatgcatctaatgtatttctttctccttccttcaaaaccctaatatggttttattgatataggtaagtgtattcttttatatgttcacttgtgtcagaactcaacatgaataatactagcttgtagcaaagatgaaagacaattttaaagtgatttagtgagtaatatctatttatcagttgcagtctttggcctactactaacttggctagtggttctttagacattggctgatcaccagacctactgttatctggtaaaataaactctttgcttgctgcgcatggaattagagacagtgctattaatttaggagaaagaacttagagaaaggaaaggttatcatatttcagagtaagagaccagcttaaatacgacttgacaattgagaactaaaacaaacctgtgtaaaagtgctttagcacaattaacttttgcaatcccctcaaatcttcttttttttttttcttaaaaagcatttctttcttattttaaccaaatttaattgctcttgaatggctctgtactgtacaggcaaatgaagctccctattcatagaacttgagtgcacagagtatcaggggaagcttccttcctctgtttgactggtaaactgacatccgggcttaaaggagtgaaccttagactgtgtgaggtagttggctttccttcctcactcagattttcacatagactccctgaaaggatgactgccagaaagagcagtagcttgctaataagaactctagtgcattttcatacttggtgctcttaggtagctctgcacagaaagaaaaaaatgtaaatattgaagtggtgtctgtctttcctttacttctgtctttagagtctaagagtggagctcaacctactgctgactgttactcttccttttgcatgcaaatgaaacttcaattatttcactggcttttaggataagtttgttgtctaattgggttagagtgcccttcaggatgtggcatatctttatgtccaggctcaagaccagccatttcccacctccccaagcccatttccatttaccttgcactttagtgatgttaaacctcttgcctgtgttctcccctatctttgaacactcaccctggaatgtctatctcattctcttccatcagcaaacaccttctcctactttatacttcgaaatttaagtaaaatatcatagctccagaaaacttttccttatatctccaggtgagccctaataccaaatacatgctcagtatgtacaaggttctgtcatatgcactttcatagagaatcttatttaattgagacagttttcctggaagtaagctgatatcaaaatactgattttacccatgagataactgaaaaacagagaagtgaaagattttgcctaaagtcacacagctagtaagtagtagacccagaatttgaatgctgccaagctttctccaaggcccttgcttttggccacttgtccatgttgactttgctgggtgttctaatgcttctatacagcctcctaggcttatcttattattatggtgccctggggcctaatattaatgtacacatcatgcagctaaaccacagaaaataccaggtcattgggtgaataacttgactgccttcaaggagaaataaaaagaggttctggtaaaaggtgatgttagaatccagatagctcttcagcctgcacttaagttcagtggtagagaccatattactcttaccattttatggacaaacctcagcctcagtggtagtggaggattgaaaggggagtttctgggagccatcaaatattagttttgttcctttgattaacttaaggagaagctgacagatgtatctgttagtattcaaagttccagttgtggttggcttggtttcattaagtaaaagaactcttatagatcattgcttgtcctaatcaggatccattataaaggtcatcaggacttattctacttttggggattggtgtatggaagttctcttaactgtcttcagcataaaaaatgtcagagttgattatccaaaagcttttttggagtgtaatcaactgagagaatgtaacatcattattttaaaaattactcacttatgtcagtcttcttctaggagttcctgggtgggtagtgactgtgatctagttttatttgtgtccccagtgtctaccatggtgacaaaatacacagcattgatatagtaactatttaggttaattatattctttttttacccagaagactggaacaagattaaaattgagttagcttggaatggtgtgaactgaaagtttgaggacctcctcagattatgctgttggtagtgacatgagtagtgactcctcttttttaaattcatttgctaaaagtaaataaatttcaatttacctctagctttttcatatggaaaacagttctgcattctctccaaaggtgccactgaatatttgtagctacagagtgactatattacctccaaaactttgttttgttaataccttaagatatgtagtggtattgaccgtagcataaatcatcattttacttttctactagtgaacaagaaagtttaatctgagaataatatcaatctgtaaaatcgatcattggaaatagtcctctcatatattcattattgaacctttcatctcagattggtatgctattggggattagttgtctgactttgcttattagctattagaaatagcagtttatccatatataatatatatatatatatccatatatataatgtatggatgtgtgtgggtacatgtgcatgtgtgtataaataaagtgctttatgtttatttcaataaactcattcttcaagttagaaagtaaattatatgttttatgtatattggaattattatattatgaagtaccatctccaaacaagaaatatatagagcttcaaaatgcttaataagattaatagacaatagttgtaaaattcttttggaatatagttacatagtttttatactatattgctatccatggtatattttagttacactaaaatcactggtataggtatgtttatctgatttatttcatctagaacagaatccatctagaacagaaagcatctagaacagaatccaccacatagtaggcatttggtaaaactttgctgaatgaagtgagggcgttgttgacattgctaatgacttgattgtccataacctaaccacctgagatgtgatatatagctatgtgtatcacctactctcaatgtctatggaagtatcttgaaccaatttctgctgatattattgtgatttcctgagactatcagtctctattttggttctaggccaacctatgacctctaccctaagcactctcccactttgttatttctgaaagtaaaaatcctctttgcttgagatttagatattgtctccctctagaaataactttcttcaagcattgaagattggggtagttagcctggcataacattataaagcacactatacttatccaaaactcaaatacttatctcaaaatatttttgatggtataatgaaagcaggaaatacatctttttcactgatgcaaaacattctggcatctgtcaccatatctagaggaaaatagatagccagtaaatattttttgaatgaatgaactcataagcaagatattttcaataaagtcaagaggactggggtccgtggcttagtatcataattatttccaatcctaacgctggaaattttgatgaaatagattttgtatgacatcaaagcatagatgctttataaagtttcatagataatgttgatgcagaagcaggggtttacaaaccttctgtaacaggaaaccaatatataaataaatagaaatgtatctggcttgtataactaggcactggaagtcgagtgaaaggctattcatcataatgtacaaattatttgataaatatgctattgctaagcagtagtggctctgcaataactgagttgaggagatcaactaattacaatatagaaaatgctttcttttaatccttctctccagagcatgtaataaactaaatgccaataaatattgctcttctcagtattaaagtcaaatggttatattggaagtataattttagttttataatacatcttttttttaacagccttggctatttgtaaattagaaatgctgtacttttaaaatgtcatactctcaactagtttttgttcttttcttcaccatactcagagttgtgatgccatttttgctttccactttcaggtcaagcttttatgatataaaaaagttcaggattgagtctgttcaataactgtaaaagttaaatgactatcttctatgttaatcactgtgttaagtgctgtggctacacagacaatatgatgatctctattctcatggagtgaaaagctaattaatacctgcaatcattcatttacttattcaacaaatatctattaaatccctattaaatgctcttcctgaattctaaactaattcattcatttcattgccacgttcgacaagtacaggttaaaagctcattatatgctaaaggtagttggtgggcaaagatagttataatcctgcctcgtagtgattatggtctacttgaggagacagtaattaatcaaatagtggtacaagtaaatataaaactacagctatgctagatgctttgaaggagaggtgtatggttcctggagaatacaaaacagaagtttagtaaagtcgaagaaaacttccctgagaaagtaccaattgagcattgattaattaactaaagtgaagaggaaagagcattccaggaagtgatgtgaaggcctttatgaagggaggatgacaccataagggacttgaagaaaggacttgaaaaatggcagtatgtctggagaagaagcagtggggataaaacgtgagatggtgctggggaagaaggcgggggacacataacacaagatcataaagatagatttttctgcatagcatggaaacatgtcactaattaaaaagtacaaggaaactgccaagttagcagggtcagtgcatacttcgatatcaacacataactaggttgtcccagttgattcctaccattggatcctctgacagtcagtgaactggggccatgttgttttttctggaatagccaaccctactgtcaaatcacttggggttctcaacagtaattagtacatttaagtcacactttatatggagctatggtcatgtagtcttgcaaaatatataagtaaacttccacttcataagggagtatgagaaaaatgttaaaataaaatctgctataagacaaaaacataacttagcatttctaaaccttatgtgactgttcttgttattaaccaaagtatatcagcttttagaacaaaaattgcaaacaatgatttttgtttcttaagattaatatatgaggtcatgatctctattttgattatttgagatgaccaattgtttattgtcagcatttttttaagtcttaaagttctctttcagtggaaattattcaaatagaattttaaagtaatcatgtcattgattgattaattgtagctctggatagcattggtaggctgtcaactcctaaagttttatttctatcctgctttaccctgaacttcagacttgcatacttgactgcctactcaatgatttctaacagtatttattaagtcatctcacatttagtatacccaaaactgaattgcagaactcctctcctgaaacctgttcttctcacagccttctccatctcacttaatggcaacccaatcaatcatgatgttccagctacaaatcttgaactaagctttactcattttctctcttatctccttttctacctatcagcaactcctatctgctccactttcagaatatatgtagaatctgacccttactttctgtctcagtctaagaaagcaacattttatatctggaaaattgcagttacttcctcactgccgcctgattccactcgagtgagcctagagtttcttctcaacacagcagacccagtggtctgaaagcataaaatgaatggaaactatctgcaccttcctctcaatttttctgtaaacctaaaactggtctaaaaaaaaaagttgattcaagtcatccttctcccctaaccttccaatggtttttaaatctcatttagaataaaatccagtctccctgaacattccacaggacctatacagcttgttatcagtgtatcctcacttttacttctctgaccacagctctttcactcttgttttgtccatgcagtcaatcttttttatagcagtattcacatattcacatagagtacatagaaagattttggcttttatataatacagagtttaaaataactttacagggaactaaatttcttcaatctgaagttcagctatcttttttttttgttaactttccatgctctctatccaaactgaacaatattttctgttacacaaatttacatgagaaaatatccaatgtacaaatgaagggacctgagcaggaaagagagccaaaatattaggaagtgggtatgggggataattttttgaaaaaagatccctttgttgagacatatttgtctccttgcatttctttcaacattctgggccaactattgtctcgggttctttgcacttatttttccttttgcttagaattctgttctgcaagaatagcaggatagaggaacttcctatgactttctagactttgcccaaatatcattttcttattgaggccttgcctgttctttttatttgatattattttccaggcctttgcaaccctccctataatctttttatgattcattttttccttagtactaatcaaatatttttcatatagaaaatgatggtgcatttaaagatactgagtttgtgttaattttctatgtaaaatgtaaaattagataattttagagtataaatgttgccttaaattatttaagcttttagatgttagcagcatctaggtcatctatatccaataattcccatagtttgttattccattttatgcagtattgacatacatacatagtatagtcaatataagagccaaattctacacagtaaagcattttttcttatttgatggacactatgcatgttaattcaggtgttctgagaaatgacagctgtgtagaaatggtaacggcattttgtactttgttttgttggtttaagagagccatggtgatggctacctagaaagtagtattgcccttaatcaaagataaattcagaatcatgtattttatgtagagttgacttttgaccaacataagagtaagaggagccaactccctgtgcattgaaaatccatgtataacttttggctcccctaagacttcattactaatgcctaccattcatgggaagccttattgacaaaataaacagttgattaatacatattttgtatgttatatatattttatgctgtattcttacaatagagaacagaaaatgttcttaagaaacataaggatgagaaaatatatttagtattcattaaatgtaagtgaatcatcataaagattttccttatcatcatcatcatcttcatgttgaggaggaggaggaagacaaggggctgatcttttctcagggatggcagaggcagaagaagtggaaggggaggcaggagacgcagacacacctgtgcaactttagggctatacattgtaattggtgtctgactttttgcttttttgtatctctaaaaaatgttttcatatggtaccaatccttcctccactgtttgctttaattttagttaccatatcatagaagggtctatgtgataaaagaaggcaaaagcagtcttgaataatcagaccacttctgccagattgtctaatgtcaatttgttttctgacactgcctcttctatttcttcttccccatcttctgacactggtttggaagcattcatcctcatcaagttgtcttctgctaattactcttgtgtggtgtctattagctcttgaatttttccaagatccatatcttgaaaccctttgcccccacacctccacattttttttccatatccacaatctctttcctgatttcctttattggctctgctgcaaatcctgtgaagccatggataacatatggccacagttttcttcaggaggaatttattgcttcaggcttgatggctttcaaggctttctctgtaacaatgatgacatcttcaatggtgtaacccttccagactttcatgatgttctttctatcagcgttctcttccatagcattgacagtgctttccatacagtaccatgtgagtgagccttaaaaatccttatgaccccatgacacagaggttgaattagagatgtactttggacaagtagaccacttgaacacctttgtcattgaattcatggggttatgggtggccaggggcattgtccaatatcaaaagaactttaaaaggcggtttattactggcaatgtattttccaacttcaaggacaaaatatcgacagaaccactccagaaaaagggttcttgtccaagccttcttgttgtactaccgaaagacaggcattcctgtttatcttttcccttcaaggcttggggttagcaactttatagataagggatgccttcctcataaacctgactgaatttgcacaactgtagaatttgcctgtttcttcttaccttaaatcctggtgctcacttttctttcttactaataaatatcctttgtggatttttttttccagaatagggctgtttcatatgcatgaaaaaacctgttcaggcagctattctttctcctcagtggtttttctaatggtatctgggaaatggtttgctgcctgttcatcaacgaaaggtgcttctcctgttatcttgacatttttaaagcagacctctttctaaaattatcgaaccaccctttttggcattaaattcttcagctttagattcttcaccttgcttttgctttaagttgtcatataatgacttcactttttcttgaatcatattgaacttcatagctatataatggctttctcatagccaccctcacccacataaagctgcattttcaatataagattttaaaaaagatgttttgcaaaagttcaaggcttttgcacttactggcatagatgcagtgatggattcatggatttcctttcttttcttttgtctttttctgtttttttttgtttgtttgtttttggaacaatgatccttatgctggactcatttatcttgaaatggcaggcaaccacagcagacctcaatctacagtacatatcaagcaattcaactttgtgtatgtatgtatgtgtgtgtcatgacttttctctgcttcttgggagtatgtgaaacattaatggtacttcagataggttccctggtgcttttcaaggtttacaatatcgcactaaatgtgatgaaaagcacacaagaaacatgagagatcactttttacagagataggcaatttactagagagatccactgctcatgtggaaatgatatttaagcagatacttgccacatttgggttcaccacaatagcaacaggaggtggctaacaaatgattacagtagtacagaatgcactacacttaatcttatgcagttttcatttattgctgcatctttatgtttgtttacatttctctccactatgaatggtgccatgtgtaatggtgccatgtatgatctgtgtttgtgtgcataagatttgacaaattttgactttttatactttatttgtgcctattttatggtagtaaaccataaaagacttgtatctacatatattttgtgcattcatgacatacttaactttttcttaatgtttttgatatttttagcctactttgttcttctggaaggtttctcaaattgtcacaaatctccaaaaatgtgttttaaatttatgtattgaaccatattcatacataactggacctatacatttcaaattagtattgttcaagggtcaactatttctctcaatccctaaataggttagaattataaataggcaacaatgggatgctgatacaattgattttgctggaagtcacactttttcattaattacacttcagaatattttactatgtatttttattgacctttctaattatgaatttcactatgcagttcattttgttttaaactggaattttcctggaattgtaagaaaatacatttacatttgttcactggatttctattttctgaaaagatagtactaataggcttgttatgtgtttggtttgatgaaattaactctaaaattcctaaaactccaggttactgatatatattgtctttcttatgtcattctcagtttggtgctcttcactgtttgaatatgaaatacgcagtttttttcaaggtgcctatcaaaatcttaagccattttatgccaacatttgtttatttatagtattcgtgtgtatattagtgtatatgtggagaaatatattaagtaaacagagcattattaatgacaacacatcttagttgattataaaacccttcggggaaaattgaactctaaataatattgtggaacacttcccatgtcctgtagtaattaatgtaaactatacaactgtaagggcttcatatataatcttacaatttactaatgtattttagtagtttatttctttaattttgcacttgtgttgactacaaagattagattgtagcatacaagtcaaacatctggtaatttcatccaaaaagggttctattgagggtaggaagtttatgtaatttttattggcattatttgtgtgacatcatcatttaaatatgaacttctgtatcttttcaaatatgggagtatttaagtcaatgtgcttaattttctaatattttatattcatatataattcatggttggtatgtggaatatatgtatttacaataaatgaaagaacagtgtcagaggaaagggtctacaatattacatttttaaatctttaataaatagcttagatgaggcccgctgtgtttaagctatagttatatcaatttctatgcaatgcaaagaaaaaataatgaaaagagaaaaatgctaatgatatcagtgtattaatgtccatttgtactactagggggtaatgaagtgctgagcatgaaaatatagatttaagatctatttggttgcttaagctaaattccaggaaacctcctgaggttgtttgcatctggaatacaatatgaacatgctgaagagattgctaagcagtacataatttttatggatgattttgaatggacatttagagatcaaaactgtttagtattctactcaactgcagagaactttcccaaggtagtctgaggaagcagataacaggaatcaatttaattatagctctagggaaatgtggatggtattaaagatgttcagaaaggtagacattttcatggaataataattttagataatatttttattgaatatgtattatgcattagacaccattctatgtttaaaattccttacagcgtttaattctcaaaatgagactaaattgagaaaactaagtcttggagaggtaaatagcttatccaaagtcatagaaataataactactgaatttggattagttgttgggcagttcttactgtggaaactagttatcaattgttgtttataggcttggcatgtcccagtttttagactctttcttaagagccatcatgattttgaaatatagcagaatattagtagtaggaaaattataagaaataatcaattttctatccttttctcttttgtcagtcctacatctcactaccacatgctcatagtagcaatactggttttttgactgagtggaagatggctgagaactttcttctgtattattttatttttattagttccataatggtatgcctcacatatagtctgtgatgtgaggtatgggttgagaataagtgactctcaagaagttgggaaaatatctacattaggaaggctactttattattgttacttattttattttattttattatttatttatttatttatttattttgagacaaagcctcgttctgtcccaggctggagtgcagtggtgtgatctcggctcgctgcaacctctgcctccaaggttcaagagattctcctgcctcagcctttggagtagctgggattacaggtgcatgccaccatgccaggctaatttttgtatttttagtagagacagggtttcgccatgttggccaggctggacttgaactcctgacctcgtgatccacccacctcggcctcccaaagtgctgagattacaggcgtgggccaccacgctgcttcacacctatattcttcccacacctgaatcaaacaatggcaacaaacaaacttggaaacctcttcaagttcttggtaaaggtcacttccaatcctcttcctttcccatctcaaactggtaggaaaaatgcttcaactatgagacagcttgtggctactcatttattcatccattaaacatttctccattgattatttactgtgcttcagctgctatgtctttgcaatttgatagtgaatatcaatagcactgatgttcactgtcagagggtttacagtgtatcaagggaggcagatgttaaacaataaattacatgcttaacagagagagaaaaatattagctgatgtgagtatgtaacaagaaaatcatgaccataatttagacagatgctgtgcctgagagcatacagcctagagccaaagacataattaagcaagcgaacaaaatagtgtagggtgatctaaggggaaatacaagacactgggatcatataaagaggtcacatcatcctcttggatgagctaagaataaatctcctagaataagtcatgcttaggtttacactaaaaggttgactaggtctgaagccaccgagtttcaaccctggctgcacattaaactcatctgggaaacttaaaaaatatggatgtctgtacccaatcattctagtttattagttctggggtgggttccaggcattcataggttttataaactcttcagatgattctattgacaggattgaaaaataagtcaactgtccttaaccaattgaggaaggactggaaaaaatctacagataaagacagcaaggtacattttagaaactgaaaattattccagttctagtaataaatgtcaggatgggcgagtcgatagtttttattggagatggctcttggagtttgtggcagtgaatgcatgatgaagatatgatttttctccagtggtcctcagcagccatggtgcatccagggataatctggagagctaaattttctccgtgtccatgtctccttgggcaagcatggctggtttccttgaactctttactctctttgtatctgtgctaccatatctgctgtttctttccttctcttcttcactgaggaactcctatttatccctagggactcagcttaaaagggctaggtagtagatattttagttgttgtgagcacacagtctctgttgcagctacgcaactctgttgcagtacaaaagcagctatggacaatatataaatgaacgggtgtgactatgttccaataaaaactttctttatgaaagctgaaatttcatatagttttcatgtgtcacaaaatattgtccttttatttttcaacatttaaaatgtacaattattcttacatcatgtaccatataaaaataggcagcaaggaggtctatgggaggtctatacccacaggcacagatttccccaccatcattcgaaggcattgttacaaaaaccaatttagttctgacaaaaaaaaactctttgaagtaaatatttttgttattctcattgtactgatatagaaacggaggcccagagtaattaagtaatctgtccaagtcacacagatgctaagaggcagaggtggacttaagaagcagttttgctctttaacactgtaatgatgcggttcactactggtcatgggagtgtgcaaagaagcttagagaaggaattagagatgaaacaatcaaagtattatgagatgtttcatcagtaatctatatggatggtgaaggcaacaagggagaaaggatcaaagacttgggatcaaactgatcagtgaaagggtggtggtgtttaagaggtcaatagactacaataaaaagtacatattaggacctaaaaaaatttaatttcgacactagatagcctgaggatttcagaggaagttccttccatatattttcacattatcgtgtttcacattcaaccaacattttcataatctctgtgtgtttgtgtgtgtatacctgttccttactagtttgcaaaaattggcaaagacaaggcaaataattttaaaaaagtatgaaaggtgctataatagaggttagcagatctaacccagcttagggagacagagaatgttttctgcagaagatgcattaccaggtatattcttatccttcaggtgaggtggagctaagtgtttgaaacagagagtagggtttataaaggcccagaagcaagccagagaacatggtggattctggaaagactgagtttagtatggtagaacactgaatgaggacagaatgagggactcatgagagctaagactgtacattcagtgagcttagagtggtaggataagtgggagtgtccagatatccaagttgtatattcaaggaatgtggaaatcatctgagagccagtggggttctttgaaggaatttaaacatcagagtgacatgagacatggatttttggaagcttaatcaagttggtggaatgaagattgatgggaaaaagtatggaacccagttaagtggctattttagtagcacattgggctctgatattctattctcccgtttaataaacctataggtattcaataaaggacaggaaaatataattgaacaaaacattgtgctgaattggatacatctgaattgcatacacatggtttgtgccagcagttggcaacatagagataattaaaatattaaggtcatttaagaattgctttgaatatggacattttacttttttcatatatcatatttagccataaaattacttcttttaatctttgaacagttgcagttagcaaaatataaagaatagctttcccacatatatgtatgtatgcgtataaaacagtagaatccatttaatgacaatttattaaacgcaatatctatgaggattatgagatcaaataacaggcagaatttcaaagtagcttaattcattatttagttcacttgaaataaaataaacttaaggacttaattaatggagttttacttttttgtaacttgaaatgcctttttgggaaaaaaaaaaaggcttggttgatacctttattatatgtctctacttgtattgttttttgaggagtgaacacttggataaggtcatggtgttaaaagatacgttgttgccgggcgcggtggctcacgcctgtaatcccagcactttgggaggccgaggcgggcggatcaggaagtcaggagatcaagaccatcctggctaacactgtgaaaccccgtctctactaaaaatacaaaaaattagccgggcgtggtggcgggcgcctggagtcccagctactcaggaggctgaggcaggagagtggcgtgaacctgggaggcggggcttgcagcgagccgagatcgcgccactgcactccagcctgggcaacagagcaagactccgtctcaaaaacaaacaaacaaacaaacaaaatagatacgttgtggactttgcagtccattttatgtattatttacctctgcccaattgtgattatgacagtggggatgcattttgttttccttttcagaaaaattacagccttcatagatgtgttcatgtctatcctcaagtctttattcagttctactttggagaatggcttcagagcaaaaatataagataatttaagcagataaaatgctgtggttttcagaaacattcttcttcagagtcatttatatactagaacaagtaatgagtttagtttaaaataaatatgaacatcaggaatcaattagctggcccaaataacataaacatattatatgtatgttttaagtttatttttgcagagtttttattttggggtatagcagggtgagtggtgaagtggaaggagcatagagttggtatttacacagatcttaagagtaatcttagtttgttctctggttcttaaatctcaatctgcacaggacggataagaacatatggtttgtgagggttaatccctgtaaagaacttagtccagagactggcacatattaggctctccctggcagttattatgattagcattttcttagttatgaggtaagagaaaataacacatataaaacagatatcctattggcttaaaaacatagccgttgcaagcaggactagtgcaaaaaaatgttctcaaacatcattataatttttatatctcaggcatgctgaatgatatttggccagcatatggtctactctgaatgttttgcttgtttttgaatataggtatgaagccaatagaatataagtcaagcaggtcctcaaatactgttgttttgttcaactcgttcagtgataatgttgataagaaaaaaaaaaagtccgttcccagtcagggccactatgtggcgattacatgttctccctgtgcctccgtgggatttcactgggcactctggtttccttccacatccccaaaatgtgtacagagaattgctgtctctaaatggtcccagtctggttgagtgggtatatgtgccctaccatgagatggtgtcctgtccaggactggttcccgccctgcgtcctgaatgtttgggttgggctccagccatttggggccctgaactgggataagcaggttggaaatgaatgaacaaatgaatgaatgaatacaaattgttatcaaataaaaatctgtaaactctaccataattatccaaatgcacataataaataatgcagtacaaaagcactcagagctcatcatatttgtgattgattctgaactgcatggtgggaggacatgctccttacaattttcacttttcaaacgtttataccttaatttaacccagcactactatgaccaccgtcattcactgattcaccaaaaattggataaataattatttcatttttcattaatctttcttaaatgtatgtgtagctcacatttagttcaatgttcagtatgaaacgtgttttcagtctttatttagaagtttggtggtgtatttgtgatcagaaatagactgtaggaacttaactctggtttatatcagtgagcctatggtcaaattggtttcattaaagttgatttgctcaatgtagaagtttccaagagcctatcgaggatattaagtgaggacttactgtacattgagtaatatgggttctaaagtctgtttttaaaataatacttgaactgcattattcatgtcctgacttgcttagtgacttaaatatatatgtaattatggaccagacaacttgaagatctaaaaaagataaagtgtttttttttttttttctaaatggcatatttcatgtagtgtactgttttgaaggttgatccgtgttatagcctgtatcaggacttctttcctttttatggctggatacttttggttaatccattcatctgttgaaagaaacttggattgtttccaccttttggctattgtgaataatgctgcagtgaacattgtgttcaaatttttgattgagtcccagctttcaattattttaggcatatatgtgggagtggaattgctgggtcatatggcacttctgtatgagtctacttaaatgaaaattctcgaatgagtaactagagacagaaagtatataagaggttgtcagggggtaggaggttgaaggagtgaagagttattgcataatggtgatgaagtttgagttgatgaaaaatgttcagaaatagataattatagttgtacaatattgtgagtgtaattaatgctactgaattgtacacttaaaaaatctaaaatggcaaatttaatgttatatgtattgatcacaattaaagataataatagtacaatataccaaaaaccactgtttgcttttaagtgggtgttttgtatggtatgtgaattataacccgataaagctgtttatacaaatgggtcacacttacaaagggaaagtttaaggttccaaacatattttatattgaccacgtcacagtaactaccaagtacctggaatgaattagatttgggaaatttatgcttccactaaaaagtagcctagttttacataccctaagactacaaaaaaaatgtgaaggggcacaattactaaattactcatctccagggactttcagcctaaataatgaagtatggagtaatatccatgaagtgactggtaagttgagataataaaaatcgataaattacatatagatagatacatacatacacctttgtgtgcatatataagtacctgtatataatttgtaaataactaactcaggaaagcactgaaaaaggcattgtattgtgctacctatttttttaacacctttctttcaacttctcttgtgtatacaaaatgactaagtaggtgcacattttacagagtttacatataacatccattgtacatttgaatcttcaaaatcacctctgtttagattatgaatagtttattagtaactgttggaaaatgaaatatttacaaatgctggctttcactttaattctacataatgttattacttggaattattaaatattttataaattataattgagatacatatgaatgtttataaatcatatataggaaactttaaattccagatgcacatatgcctatgtacacacacacgcacacacacacacacacagacacagacacacacacacacacagacaccccttctgtgttgcttaaccataatttgattccagatttgagatattttgaatttgagaatgttgttatggtttatattactacctgctgccccactctccaaactcccacctaaatgttagggaagcatggcaagtgataaatagattcaaggtatgaaatgacatactatcctgtgttaaaaatactcattgttatatcagatcgttgttcaattctggttttttattgtttgcttatttttcagctgctccagttgatgtactaaaagcactagattttcacaattctccagagggaatatcaaaaacaacgggattttgcacaaacagaaagaattctaaaggctcagatactgcttacagagtttcaaagcaagcacaactcagtgccccaacaaaacagttatttccaggtatattcactttattattattattgttattattactaaaagttattacacttttgttactactaaaactacttttagtatttctttactaattagtatttttatcaggttagataatgtgcaattatatggtaaaatgcaattctttcttatatcagacaccaaataccttgtggtcaccaaagtaatgtaatgaaaataacaaaaaatttgataattgccagtcttaattcaacacaatcacatttctgtgaaaatattcttatttgaacatttagtacttcattatttgtacataatatatggagacaacattttatatctagcctatttctacttgtaattaggtagagcttattcatcgtgactggggtataggagggaatctttccccttaatgactttctaagttaatttaatgggcatttgaatgtaaacatacttagtgcatgttttcctaacattaaggtaaatgtttctgttgaaagagatactttttctttgcaaataattttgcattattttttcatgccgctcttatctaaaatataagaaaagttagtcacatctcacagttatccctcctgaaactagagatttttttaaaatatcagctggcagtttttcataatggtactgaaaagtacttgctgaatatttgtttttccttccatgagagcactaattgacctaataacactaattatctagaaatcatgataatgtggagaaagggaattgagtggtgaaatgacaattttcgagcctcatattttcaaagcaggtaacttgttaactgtgcttgcctccatttgatacataccagttatctattgattggtcagttgatgggtgttctcatccttatttaacagaggaggaaactgaatttcacagaggctctctgacttgaccaagttatgtgcagtcaatatttaatctaggtctgttctgctctatatattttatatgtcatcaaatggtcctttctggcactttgggatcttctcagcagcaatttatcatttaaattcttcatattatcctatattatctctgcttgaggaaatttgagtttcctatcttcatatgaaactgttttctaacaagagaaaacaagtataaatcaagggattaaaacattacaaaacagcacagtacacttttcatagaaggacattttaaaatatattgaaatacatttattttgattgttcactgattcttccaatatattttctgttttgcaatactttgtggtgaacaagaacaaactgaaaatataaagaataaaatgaactttttttctgactttgaaaataaaaaagttaaagtgattattaaatccataaaacattttaaaaatagatttaaaaaaattaaaagtaaaaaggtaagctgctttttctatttatgtgcactctgctgcatttcctaaagcatccttaatagaaaaagggatgggaattttgaagagagtaaaacaaagaaaaatataccaattaaaaacctttagaactactcagattacaggttacaatttttatactttagctcattatctcagggtcagtgtgttctgcattccaatgtggtagttacttaaaatcattaattttatataactaattttaaatactatatatttaagtgataagagccatataatcaacattatctgactgctttctttatgatacagtctcatataatttccacaatagttccatgggacagattaaattattagcccagccaatggatgggaagggcaagtaggattttatttgccaagaacacatagctaggagatggtgggttgattccatatattggctattatgaataatattgcaataaatattggactgcagatatcccttcaacatcctgatgtcatttacttgggacatatacccagtagtagggttgatggataatataacataggagtgcaggtatctctttgacatactgattgcatttcctttgtatgtatactcagtagtgcgattgatggcactagctctaattttttgaggaaattttttactattttctatatggctgtattaatttacattttcaccaatagtatgaaacagttcctttttctctacatctgcaccaacacttatcttttgactttttgatagttgccattcatactggagtggggtaatagctcattgcagttttgatttacatattcctaatgattaacgatgttgagcatttttttcatatacccgttagccatttgtatgtcttcttcaagatatgtttattcagacatcttgtccatttttaattggattacttgtttttttctattgagttgtttgagttccttacatgtttttaatattaaccccttatcagatgtatagtttgcaaatattttctcctgttctaaaggttgtctcttcactttgttaattttttcttttgctttgtaaatactttttagttaaatgtaatcctatttggatgtggtagggctgggatttgagccaaatgatctgacaagattcagaactttcaattgagatactgtactgtcttccacttaactagtctatgcatacatttatagcataaaaatgtattcatgcctcttgctgttttttcttttgtaatatgttttaataatttccacttcataaaacatctttctgctacattaagtggctgcatacgattctattacataccatacatatttgtattttatttaatcagtttcaatcattgcagcttattataaaattttattattataaatagtactttggtgatttgaaagtacaatacatttacacataagcatcctctccccatacattcttagaagtagaattgctgatctcctacaattgtttgaacttgaatccaagccagacataatcatatttcttttatagatttatactactgcctgtaatagaatttggaatgaatggattgaaaaaggaaggccttgatattaggctagatattgttgattacacatgcacatacacaatggttttgcaaaaagacaacttttcaactaaaggcatctcatttctcaaataataatgcttgctttatttatatgccagagtagtaagaggctcaaataagatatatttgtaaaactattttgaaaaataaaacccgcaacttaatatacattgttttataaaaatataagtactcattacttaattatttgagatatacttagggtaattgtttaactgatatatttatataacagatgcttagtaaggaccaatgtagatcagactgtatgctagatatttggcatatgattgagagagagaagaaaagaaaaagagtctgccttcttgaatttaaaatcaagttagccaattacctaatagttctggctcataatgacatatgcttctttaataagaagcaatatacagtgaaactgcattgtttgatattaagaactaatcgaaaactcttaagcttttaaagaaacaacagaaagaatacgtttgtaaattgggtcattacaatgcctctttaaagtgggcatgtatggctacggactagacaaagacaaaaaatacaaactttaggccaaaattagcacttaaataaatgttttaagagtggtggttatgtgtttgatatttactggtatcataatcctgttgcctaaaccaaatttaatttcacataaacattgtgctttaagtactttaagtgagtgtctttaaagtttgactatagcttggataaaaattgaagagaaaccttaatggaggacccctatttatttattaatctgtttactattcaaagttagttgatttataaaggccatgtagaaatttcaaaaataccacagtgatctaggaataaagtagaaattggaaattggaaatttctaactctttggccttttcttctcaggtggaactttcccagaagacttttcaatactatttacagtaaaaccaaaaaaaggaattcagtctttccttttatctatatataatgagcatggtattcagcaaattggtgttgaggttgggagatcacctgtttttctgtttgaagaccacactggaaaacctgccccagaagactatcccctcttcagaactgttaacatcgctgacgggaagtaagtaacaaaataatacaatgttttagctatgccaaaatcattttttttattcagtcacttaacaaatatttatgaagtgtgataaggtttttctagaggctggtgataaataaatgagcaaaaaatacataaagacataatttatagtgtgtacagggaaacaataaacaatgttttcaaaataaattactaataagtagtatagcaggtggtaataagtgtgaaagaaaaagagagcagtaaagaggttagggtgtggcagtggggtgggtagttttaagaagtgacatcaagccaaatcccactaagaaagtgatatgtaaagaaggtaaagtgcatgccatgctgttcattaaaagactagtgttccaggagaagcaggaagccaatacagtctctgattccagggtgtggccagtttgttccaagcaacatcaaggataccagcatggcaggagaagagtgggatgatgaggatggagaagcagagggaggccagatggtataacacattgtaggaggtcgtaagcactttggattctactctgagagaaacaggaagttactggaggctttttgagcagaagaatgatctaatttgacttacgttttactaataatattaatattggagatcagaggaagcattatagagtgctgatatgtgccatgtactaaggtctttatacattgttaactcatttagttttattgattcctttaagaaagtaatgttaacaaactaattttcctggtaagggaactgaggctcagagagtttaagtaatttgcctaagttcgtatagttggaaagtgatagagatggggtttgaactcaggaagtcaggcttgcactgcgctcttttgcaaatcatgtcgaattctgaattatgtattgtggttgtttcctttcacttatggagcagctaaatagaaattaatgcttattaaatttactcaatattttatcactgaatccagacctctaaaaacagctttatccaaaatagcacatttggttatagctataagaaggaagtagcagtgatcattgacactcattatatttttgtcaggaccacagagaaactctcaagtctcagttttactgagactttacaactttaggcttttacaactaatttacattattatcctataaacaaattagatataatagcacgttgtgtttctttttttgactgttagcaaactccatgctaaggttttaatctatatttggtaaatgtagaaaatattttgaattcatcttattattcacaccttatttttccttaatcctgctttcctaactgaagaaaaaaaaacaaaaacatcaatttattgcagcccagcccacatcctattcaaaactagcaggtagtgtttactatgaatgtatccttaaagtaaaacatgaaaaaataaaaataaaaaaatggagaatgttcaataaatatttttaattgattatcaaacagaagttatatttacatatatcacagtagtaaaatattatcttgataatatgttgaatacagttaatacctagtagtattaatttttttcatttgtatattccttcaataacaatttattaaatgcttactgtgtgctaggtaggtcctatacttttacttgagacagttaaaaagtgacatacttgttgagctcaactgccataataatttagatgcaaaaatattggtatttaagcacactgtgatgtttttaaagaacaatcatgacattcatcatgagtgaacattcattccataagtatttatctattagccaccgcttggctggcagtctgtagagcacagcagttgtagcaatgaacaacccaggtgaagttcctccactcctggagcttaaatatgcgaagtgctgatagttctttgaacgaaaataaatcaagataagagatgtagagtgtactattttagataggacagtttaatatgaatgaatcctcaaagtaaaacatgaggtttcactcatgtttttttgagtgaggttgcattgagcaaaatcacaaaggaagtgagagaatagccatgtagggatgtggagaaagaacaatcctgcctgggtgaagaacatgtgcaaggggcaaaaaagaggcagccttgtggctgggatgccaggagtccagggggcgtctgagctcatgaggtcatagaaggataggggaccctcctgtgaagcagaataatggcttcagcttttactgtgagtattgtatttgatagttttaagaatgcagatccttgatctgacttagatttttaaaaggtggctctggatgcataagagtagaagcagaggccagttaggagtctagctgtgagagatggcagcttgtactaaattgagagatattggattctgtttatacttttgaatatatgaactgatagaattttctgactataggagtgtgtagtatgagaaaaagagaataattaagaatgcctctaaggctaaatgttaatttggtattttgaatattatatatgacaccatgattatgacatatcattatcatagcctacattaattaaacaaaaatatcaagtttagagttctaatcagttttaattattgaaattgtttttattttctgttaatgaaaagcacatacctataatactgggaatggcttaagtgaagacccagatttcttggcatgaagtatgtgtaaattttactctcactatattaagtagctccttatataaatctttgctcaattcaaaccaagcagacacctatgccagttgaatgttctagtggaaagaccaaagattaagtgtatatggaaatacacttggtcaccatgccaagtcacatgaaacagacattttacgagggctcctgcaactttttgggtattttattttatggatctagtcctagacacttctggaatattaatctagcacttttcatttggaaaaaaaataaaatataaaccagactggcttgcagaattgagtgggcttcatttaatggtttatgttagcactatacattgttaataaaacccaccattttacagtatggttagggaatgtgcatttccaaagggctggccatgtctccccagccaagcctgtcatcactgctctaaattagctggagcagtagctgcagagtgaattgagagtctcattccacacatgcgttgactatgttttctttcagttttccacatctgccaaccctggaaagaaggaaagatattgtgtctcagtcttggatcctgcctacagtagtgatctataactgtcttgaaattaaagtggaaaaataatgaaagcacttgaaataaatgtgaataaagacagagaagcacattgtgttttacaattaggacgttgacttgctctagatggagcgctcattcaattagtagacataccctgttacagtcaatctcaggggatcactagagcggagtttttttaaatggaattccactttggaagaaagcatttatgtacttggaaactattacttaccccatatcccaccctaatctctatcaaataccttcatcaggacacagtgagattaagcttttgttactacaacacaaagtgaagcaaaggatgggcacttccttatcagcacagacagctaattctactgtgcattttatgctgcttgtgtccttttgggtacctagtactgttgggtaacgagtaagtagtcatctgttaactggctgcttaataaatgagcctacattttttgtatgattttagctcatttttataatttaaaatacacagcatttttatgtgaatactgctttggcaaccactgtttctttgaagcttacaaaagaattacttgtcttttttaggtggcatcgggtagcaatcagcgtggagaagaaaactgtgacaatgattgttgattgtaagaagaaaaccacgaaaccacttgatagaagtgagagagcaattgttgataccaatggaatcacggtttttggaacaaggattttggatgaagaagtttttgaggtaaaaataaatccaactctaagctgaatattgacaaatcagatgaactgggttaacaacagtaaaaatatcgctttatagcaatacgttataaagcaaagttgaaaactctaaagggtgacctagtttcttcctctgtgagtatagtggtgatgttttctattgttcagtaagagaatgaccagacaatggtgaccgtaacgcctgggaaacatttacagggattggttgatttgaacacagacatgctattctcctgggaaggacaaacggcttaactcttagtagtttgtattattttctttgcagaaaagaacattttcttcatttcattctatgggaggttaatttagagagatgcgcaagtcatatattttgccttcctctgttctttgtgaatgttttttaaggtaaaatagagatcatattgcaaaatataaattttaagtgtttaaatcactttaaaaaatatgtaaagatcatggtaagatatttccatcaaattatatttcactaattatgataatcacattcttttagtcctccaatcattggatatgacaacttatgctttaactttcatttagtcactttttaaaagaacaaatgacctgaattctgacaccattaaaggatgcactctcgagacattatttattatttctgtgattgtttttaaacaatttgagtcgtttctttgtcaaggtgtaacaaagtaaagctgtgtaatatattacaaattaatagacagtttcacctggagatttgctatattttttgatgtgtgactatacatacacagatgtgtacacacacatatatatatacaaacatacagacagtatgtattttcataaacagaacaatgttcattcagagcatcagctagactatttcattcctgtacttataaatatatcctacagtgtagttttatttaaaattattattataataaacatttgtgaaagttccatattatttatttgagatgctatcgtttctgacttttatccactagtgtgtaccaaagcctttaattctacataaaatattttaaactatcatatcatgctagattatgtaaataataaactgattcaggtagtttataatggtaatatactctcagatatcccaatatccaacactgattgcatgcacattatgataaacaattatttattcattaggcaaataaatattaatataatttctaatcttgaaaagcattattttaaaaataaaactattcataaacataagttgcatgtgaattatgaataaattataatttatttttgtaacccacaccttattttccaggaacataaatgtgtaagacaaaagcacagtatcagtggaatttctttccttttttaaaaattgatgcttaactttgtaaaactatatcccacattctgaatcctggagtaacttcagctctttagttggagaagctattaaaacattaagaaaagtaatgttgaaaggattctttaatgaaacccttagtgaatatgacagtgagtagtgaaaaataagtttattaagctacttcgcatcctagagtttcatgaaaccctatgaagttttaaataaaacatttatttactattaagtgtagttagtttttaaaatgttaatgaataaagaacttactctctcagtttatcttttacaatctttgaccagttaaaggggaaacaatttttacttaataaaatatttagaagtctgtagagtaggaatctttgaattggatgaaatttagtatttatctaattcatatactcaaacagccatcagatataagattcaggtcttactttctaaattatattattgtatgtatatatgaaatttcaaaaacaatttggtctctttccacttgaaaatagtgcatgaagaaaataagtaattcaaatatatggatgtttagtccaaatttagaaatttccaccattttgtaaaattagttcattctacctgatgttaatatctcttttcttaaaaacttattcgagtatgtttttccttttatttttggtttatattataatacctatatacttatgaatctttgcaagtaaacacatagaatttaaactgaaaatgacaggagatagaaattgtactgtctatatattatgttagtgttttataaatagttgtgatgatgaagataatatgataataccagtgattcattagtctgaaaactagaaatgtcactttttcaggcatagcataagtcagatttagttgcagatttgtttggtatatgtaatttcatgtatacactgccctacattaatagaatggtactactatggtaaaaatattaaacatggtcatatttgaatttcaatctaatgactttttagaattcaactttatacagctaaatgcaaaactgaagatgattttaaagttggaacaattatagtttacatattatgctcatcatatgctcaccacaagaagagcatatagactcataattcagattttataatttcagcatagcagagtgagtatatgaattgatttggggatgacaaaaatccgattttgaatcccagcatatagcttaatattcaaccttctctatataattactctatatcagtttcaaatgggaaatataacagaatcttcctcataaggatttatagaaaaaaaatgagctgatgtatgtacagtctttaagatactagtataaatatatatatatatatatatatacaaacacatatgtaatataaatgtggttgtatgttaacttaattatccattaatgtgtagttttacaaacattattattacttctttttcttatgattttacaaccatgacatttcaacttttgatatgggcaactaacagtgacccatctgtcagtcagaagtcctcgtgggtccctctgtctgtctgctaaaagtcctcatgggtccgtctgtctgtgttctaaatgaagtacttcttttctggcctactgcaattttacaaattaccttgtagagattagatacatttgtcccctctagacagaggtaacacctgagtacagaccttaataaatggagtgtggtctgattgaatgaatatttccatgcaggcaaaaaaaaaaaaaaaaaaaaaaaaaaagtcctaccaacacaaatcaacagccttgatttttttttcctgctaaataagattcaaagatgtgaggaaaattaaattagaaaagttgtattgcttgtatttattgtcaatacaattatttttggagtcttttaaacaggaaaatttccttattaaatagcaagttatagccattgctcaagttttcaaaacatcattatttctgtttcctaattttttaaaataatcaaaacagattattgcaggtctttcatattttttaacaaatagccatctttggggagattatttatttcgtggaagcaatgagtagaatatgacatatgatggctatttgagtagaaaagctttgtgatggacattttgcatttttttaaactcctcagaaaatattttgaattcaattttctgtggagaaatcaatgaataataatttataacaactatgctatttgataactgtacaaggcctgaaaaaagtaagattagcaaacttttttgagatggcgtttgagatggccaatactaaagccatctcaaaagccattaagagcttgattattgctttatggtgtccatatatctttttaatgcatatattatccaatatacacacttaaaagttgaattttagtagacatggttttcctatagaacaatgttataagatggagataacctttccatttatccactttacccagtctagatgcatttagttcttggtccttgtgattttttttctaaatttattgagttacaattgaatcacaataaactgcaaatattaaaagtataccatttgatcagttgtgacttatgtatacagctgtgaaaccatcatcataatcaagaaaataaacattgccatctcacccaagagattccttatcatcttttttaattcattccttcttccatcctaaccccagacaatcatgaagtagctttttatcactgtagcttttctgggacttttacaaatggaattatactgggtgcactcattttaacttaactcgttttaactcgttttttttcccttgttattaatagtatgtcgaattatgttgattggtttttcaaatatttaaaaacaacttttcaatctttagaggtctatagactgtactggtgatgtagtatgttgtcttatttatattacatacaattcagttcttacttagtataatgatcttaagaattacccatgtttattgtatttaatattattattattattattattattattattttgctgagtaggattttaacacatagctacaccaaaattttttcatccattcaccctattagtgggcatttgtgttacttccaggttatggcatctataaagccactataaacattcatgtctacattttggtttgtttggttgaatacctagatgtggaatgcatgggttatttggtaggttcatgattaacattaaaaaaaaagaaaattatcaaactatttttcaaagtggcattaaccattttatactcccttcagcagtgtatgagagttccagtcattatgtctccttgccaacctctgatatgctcagtctttttcattttaggcattctaactagacgcattgtagtgttacattgtggttttaatttacgcttctcccttgactgatgatgtctgcattttgccaggttcttgtgggccatttatgcatattgttttgtgaggtgtcttttcaaattttttgcccatttaaaaaattgagctgtttgttttagtttaaggagttttaagagtatataaaactttatcctgcataaagattttttgtctgatatatgtttgcaaatattttttccagtatgtgacttgccttttttttgttttcttattggtgtctttccaagtgtaaatgcttttaattttgataaagtttaatttatcaattttgttgttatgtttgacactctttgtgttctaagaaacttttactccaagatcacaaagattttcttctatttttagtatcagaacgttgttgtttcaggatttgcacatgggtcatgacccattttgagttaatatttgtgtatgatgtaaggtaaaggtcaatgttcactgttttctacataatcatatccagttcattcagcacatttttctgaaacgactttcttttcatgatttatattgccttggtctttaaatcagaaattaattgactaccaattagtgcacctattactgaactctctaccttattatttattcattttttttactactaccataatatcttgattactgtagttttagaaaacattttaaaatcatgtgggtaaatactcctactttttattctttgtaaaacattgttgtagcaattttgggtcattttcatttctacacacatgttagaataagcttattaacttctacaagaagttgtggttttaatggggatttcatttaacctacagatcataatgaagacaattgaaatttttaaaaatcatggagttttctatttcctgtacataatataactccatttattttggtcttgtttaatttttttttacaatgttttctagttttcagggtaaatgtcttggacatcttttatttaattttttcctaagtatttttttttagtgctagagtaaatgaatttgtttctaatgtcatatttgaatattttcttcctaatatagaaaacacgattttttatattaaccttgtatcctatagccttgttaaattcatttattagttcagggtttttttttagtgtaaaaagttatataatctgaaagtagggaccattttgcaagttttctatctttatgctttttacttatttttcttacggcaatgaatgggatatacatcgaatataacttttatatatattgaatatatcttgtgtaagcaggtattcttacttttttttctgacctcatgtggaaaataattcagtctttcagcattaagtatgatgttggctgaaagttttcattggattctgtttatcagtttgaaatttactgtttgtcttagtttcctaaatatttgttatcaagaacatgtactaaattttataaaacgctttttctacacctattgaaatgatcatgcgggttttttttcctgttagtatgttgaattacattgattgatttttcaaatatttagaaataactttgcattccttaaaggtgtatagattccactgtagtcatgcagtatgttatcttattaatgtaacatataattccattttgtaaaatatctttaaaaagttttagtctatattaatgaggaatactagtctatgaatctctgtatttataatgtctttgtcaggttttgatagggttatactggcttcataaactcatctgtgcagtgatctctccttatctattttctgaaaactttcttatattactgatgttatttccttcttgaatactggatagaattaaccagtgaaaatttcagggccctgagttttctttttagaattgttttaacatattcaatttctttactcgatacaggttaattcggtttttctgtttcttcttgtgttgatcatgttaagttttatttttcaagaaatttttctagttcaactaagttgttggatttgttcatataaagctgtttgtagcatttcattattttaaattttaatatctttaaaatttctactgaaaactactttttattctttatattaataatttgtattttccccccagatcaataatttgaacaggtacttgaaacttttgttgatattctcaacaaaccagtttcaggctctgttaattgtcactcttaacagactcttttctatttcataattattttttcctatcatagatttgaaaaagaaaaattgtttctctagcctctcaaagtatagggttattacttcgagatttgcttttttcccagtataaaaatttaaaattacacatttctctctaaacacagttttagctgcgtaacacaattttactatgtcatttttgatggttatttagttaaaataattttcaatttctttttttattttatttccagcccactaattatacagtgatgtttaatatctagatacttgagcttttcttagagagcttattggtattggtgtctaattctgttgtcttctgagaataaatttggtatgatctcaatccatttagatttattgaggtttgatatatggtctaacatgtagtctatctcagttaatgtaataatgcccttaaaaagaaagtgcattgtgaaattgttcgatgcagacttttataaatgtcacttagatctttccttatatttcttatttttttgtctacttgttctatcagttgttgaggagtgttaaaattttctaccataattgtgtaattgggtatcttccttttcattttgccattttttgcggcatgtattgcattctcaggcatgtgcacatttatcattgttagatctttctgcttgtcactttttactgtgaaatagctctctatctccactagtattttttgccttgacgtctactttatgtgatattagaatggccactccttttcttgttaacctacaatttgaatgctatatatatttttatgtccatttattttcaaattatgtgtctgcatagttaaagtgtgcctgttagagtcaggttactggggggcctttttttatcccctctataaatttctgccttttaattggtgtcatgaaactaataacataatttacattaaatgttatgctaaatgtcattgatttgttattgatgtggctggatttaagtctgcatcttattatttgtattttctttgtactctctgttttctgattctttgttcttcctttcctgcctccagtctttttttttttttttggtgctgagggtttatttgaatattttgtagtattccattttgttttacttattggatttttgctatttttttatttaagaaatactttttataataattgtaaaatttgtaccaaaatgttatgatatatttcttgctaatattgtatcattgtatgtatgtaatgcagaaacatttcaatctccttgtcatactgatctttgtggtacagttgtcatacttattagacctgtatatattgaacataccaccaaatgttatttttgctttaaataatcgtatattttaaagcttttaagataaaaatataattttatatctaagtaaatatttgttatttctgtttatcttttatttctgaagctccatatttttctaggatacacttttccatcagtctaaaaagttttctttaacatttcttatacaacagatatgctactgatgtatctcttagttttcttatatgtgagaatgttgttcttttgccttcattacagaaggatattttcactgaccatagaattctgggttgacagttttattattttaggactgtaaaaatgttttgtctctggtccctgtgttttctgatgcacaactcacattcacattgttgttatcatgtacttgatgtaccactttagctgctattaagattttttttttctccgtgtttgcttttcagtagattgacttcagtagattgtcataattttgttttaatttattctgtttcgggtttattaagcatcttacatctgtaaatgaatatttttcaacaaatttaggaagccttcactctttaaagtttctactttgctgctaaatattcttatattttcattcttttcaatagtgtatcacttgcttcttggaggagagttataatagctgttttaaaaactcttcctgagagtttcaatgtccaccctatctcagggttggcatctgtttattgcctttgttgctattttttttgtttgtttgtttgtttgtttgctttctttttttttttttttttttttttttgagacggagtctcgctcttctgtcgcccaggctggagtgtagtggcgcgatctgggctcattgcaagctccgcctcccgggttcatgccattctcctgcctcagcctcctgagtagctgggactacaggcgcctgccaacacgcccggctaattttttgtatttttagtagagacggggtttcaccgtgttagccgggatggtcttggtctcctgacctcgtgatcctcccgcctcggcctcccaaagtgctgggattataggcgtgagccaccgtgcccggccaattgctgttgttgttaataaacaatctttattttagagtaggtgtaggttccaaagttgagcagaaaggacggggagttcccatatactatttgccccaccccaacatataaccttccctattatcaatatcccatatgagagtaggaatttattacaacagatgaaactacattgactcatcattatcacccaaagtctatagtttacatgttcactcttggtgttgtacattctaagagtgtagacaaatatgtaatgacatgtactcaccatattagtacctaaaagaataattttactgcactaaaaatctttctttctctacctaatcttcctttctctacctattcatccttctctccctgattaacccctggaagttgcgattttttttttttttactgcctctataattttgacttttccaggatgtattagttgcagtcatacagtatgcagccttttcagtttagcccctttcgccaagtaatatgcatttaaggttcttctatgtattctctttttttttttttttcttttttttttgagatggagtctggctctgtctcccaggctgagtgcagtggcgcaacctaggctcactgcaagctccgcctcccgggttcacaccattctcctgcctcagcctcccaaatagctgggactacaggcacccaccaccacgcctggctaattttttttgtgtttttagtgaagacaggttttcaccgtgttagccacgatggtcttgatctcctgacctcgtgatccacccgcctcagcccccaaagtgctgggattacaggcatgagccaccgcgcctggccctcttctatgtattttcatgactggtaggctcatttcttcttactgctgaataacattctactagccggatgtggtacatatttatcagtttacctactaaaagacatcttggttgcttctaaattttggaaactatgaataaagctactagataattatgtgcagttttcatgtaggcataaattttcaaatcatttggataaataccaagaagtgtgattgttgtatgaatatgctttgttttatgagaaactgccaaactgtcttgctaaataaacccttttggattcccgccagcaaggaacgagagtttgttttgcttcacagcttttccaggagtttttgtcatcactgttttgaatttgccccaaaacagccctattttcttttggtatgttgtggtttctcattgttgttttaatttgcaattctctaatgacatatgatgttgaacatattttcataggcttactttccatctgtatatcttccttgttgaggtgttcaacatatttgtgcatttttaagtcagattgttagcttttttattgttgaatattgaactttttgtatgttttggataacagtcctttatcaggtatgtcttttgcaaacacatgcacctgctgtgtggtgtattttctgattctcttgatattgtcttttcagaatagaagttttaaattttaataaagcctagattatcaataaattctttcatggaatatatctttggtgttgtgtctgaagagtcatcaccatacccaaggttatttaggttttctcctatattgtcttctaggagtttcatggttttgtgttttacatttatgaaccattatgacttaatttttctgaacaatttaaggtttgtatttagatatttttttgcatgtggctgtccagttgttccagcactattagttgaaaagattatcattgctccattgtatttcatttgctccttttgtcaaagatcagtttagtatatttatatggatctttttctaggatctttattctattccattgatctacttatcagttcttccaccaatactacgttgtattcattattgtaatattatattaagtcttaaagtcagataatgtcagttctctgtctttgttctttacctttaatattgagttaattgactattctggatgtttttcttcttatgaatttggaatatgtttggaaagatccacaaaataacatgctgggaaattaattgtgagtgtattgaatctatagatcaagttgaggagaactgacatcttgacagtattgagtcattctatccatgaacatagaatatttttatttttaaagttgttcgatatccttcatcagagttttgtagttttcttcatatagatcttatatttattttgttacatttatacatatgtatttcttttttgagtgctcatgtaaatagtgttgagtgataaatttcaaattcttcttaagaaaatgattgatgttttatataccttgtatacacaaccttgtaacaatcatttattatttccaatttttttgtcaattattttggattttttacctagacaattatgtaatctgtggaaaagtttaatttttctcttccccatctgaatacattttatttccttttcttgtcttactgcatcaactaggactcccagtatgatgtagaaatgcaatattaacagaggacatccttgccttctttctgatcagtttgagaaaatgtccttctgttcctagttttcagaacatgttttaaaatcatgaatgaatgctgtattttgtcaaatgctttcctgcatctatgatatgataatttatttattttttctttagcttgttgatggtgatactaatttattttcaaatattgaaacagcctggcatacctgggataaattccacttgactatggcatttacttattttatataccttgggattcaatttgataatattttgttaaggatttttgcatttatgttcatgagagatattggtctgtagtattattttcttttaatgttttcacctggttttgatattagggtgatgtgacctcataagatcagttagtaatattcctttcgcttctatattctgaaaaaggttgcagagaattggtatatctttttccttaaatgtttgatagacttcaacagtgaacccatcttgttctgatgctttctctttagaaagtttattaatttttgattcaatcttcttattggaccttttcagattttctaattctttatttatgagtttttacagattggatctaccaaggaattgacttatttcatctaatttatcaaatttgtgggcacagagtttttcataatattcttttatcatccttttaatgtccatgggatctgtggtgatatctcctctttttcctgccaataataatttgtaacttatctcttacttagttggcttagctagaggcttataaattttattaacattctgaaagaatcaggttttggtttggatgctaattctatggtgactttctgctgtctgttttattacttctggtgtaatttaattttcttttgttctgtttatttcagatttattttcctcttttttgtttagattcttaggatagaagcttagacagttgattttagatctttcctcttttctaatatattcattcaatgctatagatttccctcaaagaaaagttatattttgatttttattttgtttataatatttttaaattattcctgagattttgtcttcaatccatgtattagttagaagtatgtttttacatttccaattattttgggatttcccagttatctttctgttacggtttgagagcagttattggattatgtatatttgttcaaatttttaagagttttctttttggccatgaatgtagtatatcttgaggaatgtccatgtgaactttagaacgataagtaatctgctgttattggttataggagtatatatatgaaaattatcttttttgattaatagtgtttttagttcaactttgtccttactaatttctgcctgctgtatattttcatttctgttagaatggtgtttaccatttaaatgtaatagtggattcatctatttttccttccatatctattagattttgcttcatgtattttgttaggtgcatatgcattaaagatttatgtctttttggtgcactgacctttttacccttattatcatgtaatgcctcactttatctctaataattttccctgctccaaagtttgcactgtgtgaaattaatttagctactcctgttttctttttattagttttagaatgttatacctttatacccttccttttactttgtatgtgtttttatatttaaagtgtgtctcttgtagacaacatgtaattgagccttggtttttttttgatccactctgacaacctgtctttaatgagtgtatttaaatcattcatatttaaggcaattatatatatagttagaataatattcaccatatatgttattatgttccatttattaccctgggctcaggtgatccttccagtaccaccatgcctggctgattcttttctatttttttgtagagatagggtctcactgtgttgcccaggcttgtctcaaactcctgggttcaataaatccaccagccttggcctcccaaaatgctgggattaaatgcatgtgccgcctcacctggctaggtttttaaatatgaacttacacctattccaagtcaacttttaaataacactatactgatttatgagtaatgcaagcaagtatcttataaaatatttcaaattcctctctcctgccttttctgtcattgcaatcattcattttacttatacataagcatatatgcagtgaaatccattattgctattattattttgaaaaaactcataccttagatcaattaataataataaaaaatattttaccttcacttattcattctctgaatagtttatgtagatttaagcttctcacttatataatttttattatttctgaaaagcttattttaacattgcttgcaaggcaggcctactggcagcaaattcctcaatttttgtttgtctgagaaagtctatatttctccttcacttttgaagaatgatttctcagggtacagaattctagtttggtggtatttttctctcaacactatatatttcactttagtctctctttcttgtatgatttctgataagtcagatgtaattcttatcttcgcttgtataggtaagttggtttttttcccctctgggttcttttaatatttttaaatttatcttagattttctgatatttgaaaatgatattcccagatttttggtctgatatttgaatattatacttctggaattttggtttgatgtctgacattaatttgggcaaattctcagtcactattgcttcaaatgttggttctattcttttctctctttctccttgtattcctattgtgtgtaattacatattttgttgttgtcccaaagcttttagatatcctgtttagttttgtatttcccagctttttttctctttgcttttagttttggaagttttgattatcacctcctcaaactcagattctttccttagcagtgtctaatttactaatgagcccatcaaatgtatgcttcatttcaattatggtgttttttatctacagcatttatttttgattctttgttacagttatcatctttctgcttacattagccattctgttcctgcctgttgtctacttttttattaaagttcttagcacgggaatcatagtttgaaaaattcctagaatgataattccaacctttctgccatatctgactctggtttgatgcttattcagtctctttaaactgtagtttcttttccttgcagtatgccttttaattttgtgttgaaaggtgaacatgatgcactgggtaaaagaaactatgttttgtttttttttaataagcccttagctatgtgttggtaaggtgaaacgggaaggactcattctatgattaggtctcagattttggtgagcctgagccctggactgtgaattttatcagtgcttcacagtccctcaccccatgaccttaggtggaacaggatggctgaaggtggctggggttattttccttcttccacatggaagaccagagggagctgtagtagggaatttcctttctttcacactgaaggataatgctgcactgcagttaggcacaacatacattgttatatcatgcttttctttatgctttgtggatattgctcttgttacaaattgaaagtttgtggcaaccttgaatcaagcaagtctgttggcatcatttttttccagcagcatgtgctcacatcatgactgtgtcacatttcaataattctcacaatattttaaactttttattattattataagtatggtttatgagaccccaaaacaattacaactgtaacattaaagatccctgatcacagatcaccatagcagttataaaaatgaaaagatttgaaatgtcatgagaattaccaaaataagttacagagacatgaaatgagcatataccatcttatatataataataatgtacacaataagatggtaaacttaagtgataaatgttttgtgtgttctgactgctcaactggctcaactgaccagctattctcaaattctctcctccttgaggctctctattgcctgagacacagcaatattgaaattaggtcatttagtaaccccacaatgacctatgtgtgttcaagggaaaggaagagtcacaggttcaagtgttcaagagtcacttgagatcaaaagctagaaatgattaagcttagtgaggaaggaatgttgaaagctgagataagccaaaggccaggccttttgtgccctgtgaatccaagagttatgaatgcaaaggaaaatatttttaaagaaattaaaagtactactctagtgaacatatgaatggtaaggaagcaaaacagtcttattgctgatatggagaaagtttgagtagtctaatagaagatcaaaccagccacaacattctcttatgccgcagcttaatccagaacaaggccttaactctcttcaattctgtgaaagctcagagaagtgaggaagcttcagaagaaaagatcaaatctagcagaagccagttcatgatgtttaagaaaataagttgtcttcacaatataaagtgcaaagtgaaacagcaagtgctgatatagaagctgtagacaattatccagaagatctagctaaggtaaattgttgaaagctgctacactaaacaacagatttccaatgtaaacaaaacagccttctgttggaagaagataccatctaagatgttcctagagaacagaaatcaatgcctggctttaaagcttcaaaggacagcttcaaactctcttgttaggggataatgcagctggctactttaagttgaagccagtgctcacttaccattttaaaaatcctgggacccttaagaattatactaaatcaatcctgctgtactctataaatggaaccacaaagtctgaatggcagcacattcatttgcatcatggtttactgaatattttaagcctacagttgtgacctactgctgagaaaaaaaatgattcttttcaaaatattactgctcattgacaataaacctggtcacccaagatctctgatgtagatgtgtaaggagattaatgttgttttcatgcttgctaacacaacatcaatagcccatggatcaatagtaatttcaactttcaagccttcctatttaagaaatacttttcataatgctatggctgccatacatagtgattcctatgatgaatctggacacagtaaattagaaactttctagaaaagattcaccattccagatgtcaataagaacatttgtgattcataggaggagaagtttgtttcaaaatgagtttgaagcattcaagatgtcagtagggaagtcaatgccgatgcggcagaaatagcaagagaactagaattggaaatggagctcaaggatgtaactgaactgctgtaacctcatgataaaacttgaacagatgagttgcttcttatggataaggaaataaagtgtttttttctgagatggaatctacttctggtgaagaggttgtgaatattgttaaatgacatcaaaggatttagaatattatataaagttagttgataaagcagcaacagagtttgaaaatactccagttttggaagaagttctattgtgggtaaaatgctatcaaaaagcatcacatgctacagagaaatcttttatgaaaggaagagtcaattgatgtggcaaacttcatcattgccttattttaagaaattgatacagcaacctcaaacctcagcaaccaccaccctaagcagttatagacacagaggtgagaccctccaccagcaaaaatattacagtttgctgaaggttcaaataatcgttagtattttttagcagtaaagtatttttatattaagatacatacatttattttacactgaatgtttttgtacatttaatagacaacagaatagtgtaaacataacttttatatgtactgagaaactgaaaaaaatcttggcaatattttctttattgtggtggtctggaactgaacatgcgatatcttcaagttatgcttgtatttccctttctcaagttaggttaaactatgatgaaatcccagcaggttactctgagggcatgctttttttaagaagaacagaatgttctggtgttttcaacatgattccttttctcctcccacttccagaagcatgagaggaagtctttatgatattcacttacaggccttatagagctcttccaagtaaaactcacaaaagtgcaggattcccccatgactgagtctccttggtgtttttaactcttggaagttttaactgtcagaatattggtattttctctctcacataacataaattcagaagctattaggagacctcatataggtagttttaatttcagttcaattccttaagtttttcctcaattggtttgggtctgttacacatgcttaattctggagatagcctgaggtttttatggttcatacaaaaattaggcaattcccctcttcatttttctcatctcagattcccgtacactttctaacctgcatttttcccctagttcctatgtccaaaaacacagggtttctttcaaagttttaggcagacaacagttgttctgctcagctactggattccacccttgggacaaaaccttgataaaatatgaaacaaaaacaaaaacaaaacaaaataaaacacaagtaagttatacctgtaggctaatttctccaaattttgactctcttctataatctgcataatttacagaattgtcagctagttgtttattgcattttgttcagagtttatagttttcaacagcaagagagttgggctgtagcgggctcacacagtcataggagtattggctttcccaagatacgaacgtttgaaaagtgttcatttcttatgaaaaatgtataccagaggtgtccaatcgtttggctttcctgggccacattggaagagaagaattgtcttggggcacacataaaatacactaagactaatgaaagctagtattttaagaaagtttatgaatttgttttgggccacattcaaagcctcctgggcctcatgtggatgtggttcatgggttggacaagcttaatgtataccattaaagagataagcatggtacttgctcttgcctcatcttccaaatccctaaaattggtacaattctattatctcacagttaagtctgaatcctccttgctctgtcttctctgtggaacttctttaattaagaaagaaaacaaaataagctatcactatttaaaaaaattaacattatatgttttctatctggattttaaaatataaaggtgtgttcactaattatttctctaaatactatctttgtaaatgtgtagaaggtcttccataaaatatgaacttaagcagaatgttggatgtgagtaggcacagatgataacataatatttattgtttaattgagaaataaaagatgaaggtaagggtatcatacagtatctaacaagtacaggtatggttgaatgaaaaagattataataatgatgaaatgatgataatttaagtatttgcattttaaaatcacacacatggtagttaacaatgttgactctggagtcagacagccctggcttgaattttggttttggaaattaaccagctctgagattacagacaagatatccagtctccctgtttccttcctcatctgtaaaatggaataacagtgctatgcatcctatagagccgtttggaaattaaattaatgtttgtaaaatactttaatctgtgtgttgcagtattgagtgttttatgagtgtttgctttttttctttttaattttttttgagacagagtttcacttttgttgcccaggctggagtgcaatggcatgatcttggctcactgcaacctctgcctcccatgttcaagtgattctcctgcctcatagtccagagtatctgggattacaggcatgcaccaccatgcctggctaattttgtaattttagtagagacaaggttttaccacgttggcgaggctggtctcgaactcccgacctcaggcaatccatccacctcggcctcccaaagtgctgagattacagacatgagccaccgtgcctgacctgttggctttttttttcttttttttagaaacaacaacaacaacaacaaaacacccttttttcatttattattgctgaatttaagtgaaaaacacagatatggttaacataggagccacatttggctttgtaaaagactcaggtttatagtttattattttaaagaagccttcaatacctgaaggcaaaagcaaaatgccatttgaacgtggtactttatcatttactcttgttagagtagcatagagtcagcaaaagagaaaagcaaggaagctttgagtttacttatgggtgttaagtttaattcttgtctgtagatctttggttcgcatgtgcatttcgcaatgtagctgtggctttttaattattgaaaatattgtctggaatctgtttcatgattcattttttgtataatgtattaaaacaacaaaattactttctaaaatcagaaattaatgtacaattttaacagaaataaactgtggacaacaaacattaggtaaaaatgtggtagacttgatattcaaaaacaatccaattccaaattcagtgtgacacacaaattcaatgcacattagtgtgaaaatctcaggggataccacacacccaggtaaattagagttttgtaacaaaaataatataaagcctcactgcattcacaaacatgttgaatttctttaatatagaacaatatatgcagttgttctttctaaaaggaggttttatagttttcgtgaagaaatagtcaaatgtatttacatgatagtatcttttagcagtatttaaaatgtaagatgtttttatggcaataagttgagcatttgttagattttattagactattattaacaaattgagattccacataaaaatttttctcttttgatttttgtttttaggagatatttaagttccactactgaccacttgtataagagtagacagagccacaactttgatgtaattcttttttgagagttatccttagccaagactcaaaagcgcatctgtttttggctgttttatgtataattacattctttattgctgcacactgaatttgtctgtcaagtgtagtgaaaaacaacaaacaaaaatgtgccacattatttatgaccaagcttcagtgattctgtagggctgaatttgaaatggattttctcagttctcctttctagatgctactgtactttactatacaacagcctcaaggtatcctgttgccagtcagaccatctggaatcagatcagcaccattgtattgtgatatgcaaataaagtcccatattttgggactttattgaccttttgttataattttatatttagtaggatttgtggctaaaactgtttcaagaagctcaatgacgcatttaaggcaaatttagatttctgagctctatagagatccaaagtaccacagtttatataggatgctacttgtcctctaaaaggggcattgccctgtttaatttggatttctattttgctgattagtgcgtcattggattagctactgccggcaatgcacaatagtgtttcatacattttatgtttcctcttttacaaatattgtctctgtattgatgaccttagttttatttcccccttttaaggtctattattagcctgcagtactttattaactttttaaagaagaaatcatcttacatttgcattcttgtttgtctgtaattaccaggttgttttagaattacctattaatgtacagcttccttattggactacgtatttcttgagtgctagatttttatattccattactttaccattccaggagcaacatcaatcccaaagtttgtcacggtgtttatagttaataaagattagtaaatgcatgaatgaatgctttacccagaaatggctaaggctttgttagaagtatcagggagaataaagggttgggaaagctgtaagatagcatatgttattcaaaagctaggtgttcacttaagttgattattctctgttgaaataaaataaacattatgtgtcaattgttgtgcttaagtaagggatatagaaacatagttgtaataaaagacttgtgttacataataaagacataaaaatattcaaggggggaataataactaaacctagagtagtaaaaataaaaggacatttaaaggtgagaacacatgtaaaagatgaagatttgtaataagcccagcagttctgagaaatgtaatgtggtttgggggcatttgggaggagacctgggttagtgtgtaaaagcccatttgtcttttataccatactaaggtggttgaactttaaactataggctatgagaacattccttaagtagaggaattaaacattaaggttttttttagaattctttttgtgacagtgaaggagctagtttagaattggaagaatctgacttaaaaaaaagaaaacatgaattgttgaatattggttcaaataaaaggtacttagagtagagacaaggccatagcagaataaatggagaaaagggtcttattttcaatatggaatagaactggtaggtcttggggactgttaggatatgagaggtaatgggagggaggaacttaatatttttggcctttagcacataggtaacaaataggtgatatttactttttacatatacaaactgtttaaatttgagctgaatgtagaggactttaactatctttcatattacttatgaactatgtgttttaaaccatgctttaaactagtaaaaggctgtggaactatcctgagccaaagaatcatttcaccatcttttctatacttcttgagttttatagtaaacacacagttaatgtgagattgttattagctaaaagaagtgtaataagaatattgatatagggaggagccaagatggccaaatgggaacagctccagtctacagctcccagcgtgagcgatgcagaagacaggtgatttctgcatttccaactgaggtaccgggttcatctcactggggtgtgccagacagtgggtgcaggacagtgggtgcagtgcaccatgcataagccgaagcaaggcgaggcatcaccttacccgggaagcacaaggggtcagggaattccctttcctagtcaaagaaaggggtgacagatggcacctggaaaatcaggtcactcccaccctaatactgtgctttcccaatgggcttaaaaaatggcacaccaggagattatatcccgcacatggctcagagggtcctacgtgcccacggagtctcactgattgctagcacagcagtctgagatcaaactgcaaggtggcagcgaggctgggggaggggcacccgccattgccaagacttgattaggtaaacaaagcggccaggaagctcaaactgggtggagaccaccacagctcaaggaggcctgcctgcctctgtaggctccacctctgggggcagggcacagacaaacaaaaagacagcagtaacctctgcagacttaaatgtccctgtctgacagctttgaagagagtaatggttcacccagcacgcagcttgagatctgagaatgggcagactgcctcctcaagtgggtccctgacccccgagtagcctaactgggaggcatcccccagtaggggcagactgacacctcacagggccaggtactcctctgagacaaaacttccagaggaacaatcaggccgcagcatttgtggttcaccaatatccactgttctgcagcctctgctgctgatacccaggcaaacagtgtctggagtggacctctagcaaactccaacagacctgcagctgacggacctgtctgttagaaggaaaactaacaaacaggaaggacatccacaccaaaaacccatctgtacgtcaccatcatcaaagaccaaaggtagataaaaccacaaagatggggaaaaaacagagcagaaaaactggaaactctaaaaatcagaggacctctcctcctccaaaggaacacagctcctcaccagcaatggaaaaaagctggatggagaatgactttgacgagttgagagaagaaggcttcagacgatcaaactactccgagccacaggaggaagttcgaaccaatggcaaagaagttaaaaactttgaaaaaaaattagacgaatggataactagaataaccaatgcagagaagtccttaaaggacctgatggaactgaaaaccaaggcacgagaactacgtgatgaatgcagaatcctcagtagccgatgcgatcaactggaagaaagggtatcagtgatggaagatgaaatgaatgaaatgaagtgagaagagaagtttagagaaaaaagaataaaaagaaatgaacaaagcctccaagaaatatgggactatgtgaaaagaccaaatctacctctgactggtgtacctgaaagtgacggggagaatggaaccaagttggaaaacactctgcaggatattatccaggagaacttccccaatctagcaaggcagggccaacattcaaatttaggaaatacagagaacctcacaaagatagtccttgagaagagcaactccaagaaacataattgtcagattcaccaaagttgaaatgaaggaaaaaatgttaagggcagccagagagaaaggtcgggttacccacaaagggaagcccatcagattaacagctgatctctcggcagaaactctacaagccagaagagagtgggggccaatattcaacattcttaaagaaaagaattttcagcccaggatttcatttccagcgaatcaaagcttcataagtgaaggagaaataaaatactttacagacaagcaaatgctgagagattttgtcaccaccaggcctaccctacaagagctcctgaaggaagcactaaacatgtaaaggaaaaatcggtatcagccactgcaaaaacatgccaaattgtaaagaccatcaaggctaggaagaaactgcatcaactaatgagcaaaatagccagctgacatcataatggcaggatcaaattaacacataacgatattaactttgaatgtaaatgggctaaatgctccaattaaaagacacagactggcaaattggataaagagtcaagacccatcagtgtgctgtattcaggaaacccatctcacctgcagagatacacataggctcaaaataaaaggatggaggaagatctaccaagcaaatcgaaaacagaaaaaggcaggggttgcaatgctagtctctgataaaacagactttaaaccaacaaagatcaaaagagacaaagaaggccattacataatggtaaagggatcaattcaacaagaagagctaactatcctaagtatatatgcacccaatacaggagcacccagattcataaaggaagtccttagtgacctacaaagagacttagactcccacacaataataatgggagactttaacaccccactgtcaacattagacagatcaacgagacagaaggttaacaaggatacccaggaattgaactcagctctgcaccaagtggacctaatagacatctgcagaactctccaccccaaatcaacagcatatacattcttctcagcaccacaccacacctattccaaaattgaccacatatttggaagtaaagcactcctcagcaaatgtaaaagaacagaaattataccaaactgtctctcagaccacagtgcaatcaaactagaacccaggattaagaaactcactcaaaaccgctcaactacatggaaactgaacaacctgctcctgagtcactactgggtacataacgaaatgaaggcagaaataaagatattcttagaaaccaacaagaaaaaagacacaacataccagaatctctaggacatattcaaagcagtgtgtagagggaaatttatagcactaaaagcccacaagagaaagcaggaaagatccaaaattgacaccctaacatcacaattaaaagaactagagaagcaagagcaaacacattcaaaagctagcataaagcaagaaataactaagattagagcagaactgaaggaaatagagacacacaaaacccttcaaaaaatcagtgagtccaggagctggttttctgaaaagatcaacaaaatagatagactgctagcaagactaataaagaagaaaagagagaagaatagacgcaataaaaaatgataaaggggatatcaccaccgatcccacagaaatacaaactaccatcagaaaatactataaacacctctatgcaaataaactagaaaatctagaagaaatggataaattcctcgacacatacatcctcccaagaataaaccaggaagaagttgaatctctgaatagaccaataacaggctctgaaattaaggcaataatcaatagcttaacaaccaaaaaaagtccaggaccagatggattcacagccaaattctaccagaggtacaaggaggagctggtaccattccttctgaaactattccaatcaatagaaaaagagggaatcctccctaactcattttatgaggccagcatcatcctgataccaaagcctggcagagacacaatcaaaaatgagaattttagaccaatatccttgatgaacattgatgcaaaaatcctcaataaaatactggcaaactgaatccagcagcacataaaaaagcttatccaccatgatcaagtgggcttcatccctgggatgcaaggcttgttcaacagacgcaaatcaataaaggtaatccagcatataaacagaatcaaagacaaaaactacatgattatctcaatagatgctgaaaaggcctttgacaaaattcaacaacccttcatgctaaaaactctcaataaattaggtattgatgggtcatatctcaaaataataagagctatctatgacaaaccacagccaatatcatactgaatgggcaaaaactggaagcattctctttgaaaactggaacaagacagggatgccctctctcaccactcctattcaacatagcgttggaagttctgcctagggcaatcaggcaggagaaggaaataaagggtattcaattaggaaaagaggaagtcaaattgtccctgtttgcagatgacatgattgtatatccagaaaaccccatcgtctcagcccaaaatctccttaagctgataagcaacctcagcaaagtctcaggatacaaaatcaatgtgcaaaaatcacaaacattcttatacaccaataacagacagagagccaaatcatgagtgaattcccactcacaatttttacaaagagaataaaatacctaggaatccaacttacaagggatgtgaaggacctcttcaaggataactacaaaccactgctcaatgaaataaaagaggatacaaacaaatggaagaacattccatgctcatgggtaggaaaaatcaatatcgtgaaattggccatactgcccaaggtaatttacagattcaatgccgtccccattgggctaccaatgactttctacacagaattggaagaaaactactttaaagttcatatggaaccaaaaaagagcccgcatcaccaagtcaatcccaagccaaaataacaaagctggaggcatcccactacctgacttcaaactatactacaaggctacagtaaccaaaacaacatggtacttgtaccaaaatagagatatagaccaatggaacagaacagagccctcagaaataatgccgcatatctacagctatctgatctttgacaaacctgacaaaaacaagcaatggggaaaggattccctatttaataaatggtgctgggaaaactggctagccatatgtagaaagctgaaactggatcccttccttacaccttatacaaaaatcaattcaagatggattaaagacttaaacgttagacctaaaaccataaaaaccctagaagaaaacctaggcattaccattcaggacataggcacgggcaaggacttcatgtctaaaacaccaaaagcaatggcaacaaaagacaaaattgacaaatgggatctaattaaactaaagagcttctgcacagcaaaagaaactaccatcagagtgaacaggcaacctacagaatgggagaaaatttttgcaacctattcatctgacaaagggctaatatccagaatctacaatgaactcaaacaaatttacaagaaaaaaactaacaaccccatcaaaaagtgggcaaaggatatgaacagacacttctcaaaacaagacatttatgcagccaaaaaacacatgaaaaaatgttcataatcactggccatcagagaaatgcaaatcaaaaccacaatgagataccatctcacaccagttagaatggcaatcattaaaaaggtgctggagaggatgtggagaaataggaacacttttacactgttggtgggactgtaaactagttcaaccattgtggaagtcagtgtggcagttcctcagggatctagaactagaaataccatttgacccagtcatcccattagtgggtgtatacctaaaggattataaatcatgctgctataaagacacatgcacacgtatgtttattgcagcactattcaaaatagcaaagacttggaaccaacccaaatgtccaacaacgatagactggattaagaaaaatgtggcacatatacaccatggaatactatgcagccataaaaaaatgatgagttcatgtcctttgtagggacatggatgaagctggaaaccatcgttctcagcaaactgtcacaaggacaaaaaaccaaacactgcattttctcactcaggtgggaattgaataataagaacacatggacacaggaaggggaacgtcacacaccggggactgttgtggggtgggggtaggggggagggatagcattaggagatatacctaatgctaaatgaggagttagtgggtgcagcacaccaatatggcacacgtctacatacgtaacaaacctgcacgttgtgcacatgtaccctaaaacttaaagtataataataataaaattaaaaaaagaatattgatatattatttaaattattgtttaagtaagttttttaagaccttgatgtttttaaagcataaactactctatttctgtttatgatttgactgtatatagttcttagaagagtggcaggtatatagtgagtgccaactaagtattgtctattattataactatcagtattacttgttccttggataattgcaagagcctttaattgatctttctgcttttgccatttcatctgttctctaagcagcataactagaaaagcaagtctatttctttcaagtagcacctggccaaaagaacaaatgaatgaatgaagtgtgccacctctttgctcataatcttccagtggcatttcatttcatttgtaaagttattccaatagtctgcaggaccttatgtgacccataccacaccctctgcctctcctgttagagtttatcagtgtctcctctccatgttgctacctgtggattgttggttcacaaggtgtccctcacttgaatatattaattaatctcttgccttggggctgcttgtgccatggggcctggacattcattagtccttctgcctggaaagctctctcttagatatagcattttttatttcctcagttcctcaagtgtctctgtctcagtgtctcttaatcagtgaaactttccatgattgcactttataatagagtatcctactttctgacatatattcgctatcctttcttactttatgttctttacagcatttattactttctggcatactacattattcttattttgtttctccctctggaatataaactcctagaatgcaggagctttgtgctgtgtccacaaaatctaaaatagtacctgacatgtaatactagtattttttagtgaatgaataaatatattttctagcacttattaattcaaagggtataggtcatctatagcagacaaggaagtgggaagcaagatctgttacctttttataaccttttaattaattaaatttatttgatgcaatagagccatattggtagttatgctttagtaagaatccttgtttaacattgataacctagaaagtataagataaacgtacagttttttcatagtgttttatccaacttttggcattttctgtagtacttggtaagcagatgttgaattagaagtacattcaagtaatataagacactgctaattttctcaaagctggtttcttaagttagttttgggattctgcgcaatacaagggctgtgtgggaagtagttatgtctgtgattatatggtttccctcattttttcctttgaattatggttcaaatgcaatctctgatgcgtttttcaattacactaaaattctaagcattttggcaactttcctttaccacagaaaacagttgagaaaaaaaaatcattaactgtatggggtgtttgaaaaaaaaaaaaactggtgagagttaatgccttggcaaattcagaattctaagtagacaggaagcataggttttcattaatcttctgattatggtagttacttcttaagaattttatgccacatttaagatttaatttcagccttgtatatgcaatcaaaaactctgccaagagccaccagacttttcctgaaagctctaatatcaaatgtgagcagaagttttagggtctaggggctatcttatgaaaatattatagaatgttgttaggctatttattttacactggcacatacaaggctacttacctaaatgtatttttattttctttctattacatttttcctcatgtgtttgatttatagaataatgactttaagactcctgaaactggaacttatttttagaaaaattataactagaagtctgccacttaaaggtttgttttcctttaattgactccaaacactggaataaaatatcttatatttgtatatactttacagtttataaacagcttaaatctatattagttgtgtttagaatttctgaggaaatacaagtaatagtattcttcatttacaggtgttgaaataaagtctttcaatggtgaataaattattggccaggagatccatttattgatcatttattgagtactcactatgagaaggcctagtccaggaattgtgaaaatctctgacaacaaaactgaaaagtccctgctctcatgaagtttatattccagtgaatttaattgaacaaaatagattgactggttaagtaaggagcccaggctgtaaactatgccttttattgtcttgtagagatgctataccttcctgacatgtgacacacatactggttattcaaatccttaaacttactgtttggtcatccagatatacatataaaatatatatttcatatatatgatgtatttcatatatacattatatatatatttcatatatatgatgtatttcatatatacattatatatatttcatatatatgatgtatttcaggtattcattatatatatttcatatatatgatgtatttcaggtattcattatatatatttcatatatatgatgtatttcatgtattcattatatatgtttcatatatatgatgtatttaatatatatcatatatatttcatatatatgatgtatttaatatatatcatatatatttcacatatatgatctatttcatatatatgatgtatttcatatatatatatatttatatacatgataccaatttctatattaggtcttcaagtagatggtgtttccccaacttctcatattcttttgggttcactctgagttcccacagaaaacagaactctcttcaggtagtttcagaagtttgagcagggaggctgggaaatctagtaattagcattaccttcctgaggactaaaggggcaaggggcataaatactgatacagtgctcagtgaggagctgtagttctgtagaagtactttctagcagtgtcaatagtgataagggtcccagactactgtgacaagctaggaaagtatgggggtaaacaatgccaacctttttcccttcccaacttccaaactcctggtggtagcttccatgtctgtcccggaaaccaacctgcgggagagtctggtgatgcagactttaggggtcagattcttgcaggcacagagtaagagacagaaatgttagtaataggaattggggtgccaacagtgaataacaagtattcctttatttaaaagaaaaactgaccactttcacataaattatgccaggaaattctagataaatcctctaattttctcaggtgaaagttatttcaaatttcttatatcttcataattggaatatagcaggtagtaaagaaatatgtgtctcatatcttatttatttgtgtataataatctgaataaccagtctataagtatttgagaggaggtttattttcctcctattcatagtgtcggcatgatactttgcctccataaatatttattgaattaattgatagatgaatgattggtaaacagtcaaagacaaatattctcaaagtaacctggctgttaaaatccttgtacaagttagaattaaaagttataggagaaatataattactatcttatttataatatatcttagcctattaacttgttataatacacacaaaagaaaacattttgttttgggaacaaaatatagcttttcctaaaataacgaacctatattgttatacaacaatgttgtataacagattgtttttgccttcaaccaaaatacagtttttccaaaatatacccatatcagtagggaattctcgctttcaattttgagcaagccttccatcgtttactgttcaacagatattgcatgttcaaggcacaaactgactatattttgtagaggaaacaggttttcacatttgacaccaaaacataatttttgtttcagaatttgaaaaaataaaggtatgctgattatattatatatatgcatactttaaaagtcctctccgaattacatactttataaagtagccgatttagatttaaagagacttcaattctctaaagaatgaatgtatcattcattgttatagaggattgcaacagagcaaaaataagggactatttttaaaagacctgttatttctgggatagtaccactttatataaaattaaaataataaatatatagaaatgcaattaccaattatttatttttattctctgacaggtattttctctgagggacttagaacaggcaccaaaaaaaaaggatgatgctaaaaattgatatgtaaaaagctgatacccaaatatctggtattgtgttggaggaataaacgtgtcagttcaactgttaactctttatgaaatagtgaaaatagtctataatttctttcatattccaaaaataacaattactttaaaaataaatctaaaatttactgccaagttaaatactatgaaataaaatgtaaatgtcaaattctaatgctaactctgtgaaacaggcagtgaaagtactacctaatgcaaaggccatatttgaccttcacaatgatattaattatatgaacttgtcttttgagtctaagtgttaaaataaaagttaatcattatgtgtcaattcaaaataaaaatataaaaattaaaaagcacattaaaaataaatactgattaagaatttatcattaataattagcattcaaattgagatgtgctctaaatgtaaaatatacataatctttcaaaaacatggtaggaataataattaatagcttttatgttaaatacaaattgaaattatatgttttgaatatattatgtaaaatgtatgataaaagttaaagaaaaataaaaatattacatacttgtttccttacatatgaataatttttctcaaattgattttttaaaaagaggtctcaaaatgattttcattttgttttaaaatcctctttagtattttaaatgttaatttcaatcatattattttggacaacaaatgtttttaaaatgtatcagatgaatttattttgggagggggatcaaactgtggtaacattttaaatgttaatcatttaaagaaacattgatatgaagaatccttttgtaatctgagaatcatctctaagtattttttagaattgtaatttaaatttttacataagagtttccttaaatcaacaaggaactaaacatgtttagtcttgattcatgttaacataaactgataaaatgaaacaaagaatacaaaaaagtatataatctgagattatcagaacatatactttaatatatattttgagattaatatgagaatatgtactttttgaactatatatttgaactctgtctatatataatatatataattggaatatatataaatgtatacacacatagttcaaatattaggggtatgtttttctagcattttttgttttctattgtcgacatgaagtaggattacaatataactttattaagatggaattaatgatacaaacaaaattattttaatcttttactagcacaataaaatgtattttaaaaataagactattttatggatatttcttaaaaatttgtcctctttaaattctttatttgtagttggaatgatgcttttttacatttcttattttctattttcttcagtggactgaggggtgtctatgatgatgatactgtcaggtgtataacttctgattaccctgtattctagctacttgccaaattaaatcagccaatatttctacagcatctacttaataccggaccctggatatagtcagttattacttttgttataaataaacaaatatccattttgtattttttttcaattgaaatgacctttgctctgttacaaagacagaacttcagacgaataaaaaaaaaaccctagtattaactgatttatattagttttttagggctgccataataaattgccacagcctcagtggcttaaataacagaaacttattttttcaaagttctggaggctaccagtccaagatccaggtgttgacagagtcgttttcttctgtccgagcgttcttgccttggcttggaaatggttgtcttctccctgtgtctttacatggtctttcctctgtgtgtgtttgtgtcttactcctttcttaaaggagaccagtcagattcaatcaggaccatactagtggcttcgtttaaccttaattaccttcttaaagaccctgtctccaaatacagtcacaatgtgaggtattgggaattaggatttcaacatacaaattcgaggggacacaatttaacccttagcactcagtctgggcaagctcatcctgttcttgataaacaatgaaaaaaataggtataagattgctacagaaagaagtacggactgtcatatcaaagggaaattttctgccaattattattgattcttgaaacttggtttggtttcaatgatgcagtctgatagtctgcaggtataggagagatacagttcaaaaataaataaaagtcactgtcttaagtgataaactgaccttactccagaaatgactgttagttattattctacttcttagacttaagagattgaccctccaattttttccttttattgtagttctatttgagtaaatggctttgccatcctaccattgcttacttgagaaactgcagaattgctctacgttcctctgttaacactttgctccatatttccttatcattctcgtctcactccatcatcagcatccagtcagtttccaaatctcacagatatattttttactaatatatgtactgtctgttccatctattccattcctagtatggctgacttggcttcaattctcaacacttttattgaaatcaactcctaattgatttatctgactccaaactggctgcttccaaattatcctcccttttgctgtcaaagtgatttttttaaaatacaacattgatcaatctatttcatttatcagagtcctcaaatgacactcaaatgacatcttttgagtttcagttcacatgcaaggcttttcttaaattggttcctaacttaaaaataaatatctactctttaccctcactctttatcatcaccatgtaagtccttccctctaatgtgctgcactatatatacttctctctctctctctcgctctctctctttttggagaaagagtctcgctttgtcgagcaggctgagtgcagtggcagtggcgcgatcttggctcactgtaacctccacctcccgggttcaagcgattttcctgactcagcctcccaagtagctaggactacaagcatgcgccaccatgcccagctaactttcgtatttttttggtggagaatgggtttcaccatgttggtcaggctggctttgaagtcctgacctcaggtgatccacccacctcagcctcccgaagtgctagtattactggtgtgagccactacacctgacctacgtctctgaattcgtcatacagtttcatccctcaaaagttttgtttaagatgctttttatgtttaatgctattttacctccatccccttcattaggctaactcctatttgcttttaacaaatcatcaagatttttccaagaaccgtttcatgaaaatgttcattctcattgagatacctgtatgttgcaagttaatggagacaagaatgaactataagaaatttggaatctagatgattttatggaacaaaattatagctgtgtgatttactctagcatttagggagatgaaatatctaatcttagatatttctgtagttcaataaggtatatagtcaatcgttacagtgttattttccagatcttacaaaaaattgctctcttagaataaaaaactttaaatgttaatattaaaagtttagatcttgtgagattcagagtagaattgaaagccttgtggaattgtgcagtcaccagttgttagattaaaatttaagagagaagatcatttttcaattataattgagcactgattcaacatctgcattaactgttttagttatatctaaatttcttctgccttttttgtgatcctattaaggtccaaacacataatccatctacaagtcacattattcaatcagatggaattgaacaagacagtatcacaggctggtttttcattgctcattctctagaggcagctgctttgctgtgcaattcagtggatgctcaggctgagaactaacataaaccaatcactggttggcttcacataagacaaggagttcaatctgaaattcagatccttagcactaacacattgacatgtgaccttaagacattagaccaatattatttaccatacttttccaataaatgtgattctttacacacacacacacacacacacacacacacacacaatctaaatgtatctttacttgtgtatttcatagaccattatgtaattacattcatagcacagaaaattgaaacagctatgccttatatagactttatatatatatatataaaattatatatatgcaaaccaaagtaaaaaaatgaacaaaaaaagttagcatatgtgcattatttgtttggttttaaaagtatgctattacttatataatttgattttgataaaaaaaatagtgagatccttttgcaatgcatgtgacattcacaagaacatcatctgtgtagacagtttctatttagttttcttacattttatttgctttcactctatacccatactgtctataggcaaacactatagtataaacccagttgacacagctggagatcacaaagtaattgcatcaactgtaccttaatcttggttttgtggaccattaaaggaggaggatgccttgtatgctaaagatgccagttttactcaataactttaccttttttagctgtgaaaatttttatggcactattgaatctaaatatttatagttcattcaatctgtaacaatgagcttgtttacagagtgtcttaaaacatgtcatacgattaacataaaacactgtaaaatgccttctgggaaaaaataggactgtaagttttttattgaatttttccagtttctttctagtatattttatgactattaaacacctgaaataagaatttatattggaaaagttggcaggattccatttagtcaagttaggactgtaaatagaatagtaactacttaaaccagcattatttaaaaatatatattatttaaaagtactataaacatacatgatgcatatatagatatatatttatattatatataatatatatttatatacataagtatcatatatatatatatatatatatatatatacgatagcaacttttttgtttttcagcaatagattcacttgattcattataatttgtatataattaagtatggcattctagaatttctatccctggaaaggaacttagctattatctctcagtgcattcattttacaaatgataaattaagtgatgcacaattccaagtagttaatggcaaagctaggagaaaatttaggaagcagagtttgtaatcaaaaccctcagtgattccattactcagtcatattgtcatgtactcaatagtgcctccttatttgttttaaatattaataattttgtattcaaatttctctttgctttttttcatttataacaattcaggtatggttactcagtgttctgaattgttcagttggaatttgagaaatactatcagtatattttaagaacttgtatttatttgctatgtgtctatttaaaattagtaggtattaggcaatattagagatgctcctacttaaaaataatttacaaaaaaactcagaaactaattttattatcagttatttatattatttcatgacatgtaaaaataaatattttcaagtttagaagtactaataatacttatgatgattttaaatatggttgtctagatgaatattttctacttctgctttatgttatgcttcatcataaattaaagaagatgtttccttatttgggtgttactaggacatactagcatattacatgtatttttaaagcactatttgagagagtgaatgaattaaaaacgattaaataaaatgagtaaaaaacttgcataaatatagcacaatctgagatatcagtggagatatttctgaagtccacaaaatttatcgtgaagatgaataaacataatatttcatttatgtcagcacaatttttattagtggatgtgtgtttttgagtcatttttgtgatgtaatgttgctcatttttgtggtgataatgagacattctagatgaagattaacaggtagttggcaataagaaattaaatgtcaaaatatggatcaaaaggggatcagcttaaaacactaaaaagaagatttaaaatgagatgcccaaaaggagacttgaaaggctcaaacattaatctgatcatctaggatacctgtgtgactgtccaggaaagacctgaggagaaggccctgctatttcaaatatggttgactttgaggatctacctagcaaaaagtgagagctaagacagtgttgtaaactgtaggagtgttgaaagtgtttgccaaggcacacagaaagtctcttgggatactaattggttccattcaattccaagatttaaggaaatctcactctaatcatttactgatcattaacctaaccagagacctcattggccacaggcagcaaagactacttacttagagaattacttcaaggaaatcactaaatgaacaagcaccaacaactacaaagaaaaataacagtaggcctggcggaaggggaggatagtatctgatttcagggttgttatttaatatgttcaactttcaacaaaaatactttcaacatcatgagacaacaaaaaaaaatgaaaattaagtgccatacaaagtaaaaagcaaagcaaaacagttaagaggatctgtccttgaagaagcacagacattggacttccccaacaaagacattaaatgaacaattatggttatgttaaaaaaaacgtaaaaaacatgactaaataactaacagcaagtatgacaatgttgtcttaccaaatagaaagtagcaataaagatatatactactaaaaatactaaattgtagtactgtagttgaaaagtataacatacaatgaaaaattgactagagaagttcaacaaagaatttgagctgacaaaataaagaatcagtgtacttgaagacaaatcagttgatattatctacaatgagaataagggggaaaaatacattaaaaaaagttgacagcctcagtgcgggacaccaccgaacattccaaaataggcataataggagtcccagaaaaagtaagggcagaaaacatatttaacaaagtaatgactgaacacttctcaaagttgatgaaacaccttaatctacatggtcaagactctcaacaacttaatctgataaacttgtaaaatctacatccagatacatcataatcaaacatcaaaaaacaaagactatgagagaatcttcaaaacttcaagagtgaagtgactgataacatataaaggattctcatttagattaatagctgattccctaccatatactgtggagggcatgaagtagtagggtaacatattcatagttctggggggtagggggaaagacttcatctaaaaattttatagccagcaaaactgactctcaaatgcaaaggaaacagccaggtgcagtggcatgcacttatagacccagctaattaggaggctgaagtcggaagatagctggagtccaggatttcaataccagctttgggcaacataataagacaccactcttaaaacaaagaaaaattaagacattcccatatttaaaagaatgttcactaataaagttccctttcaagaaatataaagtctctcagattgaaatggaagattactggacactaactcaaataaagaacactggtacagttatctgggaaaggtaaatataaaagattgttcttgtttataatatttctctttttagattaaaaacaaaattgcataaaacaataattataaaactgtgttgataggctcatagtatgtaaagatgtaatttatacaacaataatagctacaaggtgggaggagggattagagctacataagataacatttttgtgtaggattgacatgaagttagtattaatttgaaaaaggttgtaataaagtaataataattctaagagtaaccactaacgaaacctataaggctatagtaaaaacataagataagtcaaattttaaaatagtaaatatctattcaactcaaaaaaggcagtaatggaagaataacgtaatattaatacaaaggcagaaaacgtagaaaacaaatagcaaaataataaataaaaacaactcaaatttccagaaactgatagataaactgcggcatgtccataaaagggaatgttacttgaaaagaggaatgaagtactaacacatggtacaacgtgcatcaatcttgaagacattatgataaatgaaagaagccaattgaaaaaggccacatgttgtatggttgaatttaggtgaaatgcccaatttttacaaggggccaggaaaagggaaggatagagagtgactgccactggttgcagggtaacttttaggtgtcatgaaatttttctgcaattagtagtgatggttggacaaggctgtggctgtactaagcccactgtattgtaaattttaaaagaatggattttatatgtgaattaattaaatccattataattgattttatatgtgaacggtgtgaacagctcaataactgttatttttaaagaagagaaatgtaagcatagaaatataaatttttgaaccttaaaaataaatcctaattctaagggtgagaatgaacacagttttagacagaagaaagaatgatacaaataaaaataagtgccaaccacaccacaggtagtaaccacagtatttactaagaaattgcctgctaggattaaatatcttaattcttattaaataacttatactcaattctaattaactaattaacttattcctttcttggcacttcttacactatttgattatatcttttcaagttattaattttattccaccttatgctagagtttaaatattcttaaccactaatttgcactctccaaagtgcaaagattatatcaaatatgtgtttctacacccacaggttcaatattttgtgtataatactttctcaataagtatctgttaataaaaaaatgaatattgtggtataaatgtagaatgaattatttccacattctttaatttttaaagatttttgtaatttaatttccatatttttatcaagttctaaataatccctgttgataagatgcaaagaaagctagcatgacttttaagttattaaatatggagtcgggagttttatgaatcagatttatgtgctcaaacttacagggaattgaatgctcaagttaaatggctatcagcccagatattactctaggcctgagtgtaattctgaattaatatggtcatgacacacagatttatattaaattagtttcatgatgaaataaagtccagatggaagtagccacattacatcaagagcagaatatttggatttttctcttgtttgcagtttccaaaagctcttgaaattaaaactctttaggtaattctattattaaatattactaatgttttgattttattgaaatcatacaaatttattgataggtgatgtttaatgtatccttaggaacacttttttttttcttaatataaatgcatcaaactcatgctttttttatttttaatctggatttttctggtgtcttcatttctcattcatctttgtaggtagggatttcttttgatactaatttttctaacagaacataatagttggatctatatatttactctaaaaatttcatataaatttcctaacaataattccttttaagcttattgagctttttacttatttagtattactattacattactgtctttatatatgcacagtttttaaaatgtgttgacttttaaaattagccttttgctcacattttatttgttctttaccatgcagtataaattaccagtggagtaaaattgagttttgaaaaatgaatgaatgtagtatagatttcctgagccagaagataacatagaataacagcctaatatttacagccgatttgtaaaataggtgtttctctttcaatcctataagactcttcttaacattgaaatataagtaggtcatttttcttcttcaaatatttaaaaataaaccacatctcgctttggtatatgtgtactttaatatgctaactgaatctgtgtctgtttgtttttgtttttttttttttcccagggggacattcagcagtttttgatcacaggtgatcccaaggcagcatatgactactgtgagcattatagtccagactgtgactcttcagcacccaaggctgctcaagctcaggaacctcagatagatgaggtgaggagcacaagaccagagaaggtcttcgtatttcagtgatatggacatcgcagtgcagtttttgaacttatacttatttattccattttaattaagctatgctttgtattttaattgtgttgtaatatttccaggaaaaagtgacttgaatatatttggtacttgttttcttgctgtttaagcatttgattacataaatttattagcaataatggtgcttcacttgtatactgtgtatatgcacatattccattttggagggggtgagaagaagataatatgtaatagcgatatttcgaccattagcatttaaataattaacagcctcaagatagaataacatattttctggtgtacatgccatctccctaggcctttggcaatgcatacaaatgagaaagtgacattagaactatcttaaagttttcaggctgtgttgaacaattagagggtttttaaaaaaaattttctcataggaaaatttaaaagcatgtgaaatggaaggaatttaagcctcagttgggagcaaaactatatttttggattttttttttttggattttgaatttttaagacttagagttttaaaaaggaagtagaaatttgaaaatatcaaaactgttctaaaaatgaatcaggtagtatttttcttcccttttaaatgtactattaggtgccaccatttgagttttactgtttacaatgggtcaaaatcttttatcttaattgttagttctgcatgtgaattcaggtcggatttttcactttcaatgctagaagtatgtttttgacactactttactttttaaggtttaataatgaattctgttgcactgatattttccatgacttaatgttagtttttgtttaaaaaacagggtaaaattttaagaacctaacaggaaggcaaatatgagagtgtaaagataaattactgggatattttatttacctgtttcacagttatcatgtacttcattctttttattctctcatgattcaccaaatatgttttctgtgaattctgaagtgatagataaaataattatcaggtttagtgtttttatatctaagaggttatgtgctgacttaatattaaaatttatagcatttactgtatattttcaaggttgatgagatctgttttgctcctttataaagaaagataaggcatattattctttttagcaacagatatggctctgatttttggaagaagggaggtttgcattcttaatatatcactttgaggtgttttgttcccatgttgtaatgctattatgtcaggtaagctgttattttatcaaggtaatttgtatccatcttcttaagttcatttaaaaatgaacttgccatttactattttagttgttgacatgtatatttaacattctgttgagatgtcaaacttggttttactagaagcatttgatgagaaaaacagcacattgttacagtagaaactgcatgacaatcttgttgggtaatgcaataatatatagcatttttacctttttttagattgagtaagtcataatgaaaaagttttttctttaagaaagaattagctttcccttttttctctaactctaaattatgttgatccttcaataataagataagcatctataccagcatcaaaaactacttaattgaattagtaagtagtgcttatattaattttaaactatatctattaatatgtcattatatgataacgcatataaataattcatcttcagaagttctacctatataaattaataatgcaatgttggttgccaatgaataaagaacataaagtgcaatatggagcatcagccatacatgtactttatattacttacttgttcactaataaacttctggcattgcatgtttattattctaatttggattaataaatatgtcaatttattttataagtcaaccgatatgcttttttcagcttataattttgtctacttagtatcctctaagtagcatatcctaatctattcttaagattcacattgttatatgcttgacataactttacaaccatcaccatggagaaagagatctataatgtagacagattttaatttaatcataatatcatcacattttaattttatttgaacctacacagtgccatttaaataggtgacaagctaatattaaaattatgatggagttgggattttcttatcaagtgaaattatcttcctatcttataaaaaattagatgttaaatctatatgattccttttgatattctttcttaaaaaaggatgaaaacagaaaatgaagtgacaatcttttataaaggaatttacaaaacaattagcttttcaaaatatattatcttttcacttaatatgtatcatacattcattagatgcacaggtttttactgatgtcaccagttttcttacaaattatgtaagaacagacattatgacatttctggaagatcctttctcctaacctactctaatttctgttagaataccgacaaagttgaaattattccattactgcctgtctttttgcatatatttgtctgattgattataactagttcttttttctctacttgtctcaagccatccttagaattccataatgaggggagagaattatctccaaaaatatgttatgaggctttacgtagcaatgtatatatattgcgaatatactaagcaatgtcttgagtatattcatgaccaccacacggaggaagctgtgcagataaaggagaaccaggagtgaataagctctaaaagaaagatgtgccggctgggcgcagtgactcacgcctgtaatcccaacaatttgggaggccgaagcgggcggatcacctgaggtcaggagttcaagagcagcctggccaacttggtgaaaccctctctctactaaaaatgtttaaaaaattagccgggcatggtgtcaggcgcctgtaatcctagctactcaggaggctgaagcaagagaatcgcttgaacccgggaggtggaggttgcagtgagccgagatcatgccacttgcactccagcctgggcgacagagcgcgactccatctcaaaaacaaaacaaaacaaaacaaaaaacaaacaaacaaaaaacagaaagatgtgctgtagtgtctagggcagttaacatgttatttcctccattatttcaaaaccagcctggttagtcaacatttggagagtttaaataaaggacagaattatgaaagttagaagataatttgtcctataagagaaaaaatgatataaaattgactactttggtacaggtctgtatatatccttgaatagcagatttcaattaaaatacgtttaagttgtccaggtttaaaattggccctttatgcatttacttattgtttttgtaattcataactcctcttaagctactagagcttattattagaaggcactgtgatcacaattttctaaaacatttgtggtcaacagttcttttgctggaagattaaaagggaatggttaaaatgcaaagagagatccagttgagacataattggaatcgtatcaaatacactacttaaggaattatgtgtagattgcccctggaaaatatatattaagtatacatattatatgtattatcatatatgtttgccctaggcaattatatataaattgccccggcatgcatgcatatatatatatatatatatatatatatatatatatatatatatatattagagttttaacttgttgagtttactgctttttatgctacatatgacttagtgtatttagttatttttattaaaaactgaatttaacttatgtttaataatatctatatcttgattgaaaattaaaatttttataaagatattgagctttggatttgagcacactattttgctcattatttaatatgtacaattgtcttttaactccctctattaagaaacatatctctccttaattaaaatcttttaatacagaagaaattagtataaaatactatttccagtgtgaatttattataagtattttaagaaagctaagtgttatgccttttttaatagagaaaaaggcagtgattttaaatattaaaattatgtattaattataagcacatctaattttgaatcttttaatgtctcacaaggattttgtgctctttttgatcttaggaaagtctaaaggaaattaggaatttcttaatacattttagattttattttcccattggttacagtattttaatacagtatatacttatttcatattctttgtattccctttccctcctcccctctttcccgtctctcaatagatatgaaaatcctttcatacttaggaagactactctctacatttttatttttagatatgtagcttaatttaaaattcccattgaaattactgtagcgctcttatagagaaacattgcatagcaatttttacaaatcaaaattaatgaatatttgacatctatgtccaagtacataattactgtgtttcaattaacattccataattaagagtttgaattattattccaaattttttgttttctcgtgatactaactactattctgctcataggaaatgtgctttgtcactcctatgttattatactctgtataagacagtataatacttctatgtaatacaaaaataactcatcaataacattaatttcttatctcttaacatttacactatgtaaaagttaagatggttctcactttgtgaatagtattttgccactaacacaattgcctgatattttttcctttgcaatgtagtatgcaccagaggatataatcgaatatgactatgagtatggggaagcagagtataaagaggctgaaagtgtaacagagggacccactgtaactgaggagacaatagcacagacggaggtaaaaacaaagcagtgcctgtgtatgtggtgtcctgctgttcgtcatcctgtggttccttatgttgactgttcctcaaacttaccataaacctttcattcatcttatttctctgaaccaataactgtgatttttatttgacagtagccgttttgaagaatgatgtccatttcacttttgcttagccttcctttcatctgtgctctatatttccctcctcgtttatttatgttttccattccatctttcaccacattttacagaaaaagaaatccaatttcaaaaagaagatgaggacagtggctactaaatcaaaggaaaaatccaaaaagtttacaccccccaaatctgaaaaattttcatccaagaagaagaaaagttatcaagcatcagcaaaagccaaactaggggtaaaggtagcgaagaaaaagcaatcaagatctatcctagataagctggaagatctctgatcatgaatcatagtcttaacccaactagataaatactcacttggctaatactataacccaattaaatcatgatttccatacatttgggatcaccttacatgtttactaattctcttctgaatttaccattaggcaaacatcgttgatgattttcaagaatacaactatggaacaatggaaagttaccagacagaagctcctaggcatgtttctgggacaaatgaggtaatacgtatagacagtattaaatcacagtcccactttttaaatatgtaatttattttgatatacttcactctggaagaatctataatttctcaaacatctgatgtttttattcttttactaaagtaagagaaacaatagcaatggttcactattactaaaagcagttcatctgaaatcaatgccaattcaggttttgcgtgactctttgcttcatgcagatgctaaattgatcaaactgaattggccgctattattttcttaattgctcctggaattgagcaagcttttcaacatgttgtgactaagggtattcacaacatgtttcttctgtgagaagaatcctctaaagtgaaaattgtatcatcgaaggatacaattagaattttactccctctgatgaataatcatgcattttatgacagcaagcattttgagaaaatgtagtcttagtggacttaaataactatttacattttcaaacttgttaggaatgtaatattaattcttattaaactaatatatcttaatctttccattattttctatgaaaatatttaagtacatgtaggtaaaaattaatcttcctgaaattcatatttcacatgcattctgatcatgaagaatacaacatacaattcagtttaactttgttaaatatctggtatacattttggtataattttatcaggaaatgaatataagaaatgtaatttagttttaagaaaatttatgtaaaatgtctctcaattaggcaaatagatttatgtgaaaacacaaaattgtgaataataaatgtttagggtgagaatggattttaactttcttttagatgaaattaataattttcaaaaaaaatgagtattttgattcaagatgtccatttacctaaccaaattcatccagcattttagttcagagctatgattatagcaatattctcaccatagatattatgcagtctctgtagacagcatatactccttatctaagaatacaaaaaaaattacggttattggacatttaattttagtgaaaaattactcatcatttatctacatattttcattcacaagattgtgtaatactattatctaatattactctatcatctagatttactatggaatagaaaatgagttacttaaaaatgaaatttacaaattggcaagataagcctaggcaatacaataagatcctgtctttacaaataaatcaatcaatgaataagctgggcatgctggtgcatgcctgtagtcccagctacacaggaggctgaggcaggatgatcatgtaagcccaggagtcccaggctgcagtgaggtatgattgtaccactcaactccagcctgggtgacagattgagaccccatctcaaaaaataaaaagtagcaagataagttatttaatttgagcctcatcatgatcataataaaaccaaatattcacatgataagtcggattcaggtttattctactagtaaggaattatgagaaaaaaaggtatcagtttttgtctatgtctctgaggaagtattattgacataattcttacttgtaagtattaattaatatttattccttactcttcttgagaattgtacagtgatattttatatttcattgtcctaaatgttgctagctatcatttattttatttgctttaaagaactctttggtgtaatactacttccctacatatgagatactctacataatcattgtaatgatacatctctatttatactgatattggcatattattattttatttatgggatgagactcaaacttatatggcttatccttttagcaaatgtatttcataatgatgttctgtaagatttaaaaattaggcaaagctgccagggtgtggaggctcgcacatgtaatcccaacactttgggagaccaaggcgggtggatcacctcaggtcgggagttcgagaccagcctgatcaacatggagaaaacccgtctctaccaaatatacaaaattacccaggcatggtggtgcatgcctgtaatcctagctactcgggaggctgaggcaggagaatcacttgaacccaggaggtggaggttgctgtgaaccaagattgcgcccttgcacaacaagagtgaaactccatccatctcaaaaaaaaaaaagaaagaaaaaaacattaagcaaagctttaactccataccttttttattgttcaaatcttaaactgtgaagtaaatatgaaattgactaacatgttttttccaatggaacaagcaaatacacatgttaattccatgtgaatatttgcagtttattggagaaagtgctttgaaagcaatatctctttgtacatagcaatgtacaaatatatttctttcaatgatactgaaagcctactttccaggtgtttagagttgcttgagtagtaacaaaatcgcatcccatcacacgctatcaaattgtaatttaaatgcttaccttgctttactaacaataaacttcatgttcctcaattccttgcaatttaaattaatagccaaatccagttgaagaaatatttactgaagaatatctaacgggagaggattatgattcccagaggaaaaattctgaggatacactatatgaaaacaaagaaatagacggcagggattctgatcttctggtagatggagatttaggcgaatatgatttttatgaatataaagaatatgaagataaaccaacaagcccccctaatgaagaatttggtccaggtgtaccagcagaaactgatattacagaaacaagcgtaagttgatactatgcactgtgtcattgtatgtcttatttatgggatatttttatgtccatgtccatcttaatgtcttttcaggtttaaaatgcaggttgaatttttatgtaaattatgaatgcctattaccactaggacaccttgttagattctttcacatgggaatcttcagcagttgtatctttggccatacttttggagtcattatttgaaagtaaaatcttgaatagaattgcatcagaaattttgtcattgataagattaaaccatagttgtttttattccaagtagcaagtctgattttttatttctgatttttagactattttttaaatttaatttgatgacatttcttaatgcctgggaataataactgacatctatagatgtcattataaaacatgtttataagaggcaatcgttcaatctcattttaagattcagtattaatgcttcttatgcctctcttttaatttttgccatatttaagccttcaataggtcttcatatttaaaaatatattttaataggttgttttaaatgtgtttagtttactaaattatctttttaaaaacaaatggccggccgggtgctttggttcacgcctgtaatcctagcactttgggaggcagaggcgggcggattacctgagctcaggcattctaaaccagcttgggcaacacggcgaaaaccgatctctactaaaaatacaaaaaaaaaaaaaattagctaggtgtggtggcgggcgcctgtagtctcagctactcgggaggctgaggcaggagaatggcgtgaacccggcaggcgagcttgcagtgagcggagatcgagccactgcactctaacctgggcaacagagggagactccgtcttcaaaaaagaaagaaagaaaaaaaaaaagaagaaaagaaagaaagaaagaaatggtcttacagacatttaggctgttttgaatatttcattcaacagataaatggccatggtgcatatggagagaaaggacagaaaggagaaccagcagtggttgagcctgtaagtagtagtgtgaatacactttaaaggttggtaaaattgcttatgagccacgattatgttaaattattatgtatgttcgtgttttaccaatgataatcttgatgtccagatgtttgcaattcaccacaaataagtaagttaataaggtcttgtctagaaaggagaatttcaataaaacaaaacattatagagctgcagaaattcagaatttgaaagtagctgaaatttgtcttgtctaattctctcattttaaaactaaagaaccagagatctaaaggacttaagtaattttcctgaggtatcaaatgtttgatcaatgagatataataggacttttagctttcctactttccaatccaatgatatttttctctaatctctatgacttcacattatttgaaatatataacatatatttgttacatatccaaattgtgtcatatgatattttttacttccttttcatctacagaagaatctctaattcactccaaattaatcttttaaaatttatatcaatattattactaataatattgctaagaaacagattcttacttggaagcggttttgccattgtttcctgctaataaacaattcagaaaaactaatgtattagaactgaaggtagaacaacacgaaaatcatttcagaaattgtaaggacataaaaatttcaaaaaaaaacagagaaagaaaaatgataaagaataaaaagatagttgtagatatgcagcgttatttctgagggctctgttctgttccattgacagaacagagccctcagaaataacgctgcatatctacaactatctgacctttgacaaacctgacaaaaacaagcaatggggaaaggattccctatttaataaatggtgctgggaaaactggctagccatatatagaaagctgaaactggatcccttccttacaccttatacaaaaatcaattcaagatggattaaagacttaaacgttagacctaaaaccataaaaaccctagaagaaaacctaggcattaccattcaggacataggcatgggcaaggacttcatgtctaaaacaccaaaagcaatggcaacaaaagacaaaattgacaaatgggatctaattaaactaaagagcttctgcacagcaaaagaaactaccatcagagtgaacaggcaacctacaaaatgggagaaaattttcgcaacctactcatctgacaaagggctaatatccagaatctacaatgaactcaaacaaatttacaagaaaaaaacaaacaaccccatcaaaaagtgggcgaaggacatgaacagacacttctcaaaagaagacatctatgcagccaaaaaacacatgaaaaaatgctcatcatcactggccatcagagaaatgcaaatcaaaaccacaatgagataccatctcacaccagttagaatggcaatcattaaaaagtcaggaaacaacaggtgctggagaggatgtggagaaataggaacacttttacactgttggtgggactgtaaactatttcaaccattgtggaagtcagtgtggcaattcctcagggatctaaaactagaaataccatttgacccacccatcccattactgagtatatacccaaaggactataaatcatgctgctataaagatacatgcacatgtatgtttattgcggcattattcacaatagcaaagacttggaaccaacccaaatgtccaacaaggatagactggattaagaaaatgtggcacatatacaccatggaatactatgcagccataaaaaatgatgagttcatgtcctttgtagggacatggatgaaattggaaaccatcattctcggtaaactatcacaagaacaaaaaaccaaacactgcgtattctcactcataggtgggaattgaacaatgagatcacatggacacaggaaggggaacatcacactctggggactgttgtggggtggggggaggggggagggatagcattgggagatatacctaatgctagatgacgagttagtggatgcagcacaccaacatggcacatgtatacatatgtaactaacctgcacattgtgcacatgtaccctaaaacttaaagtataataataaaaaaaaggaataaaaagagacaattttaaggaccttgttggccatctactcattactccaaaatcatgcaacatgctcacaaaaagtgttgaaaatatttttttcagaatgaatcagtccttattataaaaagttttaaccccctttttaaatgacattatagcttttcagcagtccaaagatggagtggaatcataaatgttttagaactgagttcttattctgaatagctctttattcctttgcttataaagagcttatatcatatttattcattttccttttgcctggatttttctgtaatttccctgaattaaagtgcttattttccattctttcatttacacagcaaatatttactaagtttctgttttatgccaggtattattctgtgggctacaaacaaacgaaaaacaaaaaataaaaaaccttggtagattgttttgtctgtactcttcctgggagcacttagcatattctcctttgtaatattattcatctaaatattcatttccactccacttaattcacacattctctgagggcacagtctatatcttctataattttgaatttctttccttccctgtgcaaaaacatttgtaattaatttaagtggtatgaatagataattcactatttaatatgcaatgatatagtgttctcttatattcatgtaattaagaggttgggggttatatttccctggtagagatgttctcttttcctgttatagggtatgcttgtcgaaggaccaccaggaccagcaggacctgcagtatgtaaatgttttaagattatttttgtctatttaaagtaatcatatataagatttctattaattactgaatgagaacattttagactaattagaatattgaattatagagaaaaacatttgttcagaggagctggtgcctttgaactgccttctgatttgtctatccaagtaatactctttaaattttgttttaaatatttttgtggcttagatacctctgcatcttctaaactcattttcgtctttctactgaaatatatgaaagtaaagaaaagtcatccttattttcattgcagaggtataattgtatcttaacaaatggaatctcaacttctaggtagactgcagctgccttatctatacctctgtgtggagtaattatcagattccattgtggtatcctgataaggctgatgttactcagtgtgtttattctcaggtgattgcactgataagaccttgtaataaatcctctgtcttttgtggaattaattaaactcttgtcgtctaaaataatatatgatactgatgcatttaaatatgtttacccataaaaggaaacataattgcctctaacctaaatgatttctacatgttcaacttggctatcaaatttttgagatctaattttatgagtgttccatttcttcagttagaactgggaccaaatatgaccttagagactttacattggcatattcttctttcctgtttttccttgaaatgtttgcctccaccctgagagcagctgaactagctacaaattggtttctatatgttgtcttttcacaggaagataaatagggcaactgtttagaactctagtgtatatttataaaatataaacgaactcttcgataggactagagtgaattcatctaaatattaatgagattaggaatctgattaagatatggtgtgtttctctatagggtattatgggtcctccaggtctacaaggccccactggaccccctggtgaccctggcgatagggtaagtgaatggacatgatatctcattacaaatgcatgtcatacagacttaaataattaaaatgtattctacaagtataacatgttatcttactgcgtgtgggaggggtaaaggcagcatgaattcagtgctgcacaacattttagttaacattttaaatattattttgaagtgaggaaaacaatgtgcatttatctatggcataattagtaagaaaacttttatttcacccaacatccatattgatatgaactcattacattagggattctggtcttcaaatttgaattccagtcatattttccagatatttccatttatatttatttggatgctgacagaataagttaataaatctaaattctactttgaggatcaaaccctgggttacatgctgaaatatctcatttgtgttaagtctctccaaactcttctcataaaataaccttcccttttttccccacatccttgagtagccaataactttgtactttctttcttttgttctttagaggatcagagatgcaaataacttatacttttcatataattacaatttaaataatgtaaaaactttttaatttaaatttaatgaaggaagatttttaactatttcagaaattctggactgagtaacagctatttaaggtcagaggacataagaagtgtattatgcaaacattatgaaactttttatttaaaataaagttcataaagttagttcttacatgctctgcttacttaatttgatatgtccagtttcttggagacatttatgtgtaatagtcattttagttaatatttttaaatcccaccatattttcataagacctttttatattctgtaatttactcaccttaaactctatatcaggtgagaaattcatctctttacactgtgccttataaatagagacatataaatgatctaaaaatgtaggaaatattttagtaataggaaattataccattcaagctagatttgttaggattttaaaaaattatttctttatagaagccattatttgaacttactttaacagttccttgaaacttgtacagaatctattgaaataatattctaaataaaatataattttgccaatctagaatcaatgttaacactttcctaggagttaactttttatgagaaattcacatttgaaaagtgctgctgcatttttttatatattggttgggcgctttgagttatagcattttgtatctagttatttattaatttttgaatttacttgcttccctgacaagtatgacatggctatgtagaaatgtctccttatattgaaagcttatggacatataccttatatctatgagtcacatacttatcaacagatgtatatattacatatttaatattttctatattcatatccatatcttggatttctggacagcatagtcacacctaaacttctaaatgtacatgtatgtatgcatgcacacatacatacactgagtatatttaatcagtaaacatttaaaataaattagtgattatgattaacattaacatgctaaaattagtcattatctatgttaaaaagtatctctcttgaagatagtatctattgtctattaaaatatagtatgtagttaagtattctacaaaataaatactatttatgtatctgttaaagaatactaaaatataccttaaacctagtaatttttaaataaaactttcattatttacttaaatctgtttttatctaactgtaagaaccaggcttgtactacttgtttttctcacattactttcccttaaaatatatgtgaactcttcatcttacacagttttaggctgtgaacaaagtttgagcaaaatttatagcttaattggattatatattaataaccgaacattattaaaatcatctaaaactagtgcaacagaatagaattctgtctaggtatacttactaaaaacagactaaataaggtggaaagggcaaatgcaaattagataaagtagacttacgttataagttattctagttctagtaaatattattttgatatttatttattttggttatttcatttatttttctagggccccccaggacgtcctggcttaccaggggctgatggtctacctggtcctcctggtactatgttgatgttaccggtatgttcttttttatgttatagagatgacttgatatcttgtcatcttttttctgaagtttattgttgaaccatattgaagagcaatcaactaaaaaccattgtacaaggtagaaatacttgaaattaagcagcatttggaaattcagggaaattttacaaaacaaaattatggtatcaatctctgcattaaaactaagaattcattatttgattacactcttagcaacagagtttttgacaatatttccaattgtggtttatcctgagtcacagtattaacatgtttttcatatgttatttaacataacattaatatactatttaccatctattatctatatagtcataaatagtatttatttgtagtgttattattcattgctcaaaaattatttgctttactgtaagattcctttgtaaagtttttgttgccctggtgttttgggaaaaaaatgcatattttatttatcaatttcaatgtaatgaacaaagtttcaagaaataattacttagaatgaaaaattgactcctactgcattttgagttaaaatggagcaaattttatagaggaatattacagaagatctgttttataacataagtacttaagaatgggtgaacaaaataaataaatcacaaggaaaatttcctgtgtattaatggatattccaaaaattttgacaaacaaaatagagattgagctgtaactgtcactgaacttggtatatttggaattttatacaaatgaatcaataaaatgggtaacatttgtgcttaaaaaaaagtcacaatggtttattccagaggtatagaaattatagcatttaaaattgaaacagagtttctagtttcttcttctacaaatggtaacctgtagtgtaaagaacttccagaagaaatggaaagagcaaaaacaatacaaactagatctcatgattcattacggagttactttgtaattttgtaaaatcccaccattttaataagtggtttttatctaatgatcaaagcacgtaattcaacatgtttgacaaagctaattttgaatttcttaatgttatctcttccaagttccgttatggtggtgatggttccaaaggaccaaccatctctgctcaggaagctcaggctcaagctattcttcagcaggctcgggtaagacaggataaacttgcattcccacaagatgactgactctgtatcaagtatatatgtgtgtacatacggaagatgctaccattattaatagaatatttacttccgaatactgtgttaaacttacttggaaaactgctaaaattttatttgtttttctagtagtaatgtttattaattgaaaattatagttaggtagttgaccaatgcaatgttgccattatataattctagcagtttcccaccataacacgcaagatttctatttttttttcccaagagtattgatatatttacacctagtgcaccttatctttcacatccagttttactctgctaacttataagtcaatgattggttataattaagagaataaaatttgaaatacatttgttcttaattttctggattatttaacatatcatggataacacagaaaattaaattttttgggcatcatatataaaaaagaaaccttcaaatttcttaccaaccctaatctttataatctgtagtatttttaaaatttcaatttatgttttttagtttaaagcttccactacttgtagacttataaaatatagaattacatttatgttttttaattagtttcattgaaattagaatatacacaagaaaatcaaaaggatagaccaggaaggaaatggaattcatataacatttttattcatagtattggttttctttttaaggaagaaggaaataaaggatttttgtttggtatggatatggttacccactttctaaccaatataaatcacttctgtgataaaatttttatgcatcatgatgaatttatgcagcatgtgtaaaaatatctgaaaacatgagtaaaaattgtaattcatcctcaatatttgtttatgtctttcctaagtctattaatctgaaaatatatcattatttgattgtatcatgtttaaagataatgaaaaattaaaatatttgtttattagattttggcataatgcaaatctaaaattatttaaaataatttactaaagatttctataacttattttataaaatatattcttttgaacgattttaaggtaattatttgaacttaaatattttatgaggtcattgaattcctcactttattagtcctcttaacctacttgaaaaataggtagcaagcattataattcaatttttcagatatttaatctcaaggattaagaagtatattgtcaaaaatctcatggtgagtcagtagtgattttggagatcctactgttttcatctcgtgcacttttctaatatgattttgcatttatttctgttgtattatttttgatatctttgtgataaatctaagtgttcatctgttgagctctctaatattcaaaagtagcacacaatactaatttaacatctatcaaatttttatcttttgtactgtatgtgtttcagcttttcaagtatgctaatttcacatttctaatattcagtgtaacaatagtgcatgtaatcagtttattatgcgtatgattatacaaaataaaacattcttctctatagcattatatctgagatttgttaaaaggcacatattatcataacacttcctgaccagttttgttttatggtgtctggctttggttatcataatttttcctaaaatattgctaaaagaattttatttaaagcctctcaaattgtgcctacacatttaagagaaaaaggctatgcattattcttgagtaaattcagaatagtaaattatcagatattagttgttctaaaatctagtttaacttttatttttgattaagtcatagcaatatatattacaagattttatatgttaaaaagtttttaaaatgtctgatatttacctcttttgtcattctagaaatttgcagttcttcagtaacctgacactctttctagcatgtagttattaaatctgtgttgatcatgtattacttaagggcagcttgtgcagattcatattgtactttaatgtgctcttccaggagaatattactgaatttgatatattttgttttctagattgctctgagaggcccacctggcccaatgggtctaactggaagaccaggtcctgtggtaggttaccccaacaaagataatatatgttaaaattttcaaattagcagttccctgtgcaacttcttccagggattgtgcatatctatggttggtgacaatagggtatgttttcatgcttgctgttgtttccattaaaaaaatccttctcaattcagttttctgtacattttgatcaaaaggtctcagtaaaaaattttaaattgaataaataaaattaaaaatgtaattgagtcatatccaactattaatttcttaaactataagtatcattcatttgcctaatattcagcttccaaaattatgttttacattaaatccttgagccttaattttatattaaacaaaatgtttgttaaaaaagaaaaatttatttgaggccaatgaaaattatgacacaatcttagggcaagcaagatactttttaaaccgcaggttgcctcagtattccacaaggtgcttcaactattagagagagtattttctcttgtagaaattcttggaaataacaaagtattatttttttctcactagcgtgatagcaagctaagatatttcaaatatttttgtctaaaaaatcttcaaatacactagaatatactaatgttaagtggtgtagcagttcacaggattcaaaccaggattctcattaattttagaatagatggataaataatttatattttaaatatttgttttttgtataaattttttctgctatttacagaacgtattattctgaaagttaaaatcttatctgtattgtacatagtagacacttgcagcaaaactattgtattcaaatttaaatcaagtactttgccttctaattatttagtctgttttactgattatattaggataatagtttttcttcatgtattttatcgaagattttattatgtagatttccttatatttatatttaccataatttagtcataaaattttatatatattttgcaggaatatacattcaatcatataagctcacggggaacacatattctgatactatgtttcatagaatttaaattatataatttaacacattattaaatgtttatcatgtattttatcatgctttgcctttccaaaatacagtaatatggcagattctatatcacttaaccaatgaaatagagttaatttttaattatttgttaatgactcaaatttacataacaggaaagtaagtagtatgttagtgtattatgaaatttggggtcagaagaattaacctaggtattttattaaaaataaaactttctgggactctgaacttaagactgtaatgttgtagattcaggattggaaccagcgactgtaattttaatacgtgcaccaggttgattcctatggccaaagatatttgagaaacagtgccatatttgatttaatttacaaatatcaggctgggcgcggtggctcgcacctgtaatcccagcactttgggaggccaaggcgggcggatcacctaaggttgggagttcgagaccagcctgaccaacatggagaaaccccgtttctactaaaaatagaaaattcgccgggtgtggtggcacatgcctgtaatcccagctactcgggaggctgaggcaggagaatggcttgaacccgggatgtggaggttgctgtgagctgagattgtgccactgcactccagccttggcgacagagctagactccgtctcaaaaaaaaaaaaaaatttacaaatatcagtcctaggatatctaaaactctattattcaaataaatttcatttattatcttgaaaaacacaaggaaatggattcatagaggctaacggcagcaatgagcagaaacaagggaggcacattatattagcagttcttattttcattaaacaaccattaagagccagccaattttccagagactgttggcaaagagaaaatattgacacccataaacacattctcaaagtcataggcaaaattaattaattttatctacttatcactttgatatgaaagttttagcttccttaattattgaaggtaggtattgagagaaaaaaatcatattgtttctttttaccatttcaaaacatgcaaatttgatgtttgcatcaaaacattaaattattagtcttccaaatatctcttaattctatagtctaaaaaagtattcactagattaagatttagaaaagaaagtctacatcgatattttgacatctgtacatttttcctatgaaaattattttaaccaattgtttacatctagttatctttatagacaaatggaggactgtatcataaaacattcaggaagtgtagaaaatctgttttttccctattattttatagtcaatgactgtgtgacattttttagaataaatgttggagcaaaagaattataatctgttgagtaggtagtgcttatatacagagaatgtaatacagtcgattaattaaaaatagtccattctataattgcataattgcattcaattcagtgattaataatctgatttaatgtagaaccccagtttttttcttgcagaagtttatttgcaataattcttcattggaagcttgaaagtcattattctcttaattttaaagattagaaaattcatgttacttgactttttgtattttgtgggcatcgttaatatttcttttactttggagtcaccaggagactataaattgctaccatttttcagatttagcataatttaaatctctgtcatactttatacgatgtagtatttaatggaatgtgtatggatttaaataaattagaatcttttagaacacacagtatttcagcatgaagtaactataatcaccatgtttatttttaatgttctgaaagtttttggggatatgtgttgcctagtgtttaattttaaacctcacaacttgtttataaagcaattttatgttttgtttatttattttagtacacatgccaggttgttgttacaccttttacattttagttatttttatttatttattttttgagatggagttttgctcttggcacctaggctggaatgcagtggtgctatcttggctctctgcaagctctgcctgtccgtttcaagcaattcttctgtctcagcctcctgagtagctgggattacaggcacccgatgccatgcccagccaatttttgtatttttagtagagacggagtttcactatattggccagtctggtctcgaactcctgacctcaggtgatctacctgccttggcctcccaaagtgctgggattacaggcgtgagccaccatgcctggtcaccttcttaattatgtaaatgtatttaagagatgtttgttatacagacttattctcatgggaaaaaacaaaccaacctgggaaaaatgtgttaacactatttcacggcaattataatagtatcaataacaccaggttcttgccattttattatcatacaattcagagtctaaaaaaatctgaatataaaagcagtaacattttgtcaagtccttacagtataaatggattacatgtatatctgatttggtaataatgggttactctactactacatcacagtgtagtcataaataatgctttgtgtgtcatcatatgagttctgatagtgcacacacaaaagacaatttcaatgtgatttcatgaggttagcttctgtgtagtgctacataaaatatagacctttattgctcacaaattggaatgtaatcaacattgagaagagatatatttcaatgcaagtgctggaaaattttactgtgttaattaataagttaatgctaatatgattaaatatattttgaataatgtttaattatttcaggtgcaattggcaggataaaagtagttaggaaattgctaaattaagtgaaatatcttcactttttctctatagggggggcctggttcatctggggccaaaggtgagagtggtgatccaggtcctcaggtaaaaaataaaaatttgactttttattcttgactggcttctttgatacagcataattccttcgagaatgcatcaatagttaattttttttttgttcctgagtagtattccattgatgtatgagggtttattttgaaattaaaaaattcagagaaaactgattacgatatttgggtgattcaagatatagtagccttcttttttatgttgggttaactttgccattaaaaggatggaaaatgcagcttaactgggaatcgtgtaaaaatactgatattagactatatgaaaatgtagagagtttattttttcccaaagtttgtgaactttttgctcaacactttctttttataaaatagatgaagctgaaaacatattgcagtaattgttttggattttagttttccttgactcctttaatccaaaaagagaaatgtgttatcaaaggaaggattattttcatttaaaaactaaaaaaaaatttgtactgttattgttggcccatgccttcagactggagttcagagtacagtcttctcattacaaagctacatactctttaacctgtagacaatcttttttttttttttttttttgagacagagtctcactctgctctgttgcccaggctggagtgtgcagtggcataatcttggctcactgcaacctctgcctcctgggttcaaaggatcctcctactttagcctcccaagtagctgggactacaggcatgcgccaccatgcccggcaaatttttttgcattttttctagagttggggtttcaccatgttgcccagtctggtctcaaactcctgagctcaagcaatctgccctcctgggcctccgaaagtgctaggattataggaatgattcaccgcgctgggtctttagacagtcttaattttatatttctagaatgaacatttcacagtgattataaaaattatttatattttcaaatttgggtttcatttttttctaccatgtttattatatgcatattgtttcaattaactttaaatagtatatgtagttagttaaatatgaaggcctatgtaatatttatagtgaaactacatttgacctattattagctgtacacttttattttaaaatatgtatatcgatccccacgaaaagtatatattgacacattatggtgtactgctactgaagaaaaagataatgagaattttaaacctttaatctgacatagtatggtgccagtcaataatttgcttcagggattggcaaattgtcctccaaaattttgtagctaattaaaagagatgtgtaccaggcactgtgctaaattttaggagtatagtggggaaaaataggttaaagactttagcagttcacaatctaaatgggagattcaaacatgagaaaagaccattacaatccaacattataagcgcaatgaaaggagaaatatctagtaaagaacatccaacaaatgagagaaagtgaaagaaaggggattggaaagagaagagaaatggaatggatagttaagagtgtgttccatcaagggaaatgtaaaaccccaaggtttggggaataaaatgtgtaattatttcttttatttaaatgtaacctcatgtctacatatataattaataagtgataagggccgggcgcggtggctcacgcctgtaatcccagcattttgggaggccgagatgggtggatcacaaggtcaggagaccgagaccatgctggtgaaaccccatctctactaaaaatacaaaaaattagccgggcatagtggcgggcgcctgtagtcccagctacttgggaggctgaggcaggagaatggtgtgaacctgggaggcagagcttgcagtgagccgagatcgcgccgctgggctccagcctaggcgacagagctagactccgtctcaaaaaaaaaaaaaaaaaaaaaaaaaaaaatggagccatttagaaaaaataggtatttatttgatatgaaccttttgtcttctgctttatctgaacttttacatggaaataattttcttgtgtttgaatgattaaggtaacgctaagaggatattagtttctgaaaccatctctcttgatgctattgagtttattgatcaagaattctataatatggtttaattatgatgtcttgatatagggccctcgaggcgtccagggtccccctggtccaacgggaaaacctggaaaaagggtatggcttattttcattgtgcattttgaaggcatctgccatgatcattagttttatttatttatttatttatttatttattttacttccttgctagtaataaaagtcacttcgcttaatcatgctgttggcattattagggtcgtccaggtgcagatggaggaagaggaatgccaggagaacctggggcaaaggtcaggagctcacatatttttatattcacatcctgtgtcagttcactctggaaaattttatatttaaaaatccattttctgaatctgagagaatatttcgcatttaaattgcagtacatatctagactggaattgtgatgatgatgatgatgatgatgatgatgatggttttacagggagatcgagggtttgatggacttccgggtctgccaggtgacaaaggtcacagggtaagatacatctattcctttttttccagggaatgttataaaatattttagaattgataacaatttgcaaaatcagaaaaagaagaaaaattaattttaacgtttgtgaatccacttaataatctaatagatactagaaggaaaataggtaaaattacacatgtggtatcagtgtaagttctttgaatatttttagacattataatattccttttatgcaaacataaattgaatcagaatctttatatacatttacctggaaaatatcacataaacagaagagcaatgtggacatttaattttacctctaattttttaataattccttcaaccttttcattgctttttgcctgtggacatatactcaaaagaagacatctgtaggtggtttgtcattaatacagtaatatactaggcactatattattttttggtgatggtaaaaactttcagtacaaggcaagaacttgtaatttgtgaaggctaaagaaaccatgattctgaacagtattccagtagataattttagtaggaaactatgcagacaatctctcagaaaaagatcagctttagatcttcacatctttctttaacagcattaataatgagaataagataagctttaagtaaattggagaagaaaaaaatagtaaaaggaaagaaaaccctatgaatgtctgacagaacatatagtatgtgtctaacatgttaagatcaagacataattgtatccatttaaaaaataccagatttctttagtcacctgagttatgctgatttaatataaattacttagaagtagaaaatatttaagtcaaaatcaccaaaatatatccatatttaatacaatcatcagcaaaataagtttctgaacaatttagcttaaaataattaaatgtctgaaaacgatttaagatacttattttacataactcttttgtattgaaaattgagagaaaatattataattataaaatattattagcatactaacatgtaaagccagttaaagttgttaaattatgatttatctgcaaaattttttgaggagggtaaataaagcatatattttccctgccaaatgtcctgttttatttggtttggatagctacctgatagacttgtaaacattctacttctttccatatgctaatcttatttgtattgatttaacagggtgaacgaggtcctcaaggtcctccaggtcctcctggtgatgatggaatgagggtatgttaatacttcttttcttaagaaatatttaaaattaaaacataataaaacaaaatcatgttgaaatgatacattgtccaaatgttctatactctcattcattttgtcaatgacagggagaagatggagaaattggaccaagaggtcttccaggtgaagctgtaagcaacttactttttatttttaagtaatatttctagtttttaggactagtgactggtgttacacatataaaaacaatgataaacccaggtaaacattgcagtcttagctaagctaaccagataattgccatgcgaaaaaaattaaaaaggatatatagagctccttttgttacagagaaaatcttagacaattgagggaaaaatctgtggaatgtaacatttccagccaaaaaagttaccttacctagtttttgttgctgtttctttgttttgttttttgtgctgtcatcaatagctccgaaatttatgtactgagaagaaatgaatcctattaccagaagaaaaaaaataatatgtcacttggaatataccagacatatggaatatatcacttttctccaccaaatattacaaatgaggaaactgatctgggaaggtttacttgaagctagctaacaaaataactaaactggaaataggcctcctaattttggttttaaattgctgcattctaccttgcgccacattttagatccttgtcaagtaagttcaagcaaatgggagagaaattagattattttattggcttttctaaagaaggaaaagaaggtgagcaggtgcaggagggggaaaaagaagagaaggagaaatcaagtgtgaataataataatttaagaaacctcgaaaaatggtttctgtaatctgcatatatagttacacagatgatcgttttctttcctcagtgaatgctgtcttaagatgaaatttacctaaatgtacaataaatgagaatcaagactcttctatttatgtagtatatctgattgaataataatgttcgatgctgtcactgaaatcaaaaaatgacacaaaagtgtcttatagaaaatattaaactgtttcctattttaaaaattccccaagtgattcatatgtaatattatagaatcaaagaaacacagtttctgtactaaaaactgttatttattctggcttttggatcagtataaacactagatatttatgttatggacatcactttcagtgtgttaataaaagatgtccaaatatttttattctaaaaataaccttaggatttcttcattgaaagaggcatgttattaggacattttttttttttaataaaggcgtgctttttctttttctcctagggcccacgaggtttgctgggtccaaggggaactccaggagctccagggcagcctgtatgtattgctggaaacattgaagattttctagggaaagcttgttgccaaccttttagaggccataaaagccctcagtagagagccaagagtttattgccttgttatgtttgaagatctattgttgctgcctttcactttaactcatcattccctccttttcttctatcttccttttgattatctatcttagtgttttcatgatacatccccagcatgcagaggaaaatgttgctagattgtctccaatgtggacatggaaaagaaagtataggtcttgtctcttcttcgtttccattaaatcctaaaatgatttttagttgcttagggtagtgaatatcatgatattagattagtctttttgattttctgttttagcatcaaaacatataaacaaccataaatactttttcttcattgcagggtatggcaggtgtagatggccccccaggaccaaaagggaacatggtatgtagcaaatagtgataaaataactcatatttgaatataagccctaagaaaccattttttgttgttaaatctaaaatataatgatttattacattttgctaagtatattagatacagcttgcattaatattttgaaatattttccagaatctcatgagggaaaactgtttgagggtgggtagaggtattttccaattgagaagaacaaaaatctattgtgtaatatagcccattaaaaactttttatattttcctctggcagggtccccaaggggagcctgggcctccaggtcaacaagggaatccaggacctcaggtaagtctaagccactgcagctcctttgaaataatggggggaagatgctatctttctataagaaaatcgacagtctcacaattttctatgtagtcctagcaatatttaaaatgtgaatgtaggaaaatacatacttttctttttttaaaaaaatttgagcaaacttgcagaagcccctctcttcccagggaaaaatgactcattcaatgtttagggaatgccaggactaatagccacctgcaggagggttctgaataggatcgcattatagtccctttgcaaaaaagagcagcttgtgtaaaactcctcatcgtgttctaaaattccttggggtgtatgggaatatatacagattcttataactcactgtgtactatagtgagctaataatttgctgttttaaaagcatattactgtgatttgatatctgatatatgaaataaattcttttaaaatagggtcttcctggtccacaaggtccaattggtcctcctggtgaaaaagtaagttactctgttgttctcgtaaagcctggtgaacatgtttgttttagcaatcttaggcaggtataaggtctgccttctgtttttgttaagatatctagatagctcagcacataaggaattaatctggagtcgacatggaaatatagtgtggggagatttcattcatgtgttcttaaactgagaatgataaaacttcagttaccatttaaacagcttccaaatgtggcattctcagctatgttaatttcaggaacataacggtatgagtgaatattttctctttattttaggtctccttttctttctcattattttacaaaaaagtaattaagtttgcttgtgacaaaagatttgtaggaagacatgatgaaaggaaagttgtgaagttgtcattgccattatatctcatatatgaatagcaaatgatgttcttgttaataactcaatgtctggatcaaaacaagaataaatctataattaaacacatgtctttttccctgatctccactgtgagattccttgagtaatattttgtcccctgtagtcatagcacatttctatctggctctttccaacaccttttttctttcattatttttgttgatttctacaaacatattaattaaaaaaaactaatagctttatcgaagtgtaatttaaatactataaatattcccttgttttaagtgtacaagtgaattatttttactaaatttacagatgtgctgcaatctaagtttcggaatacttataccactccagaaataatcctcgtgttaatattcagtccatgtttccaccccctcagacctagctaacaattaatttgctttctgtctctgtagatttgagttttctgaatatttcatgtgaatgaaacttatgaataaatttatgatttaatcatatgaatgtgtatgtgacctttatgtctgacttctttcattttaggttcatccatgctgtagcatacatatattagtactttgctccttattttgttctcatagtattccattgattgggtataccaggttctgtttacttttacttggcagttgatagaataggtgtagtttatactttttcgctattctccataccggtgctgtagtgaataattgcatacaagtctttgtatagatgtgttttcattctttttggtatatacttagaagcagaattcttgtgttatggtaaacttatattcaatattttgtgaattccactcttttccatatcgattgtaccattttcccttccaagtaaccatgtatgaggatagtcatttctgcacattctcactaatgcttgttattgtctgtcttcttgattacgatcattctcgttggtgtgaaatgttatctcattgtggttgtaatttgcattttcctaatcactacttttgttgaacatcttttcacatgcttattggccatttctataacttctttgataaaatagctgttaaactcttttggttaatattctaattggattatttatcttaatattgagttgtaagagcagacatatcagatttaagtggttttgaaagtacttttttctgtggatgttttagacatagctgcacagcactattggaaaatgtcctattagttatgttaggttctaaaggttatttttaatatttagatcagggagtttaatctgggtcactcatattttagattagtgcattaaaaatatactatatttattttgtattgcacttgacacatgcacctattaaattttctaccatgattttatcatgtatgtactagattattaagaggaatttgctcttaggaaaagttgttatatctgaattacctgtgccaagccagataaaatgtataatctagtttactgcatttccggtggtaagaagagagctgttttatgtaatactgcttctgcctctgatctgaatatatccagcctgtaggttcaaaatcaatctcttaccatcaaaaggagaaaggtactcaaaaatatgaggaaaacactttttaatgataatgtatttacaatataaatgttgtattacatctatattaaaaaagtagaagctattacttttgtttttaatgataactatgatttatttattctggctcaagagccttcgcttcgaaaatttggtaaatagtaatgtttaattgtatcatggtataatttaacattttaatacaatttaactaatgtcatatgtttttacaatccaagagcaattttttgtactaacttatcatagcctgtgcttttatttttggtaaaaatatttcataaaatttaagttaattaactaaaatagataatatattatatttttctgacatttttgataaatataccaaatacatcctatgataaattgtgatatctcctaaatatttcctgtgatttaatttccgagttcactcatatattaattgcttagtagcaattgatgttacataactctctgagtccagtataaaataacaagacacaaaataaatattagttaaagggaggaactttgaagacgtggataggaacctaagttcatccagattgcaacgctgccacatttggttaaaaaatcttcacttttcaatttaaaggttacttttaattcatttttgttctatgctgatttggttgaaattttcttgtaaaactgcaatggcaggcaatatgaatacaatgattgtactttactccctgagaatggaaaaagcccaaaaatatgtccagcatttaggcttgctgatatgtccttgaccttctcattgattctgaatcctggacaataacttgatgtgtcaataacgatgacctgggctctgggaacttgataaatttaatattcttagaagaatgtctacttttctcccaagaaaaggtctgattcttgtagtagtgattcttaccatgttccaaatttagaaatggtcatgttcaatgtgatttgaaactctgtgtggttaaacagggattaatctgttgaattattactttattattatcttattgggtacctattaggatatgttctttttacattaaaatcgatttactttccttcatttcctatgaataactatcataccataacattgcacaaaatattttaataatggtgtttcatcaatgttactatgtaattttttgaattagtacttactaatattattgagggaaataatacaatctttacctctttaatgatatgaatcaatatatttctggcctatattgctttcctttttgttctctaagcttcagtttattgtggtattcaaaaactaatttgctaatttaaaaaaagacctatctaagattataagcaggctaaaacctagcatacctttgacatgttaaatttagttttaatttatctttacatggcatttcctccaaataatatatttaaaagttatttaaatggttattacttatgaattgaagccagtgactcaggataagaatttcattcatagtatatgtacacgttaaagctttttaaaattatttttatctttttaatattttttttttctctataagggaccacaaggaaaaccaggacttgctggacttcctggtgctgatgggcctcctgtaagtaacagctacctggtcattaaaatttctttacattatctttaaaaatagattttacatgtgttttagaaatgattatatgaggttagtaataaaaataaattgagccagtaattaaacattgatctctctaaaatacctttcatcatatcacttccatattgcaaaatctttaatgagctcacggtggcttttgtggaaactcatttggcactccaagccagaacctccccagaatctcatattttttttcatttcctccttaaccattagctccaggtaagcaggtccactcacatattcttgcatgatctaaattttctatcaccttacctttcccaagctgtttcctctcctagaaagcccttccatcttctcctccttttcaaagtatctgtttctatgagtccaggtgaagttcctcaccattcataaattttctcagacatctttcatgaaaatatctcagccttcacagatttctttcttttctagaaatatagtaatatttattatttccctttaaatagtaataaacaatgaaattatgtaatctctacagttattatattaaaacatttgttatttacagatttttttcctctttaaactacatatgcagattttgtagtactaggatataagatttctcatcctacctttccttgttattgggtataattgtgatatggctatacatttttatttactgaatctcaataagttgattattaacactgttagcatttatgatctcgctgtattttcagatgtctcatccacatgtcttagtgcccctttgaaggtgcatgtatgatcatttgattaatttgctaaatataaggcagatttaaatacctttatgtaaggctttaattgaggctggggttgaattgttaatgaatgatatgtattattttatgtgctttttctaagctctctcaaatgcattatgtatttgaagaaacttacatccatcaaatataagcttgtcatgtttacttccaaatgccatagtttccaatttatttaaagccatacacactgatgcaaaagtgttcaatgtttttgaaacttaaagagtaagatcttagtagatttaataacaaaagaaatactttcgtagtattatcaactatgtttatattacatcttatcagtgtatgtttttgctaaatatagggtcatcctgggaaagaaggccagtctggagaaaagggggctctggtaggttccaaagtatccatttaaatgtcctattaataaatttccaagagaaaatgccttaatttggtcatctcatatatataaatcacgttcatatagttattttgggtataaaaaagatatcttagactacttttaattttatatcagtaattttagaaattagactatgttctctctttttaaaaaatattcccatggctaggaatacgtgcatatttttcatgtgtattatatatggagtaaatgataataatataaacaatgaaattgggcaagaattactcaatattactgaactgcttatgtaaccccaattttattattacttattactttctggtaaccattatctaattaaatgttaaattaagaccaatggctattaaaatatcaaagtgaaatgtaatatgtgcatattcaatgttagtactttagattacagtagcaggggtaggatcattttgtttacagttgtttttaattattttaaaacagcattaaaatttcagcattactgaggaaattataaattatgattgatagaacattttatctagatagactagagaaaaaaccagcttttggaagatatataattttgattatattcttgatgaagtgaatgctactaatttataattttctatttgaaattatcaatcttgttagtttttcaataactgtcttttatagacattagtatagcatattttaggttaaaaatctagttattaatttttgaattgtttacattattttacatgcttgtaagatttgccttattagtccatttcaatattgtatttttagtatgaatatatgacataataaatttggagtgagtagtgctagttacatgtttttctcatcatatctgtttctagaaataaagagtaaactaccaaaaagtctttatcaaatattagcagtagaaaaaaaccatatccttgtagattagttggtaaaattatagtatgtaaatgagtagcactttcaatttattacacgtataagtggtaattcatctatttcagggtccccctggtccacaaggtcctattggatacccgggcccccggggagtaaaggtaacgttaaattgttttcacattatttactttcaaagtgaaatgttatattcacttaatacttctaatttattccacagggagcagatggtgtcagaggtctcaagggatctaaaggtgaaaaggtaaaatttaattgtttagatggtattaatttctgtgtattatgttaacatttaaatttattcaacagacattttatttcttgaatatatgagtgattactacatactacgcaatgctagtataattttgtattctttatcctcacaacttaaaaacaatgtcttatatcttgtgataagggttaaataccagaacagaaactaaattatgttacctaagagaattaattctgcatcctttttctttttttttttttacatgtgcttaagttttgttaatcatagggttggccttacgaatggatttgctgcaggatttagatgttatctagttagatgcataacatatgaatatttattccttttttccctactgaaatccccaaaatgtttaaacaaattcagcacaaaacaggaaagttagaagtacactaaattaattggggaaagaggaagtctttctatatagtattacacacaaatcaatagtgttaatgagagagataaaaattacaaccagacagaagtgaatgaaaaaatgtacctaaaactatgaatgcatatggcatcttttatagggcatttataggtaattggcttttgctgaagaacatgacattcagatttttttcaaggatacatttagcaggcctgcaaagccccaaatccttcaaagattatgatgaaatgcaaagggaatgacattactcagtgatagagtttagctgtatgcccacccaaatctcatcttgaattctaatccaaattgtaattcccacctgtccagggaggcacatggtgggaggtgatgagatcatgggggcggtttccctcatgatgttctcctgatagtgagtgtgttcttaacaagatctggttgtttgataagtgcctggtacttcccctttctctctttctttttctcctccaccttgtaaagaaggtacttgtttctcctttgccttctaccatgattgtaagtttcttgaggattccccagccatgcagaactgtgagtcaattaaacctctttcccttataaattacgcagtctcaggtagtatctttatagcaatgtaaaagcggactaatacactcagaatcagtattgaattaattcttactacaaaatttcatacaaagttaaaacaacacatagttgcatagcataaatattggtaggtttggtaagatatacatggatattaactattgttaatatcatactcataagaacatactctattagactgtccttgcactgctataagaaatacctgagactgggtaatttataaaaaagaggtttaattggcttatggttgtgcaggctgtacaggaagcatagtggcatctgcttcttggaaggcctcagggagcttccagtggaaggcaaagagggcacaggcatcctatgtgctgggagcaggagcaggagggggtgaagaaggtgccacatgcttttaaacaatcaaatctcctgagaaggcactcactatcaggaggacagcatcaaggagatggtgctaaaccattcaatggaaatccacccccgtgatcctatcaccccccaccaggtcccactttcaacattggggattacgtttcaacatgagatttgggtgggtaaatatccaaattatatcacatgctaatattttttcaaggacagtcatttattttcatggttacaatattatcaaaaggcttatgtgtggatttgataccaatagggaatggataacaaaaagggatggatttattatatccattatactttatctggaaaaagctactgttatatactaaaagtaaacaactatgttgtcagatttattacatgaaaaaggccatgcatttcacattagctcacctacttaacggtaatctcagttcatcctgatcacctagatgaacttcagagtaccagttggctctccctatgggttctgcatccatggattcaataaaccatagatcaaagatactagaaaaacaaaaaattaaattaaaaaattataatatgactgggcacagtggcacatgcctataatcccaacactttgggtggctaaggcagtagaattgtttgagcccagtagttcaagaccagcctgggcaaagtagtgagacgtcatctctacaaaatacttttaaaattagccaggtactgtgatgcgcacctgtggtcccagctacttgggaggctaaggagggagagttgcttgagctcaggaggtcaaggctgcaataagccatgactaagctactgtactccagccagggtgacagactgagaccctgtcaaaaaaagttatagtacaacaatatacaataatacaaatgaaaaaataacaactatttatatagcatttagattttcttaggtattatcagtattctagaggtgatttaaagtataaaggagaaggatgtgggtaggctataaataaatactatagccttttatatcaagaactggagcatccacagattttgatataggaagttgggttggggtcctggaaccaatcacccctagataccaagagaagactgtatagtgtctcactgaattgacaaaggagcacagtggtgagtcaggtagggtttaacatgtaatttgtaggttgcctatacgaaaaataatgtctctgtttagaatttttcttgttaagaaatgtaagtaaaaatgcaaatgtttttctctggaattagtatccatcaaggatttttagaggggctaggcagtgtttaaaagaaaattgcctgactggggtggggatgttgttaactgctgaaacttgctaggagagttgtaaagtgacagaggcaaataaaattataaatgactagatatatatgaggacaaagccatacaggaaaaaaaaataagatacattttttgtacataggaaagcttattaacaattgctcattgtttttagggtgtatggtctcagaagatgcaagtatgtatagaggaaaataagtaaaattttaaattgggaaccaaaagttctgggttattattctagtttttctagttactttttctgagcctcatttgaagtctgtaaaataaagaaaattccctaaaaaaatttaaaggtatttttcagctatagcttttattctatctaatataccaatcaagtagtaaattatgttttattatagattacaatttagttttctaaattatagatttagagaaactttgtataaatatttgtagaatttttaatggtaagaattctccatattttcaaactctgtgaaggattaagccctgatgactttttaatatgccttatttatttcatttttctgagtatgcaagataattgatcatttatctcttacgagatagaagaaaatggaaaatattttatatataatgatgttaattgttaaccaaaggtgatatagcaagttagtactctaattatgactaaaattctctcttttttagccttagatttgtcgcttaagtctggagcaacacagctcaataaattaggtggcatagatgaattccacttttatacatcttctaaaactatgttttcttctttttttctttatctgataattttaatactagaaatcttaataacttgatacgtcacttgctaaaaaatgacatttgttataaggaaatacctaattaaatcatctaattgttttttaaacgtgaatatgctgaaaactaaaacatgagaaaaatagcctccctgtagactgaattctcactttaaaaataatttaaaaataaaattctgtctatagtcagagtctataagtgatttttagacatagagtgcagtgttctttaaactaagcatggcagctgtgtaattatgtttttctctagggaggaggtaatgaagacgttgtcaatagcaagttcagtggtcatttacagctcttaagcctctgccattgcccaatcacattcagtacagagagcatcctgggcaggatggtgaaaatggcatgactttctcttgaaaaaaaaaaaaaaaattcctggcatgctagagttctttgagtatgcaagataacagtttgaatctctttccagggttaggtctcatattcacaagtacccagtatttggtattttctggactttaatataccttgctaaactcacactgaggcatttagtaaatgtttattgaacattgtggttactgaaggtccaaaacatgtttgacactggagactcacaggttaattaggcaggattcttgtgttcggccatttagcagaaggaaaacaacctatgatctagaaaatgcaggacggcatattgttgcaataataattattcagtgaaggccacaagatggagaggttaattttaggaggagttcaagacaaaagactgaagaagtgaagaagggctagatcacgtggtgaagggaggtgccttatattgattattagcaatttgatacgattaggatattttaaagtaaaaattgatgtgaccagttttgtattttaaagagatcattttggcagcgagatgtggaagcatttgtgcctatccttcctagctttgttttcatacacagcccaaaatgttcttttctgaaattatcaaatcaaattcatttctaccaactgaaataaaaacccctccatcaaaccctccctattaacctcctgcctcaccacctcctccacaagcaccatacatcatcatcattatcattattttggcattcttctccagacaccctttctacttcatctgtaccaaaataactgcaaatgtcccactttcagttgtttgtttgttttgttttgttttgtttttgagatggagtctccctctgttgccaagcctggagtgcagcggagtgatcttggttcgctgcaacctctacctcctaggttcaagcaattctcctgcctcagcctcccgagtagctgggataataggcacccacaaccatgcctggctaatttttctatttttagtagagacagggtttcaccatgttggccaggctggtctcgaactccttacctcagatgatccacctgcctcagcctcccaaactgctgggattacaggcatgagccactgtgcctggcccacttttagattttactggtaaaacaaaaacctcaaaatactccgcagcactttgaatgagtaattgctcaattaattttattgaacacatgaatgactatttcttagtaatttaatttttttttcttgaacttaagagataataaggttgtttatgcaacttacttaaaaatctaggtttcaataagaatgatagaaaatatttccgtagcccaaatcgttcctctcttcattaaatgacttcattttcagcattgttgctctgtgtgtatagtgctacaattagcaattctacctgtaaaggatattattaattcctattttatataattaattttacctgaaagaagattgtaagatacagaacccattgagctagaaggcatttatctaatggacatgattttaaaaaaaaatacaatataaaatttataggcataaattagtaaattaagggaaaatcattttattcattctgtgtgctactccagagctcttgtaatacaaagttaaaatgataattaagtgtttccttttgttgttgttgttcttgttgttgttgttggggggagaagttcttgctctgtcaccaggcttgagtacagtagcacaatcacggctcactgcagccttgacctcctgggcttaagcaatcctcccacctcagcttttttagtggctgagattacagtcatgcacccacacacctggctaatttttgtattttttgtagagatgggttttgccatgtggcccaggttggcctcaaactcctgggctcgaataatctgcccgcctccgcctaccaaagtgtggggattacaggtgtgaaccaccacacctggctaaatatttactttttatttgtttaaccagtatagaatacatgttgttatgggagaatggttatttccctcataaaataagatttaatgaacatatttgtgaaaaatgtcctagggtaatttatagccaataaatgtgaaaatatgagatgatattggggatcagaatctgtggctggagttggaaaagggaggaggaagtttcacaactaccatgcacatttctcaaaaataattttccctcgttatcagcacataaatttttatagcaatattttaggttactccaaaggactgattaaactcctatttaattccttttataatgttttagggtgaagatggttttccaggattcaaaggtgacatgggtctaaaaggtgacagagtaagtatagagaaaatgtacaccagtacacaaaatttaatatatatatatattttttcctttgcttatctttaaatatagtaagcatatgataaataaaatgtttgtactacctaagtctttactcatttaagtttttatacaaagatttaaggattttaatttttgtggagatagtgtagtatcaattgtcttttagatgttatatttccataggttccataataaacatgagcatgcacgcgtgcacacacacacacacacatgcacacacacgtgttagtatttatacacaggacattagaaagttagatcaaattactagaagtaatttgataagtttgctctaaattttgttcatatataatgagctatgctgcctggaaagtatacgtctgtaactttcatgaattttcattatatggtggtgttcaatttttgaatgtaaaaatagtagttttttctagtaatacattatagaaaacaaacagaaatattagttatctaaagcaaattaaatgctttattgggaagatttatttttaagtaatatactagtacctaatacatctgaataaagaagcattctatagaaaatatttcttttcctaaaattcaaatgaagtctgcatgcaggattgggggcaataacatccatatacaagttcttaaacgttaaagataaaagccacgtacaaaagagagacatttttcttgtgttccaaacagtaatttccaaagctgctgaacaatctttattattatttttccctctctctataacacaggtgcattaaaagcaatttaatgtcatatatgatatgattcagcttttgtagattttcaaatatcagactatattcagttgtttattaaatatgaaaagattgattaagtcaaacactttcaagcctctttttcatgaacaaaaacatgagtaaacacaccaaagttgaaaactctgactttcaacagactgtaatttatgcctttcaatctccaaatatatttttgtaactgcctgatgggtttatcttgcctgctgcccagacagggcctatttatccagacaggggaattgcaaactctttctctatgcatacagttagctgaataggagactagagttttattattactcaaattagcctccacaaaaatttggaggatagggttttttaaagatagtttggtgagcaggaggctaggaaatgagaactgctgcttggttgaggatgcaatcataggggtatggaaaatggtccttgtgtgctgattcagcttctggctggggaacatgaggccagttaaatcacgaatcatgggtctgagtggagtcagctggttgtcagaaatgcaaaagtctgaaaagacatctcaaaaggctaatcttatgttctacgtagtgatgttatttacaggagtaattggggaagttataaacattgtaactttcggaacaatggctggtaattttttactatgactacattttagtggaattcacacccctctcataattctaaccttgtggctttgtattagtttttataaaggcagatttgtttggggaaagactatcatcatttaaactataaagtacatttctcccaatgttagcttgctccatgcccaggaacgatcaagggcagtttgaaggtaaaaggcaagatggagtttattatatcagatctctttcactgtcataattttttccctgttacaatttttgtaaaggacgtttcactcataagaatgttgttattctgtgcctcagggagaagttggtcaaattggcccaagaggggaagatggccctgaaggacccaaaggtcgagcaggcccaactggagacccaggtccttcaggtcaagcaggagaaaaggttggtaaatgactttaaattcactggtactcttgcagctgatgtttcattatcatttaaatttctttcaataactggtgtcagaaattgagttcttactacattaaagataaaatgtttcattatcattttaaatttgcaaccattacatttacgtttcagtgtaatattaggcaacattaaaatttgcctccagaaagtatttagtgacaccttaaattttctataatgtactgtgaagttaaatttaaaaaaaaaaaagcaagaaatgtctatgacaagtgttatcacattatatacactaaagcaaaatataatatcttatggatagaattaaaatgattccttttctttcatatacatacatatatatatatatcctacatgtatatgtctatattaaatagggaattctgttaaattcctattaaatactcctaagaggtataattatgagatgaacacttcttttgtcacttctccttattttctagtcttctatgccctcctcggccatgtggaatcagctactcttagagttcttccacattagatgttgagaattaaaggatgtgtgattaaaggatgaaagaatcaatgaaagaggttctacttaaggttttacaccaagtagaatcatcttttattttttccacttaaacatgcatttcacataataagtctattaaaaaatactggtattcaggcccaacttcaagagattttaattttaatctgggcttgacacaatatcaatatgttttaaaacatccccagataattatcatattcattgtttgagagacacggggcattatgtgttgcgtcaaaaagatttgcaaccattacatttatatttcaatataatattaggcaacattgaaatttgacttcatgttataatgtaataacatttgtctatgatgacaagcaagaactgtctatgacaagtgttattacattatatacactaaagcaaaatatcagtaatctcttgctggtataattcaaatgtttccttttctatatgtatatgtctatattttctacaacaaacattccataatttctttattttattttttactatactttaatgcacaacgtgcaggttagttacatatgtatacatgtgccatgttggtgtgctgcacccattaactcttcatttacattaggtatatctcctaatgctatccctcccccctccccccaccccacaacaggccctggtgtgtgacgttccccttcctgtgtccatgtgttctcattgttcaattcccacctgtgagtgagaacatgcggtgcttggttttttgtccttgcgatagtttgctgagaaggatggtttccagcttcatccatgtccctacaaaggacatgaactcatcatttttatggctgcatagtattccatggtgtatatgtgccacattttcttaatccagtctatcattgttgaacatttgggttggttccaagtctttgctattgtgaatagtgccgcaataatgctatttaagaaaattacaaatagaagcccccaccgttctatctcagaaagaaaatatatgatataggtattagatagagagtgtgaatagtcaaaaagaaaattcctcatgtccttatgaatcatctaatgtgacagttcttatcgggtttcatactttgcaacttctacagtttcacactttgaaaaaacattgctaattgtaaattaatgagcaatgttatagtgatttggcagcaaaagaaaaagatcaggggaaaacaaggccttatggggcgtttaaaccctttcccttaaaatgctcaaggccagtggttaaaagggtatcctgggaccttcctgtcttcttaggctctatcatgtgtaaacagtcacacaagctattgtgataaatcaggagcttaaactaccccacagttcttttcttctttaacatttcattagtatatgttagtttattgaagttgcctatcatcctgttgaaaatacaaactttctgccagaatttattttaaaatgactctaaaatgaattagagtatatacatacattctaatgtggtaattaccaaagaaaacaaatagcttgtgatcagaattagataattttacttatcctgaaattgatggtgtaaaacaagctgtgataacttaatatatccaagggaacatcattataagtatgcttcttagggtttgtttgatattttccatctgaagactacttatctatgtaatgctgatcatgacttggacaactctttagttcaatctgtactaacaaggtcataaaccatgttcttaattttttgccttatttcatccagtaaaatacttatttttatttataagcttctgttcatcttttatcaatgcacatacaaatttgaacttgtgtttgttttccatttttagttgttcaatgtacattgaaaataatgatacattatgctttctaatgtttaagacattagtaaataatattttataaatgaagtgtgcttttgtaagtatcttattaggtaaatggatgcacagtaaaattccacatacatattttattcaattctttttttatctttttacctgtgtttttttttaattaatgttttgttcagatagaaatcatagggaagtaaattgtttaggataatatttgaaaccatctggtatttgttacacattgttggacttcattataacttaaattttgttttagcactttcagattgaaaggtaaccttattgcactggaacaaaatagtatattcagttccctgcttggaggaataaacactccacaaaaaccatcattattagctaaagctctcaacacatattatatttattagtccagatatttcagcatgttagagtgaaagaagaaatttgtcttaaaatttaattctgaatttctttgcatatctaggtttacttactcattgagaaaagttaagtaactcatgatcccttgttttatatttagactggggtaaatgaaataactgtatcaaaaagatttactctggttgaagggataaaatctaaatattgtgccagttacatcactaatttaaaatagtatttaatgttgaaaaagcttagaagtatttttaaccatgctttagaattcacaaagaagtgcagagttctctttaaaacctcagggttcatgtacctaaagaaggcactaccacttatataataaaggttaagttaggcaacattataacattagaaatatgttcaaagcaacaattttcttattcacgtgaagaaatataatgaaggtaaataatgacaaaaatctgcaaatcttccttttgagtgtacaatatgtgattctaatatttaaaaaaaattgaaatcattatttaagcttaattcaacttaaaatattactttgattattatatattttaactgtagggaaaacttggagttccaggattaccaggatatccaggaagacaaggtccaaaggtaaaacagcttgatatttatagtttattaacatttcgtgaagataatattaatcacttatgattaccttacaatttgtaacatctctatattatcatgagtacttaaaaataatttcacaaggaaaatcatagagtgtgtggacgcctggagtgcagggagctcaaagagcttaggtgattatggattgcagtattttaggagaaggaatcatgaaacgaaggcataatcggtaattctttgtaattggaacaagaaatatcctagtatatctggaagttttaacatggaagacatttgatgcataacggcttttgatttcctttctattatcctaagggtttaaattaccacttgagtttttaaaattaatacacctttcacactattaccctcatttccatgagtattttttttccagggttgctatgacaaatctccacaaacgtattaacttaaaacaacagaaattcactgccttacagttctggaggacagaagtatgaaatcatggtgtcatagggccatgctccctccagagtttctagtaaagaatctgtccttgcctctcccagcttctggtggccccaggcattccttggcttgtgacttcatgactccaatctctgttcccttcttaactggccttttttctgtgtgtcttattctcttctgtctcttgtaagaacactcgccattggatttagggaccacctaggcaatccaggtggatcccatttccttaatttaatagcatttggcaagacttttttttcttttccaagtaaggtaacattcacagattccatagatttgtatatggatataaattttcaggagccaccattcaattcgctgcatcactcaaatctcatttttggctatttgaaatatacatgttttaagcataaaaaatatggttttcaaaatgcatatttacctcggtgtactaatttttctcaaacctatcataaaactttgttaaggatgcacttgatgcattcagtagttaagtgaatgcacttgatgcattcagtagttaagcctgttaagtgaattaatatataaatgttgattattaattacagaatggttatgatacaggagggagacagagaagtgcgggatagtttcagttttatcattcttttagttatatgtacatgagattatatcaatctatcagtttattgagtttgacccattcaggcataacagaaacaataggtatggcaaatcctgtttctgtaacattcttaaacgtgtgtctattcataagtttcacatgtaattatgggagacaaaaatatccttctccctgaatatgtaaactgcatgtcattgtgttccctcattgccacgtgataacactgtcttaggcttgctatacagctttgtcttacaattttttcattgagtttccccaaaaatacttccttgagtagcaggggataaatataatgcttttgaacccttctaaaataagatttacggcatctgtgatttaaaaataatacaggcataatttaaatattttctggctgtactcaggacactgattaatactttttatcatttaaatattatctctaatatactgctctgtctcccagttagcttcctttcaaatgtcaagcattttcacaaatattatcagtaaaagaagccattcactgcataatccaggacctcaagctatccttacatcacttcatgcattcttgatctatttattaagttaaattgcaattgttttgttttgatttaaaaatataggaatctgtcacaatattacatgaatgagtagaattttattttatgaatttatttaaaatcccgttttttccctaagttctctgatcaataatctttgaattgtttttattaacaaaatgcaacagaataacaacagaaatgtttcctcctagaggtatccaacattttttaatccttttactgaaatgtctggaattttattctttatttcttcatattgcttctcttcataactcatttattatttctatgatcaaaaagctttaaagtttctctgttctaaaatgaaaaactgggacatcaaaaatgaaaaactgggacatccaaaatgaaagatagcttcgtattttttcctatgtgtaagctgatgaattttgaataaatttaaattttttttttactaaaatgaaatgcctttaccagtctctttcaagcagattaaggcctgtaatttgacatcttattaattgcttagtagcaatataaaccataaaggtattaaaaagatgtagcaccacatgtgctataaaatgatagctgtttctaaaataaaatctattttaaggtaggatacctttatatttcagacagcattttaaaaatttcacatttttagtttcacatttattgactgagccaatttcacaattaatctttgactttatggcctttgtgtgtttccatataaaaacgggtaatactgtttcatagaaattatatattttggtgataattccttatatgggaagcaaaaaataacatttccatatattcaactgattaattgggtaggttggtcatttttctgtgttttctatcaatttcctagagtagaaactctacgtaagtatatacatttatgaaaaacaaaattggtgcataatatctctttgcttaaatgaagtatctataaatatgctgttacctcttctagtcaggacagaactgaatatttgtcccccccctcaaaatttttattttcatactgtattataatcatttgtccaattcctgtaatagtcacatagtaatactgtgctagacgtagctaactgattctgtgtagagaaagaaaagagattttgaaagctcttcaaaatgtaatgtgcagagatttttttccccagtacgtgaatattacacatcctaataattgttctcaggttgatcacaagttagctgtataggcatgtattgaaacatacaggaaaacatgttataaaaaacagcttagcagtgcatccttcaggttattattttgactatcagctgccatagggcatcacatacaattttattgacctgctttaatagcatcatgtaggaaatacaaattgctagcatcttaccttcctgataagtgtgtaatattcactgctttcaaattgggaatagggccaaatagttacctcctgtgagtaggtaatactctacacctggctattccaactgtacatgcctgagaatacagcttcaagacttctaagatttcacagtacatgtgaccccgagaggttggtaaaaattcagattcctggacctcactgccagagagtctgtttcagtttcagtagatgtggagtgtgccttagcaatccatatttttagcaactactctagattattctgatacagaggagccatgtatcacttggagaaacattatttttaggggtatttcaatgcaagtgagtggattaaaaaaagaaaggtgtattcaagtcaaacaaggctttgttatatttcccttaatatatggggaagtttgtaaaatttgatgtctagtattctcacagaggctagacattttacgtattattgcacttaatccatacagtgatctaaacaggaaaactctccacttcttccttttcagggtctcataattaacaagttgagcagcaaggatgtgaacactaatcttctctattttatgatacagtgatgagggaagctaatcacaatcatgatcaactaaatgagaagataaaaatttagatatatgtgcaagatcatatgggaaatttggttattggggattatattgtattccatctgtaaaatgtggccatttgtaaatgaaatagtgtttttataaacatttcattttaaaataattattaattatacattattattatttttataccaagcattctttttttcagtcccacaaatttcaaattacctgtaaggtgtgtattactgccctcactttgcagaagaaaaatctatacttgatgcgcataagtaatgtaccaaacttacttagctgatacatttagctgatgcataactaacataaatctcaaaattatgtcttcagaattctaaaaaacagagttttaatgcttgggtgcctgaaatagactttcagctagatatagttgtattcaaataccaaatcgaaaaagtggaggaaggtttttagtctatgaattgatccagttttaaaagtgtaaaaatactcaactcaaaagtggtaactatagacatatgataatattaattcaggaaaaacattttctaaaattcctattttaatatttgactattcctgtttgtgaaaataggatttttctttagagttgaagcaaatacaaagaattttacattgcaatacattttctataaaatgtcctataattactgttttataacaagagatgaaataatacttgattaattcatttactcagaaggttaaaaactaaaatgttttatcaatttgtgctttcaatgcttccaggatttcagatgtcattgtaagttcattttcaattacttcgatgatatcttaaaatttctatatttgatttaaatattaacagctgtgtgaaaatcactctgttccaaaataaattacatcttgtgactgaaaatgttaattgccatgtttattcattatttacttttattattgtagggttccactggattccctgggtttccaggtgccaatggagagaaaggtgcacgggtatgatatataaatatgttttgaactatgtatataagtgttcttagctggacatagtggtgtgtgcctgtattcccagatatttgtgaggctcaggtggaggattgcttgaatcccggagttccaggccagcctgggcagcatagcaagtctgtctctaaatgaatacgaatgaatgaatgaatgaatgatgttcttgcatgactactcagtctcagcaccaggctcataatttactgtgatatactgcatattgaaattgaactgtctttgctagggagtagctggcaaaccaggccctcggggtcagcgtggtccaacggtaggtgccttgatttaaaatgatgtacatttttcatattgaatttagtgtatcaagataatttatttttcaaaaataaaaattgatttagtgtctttggatttgtctggcattagtttgggttcatcttttgttctcatctgcagggtcctcgaggttcaagaggtgcaagaggtcccactgggaaacctgggccaaaggtatcacctgtactttttctgtttggatgttactgtagattttttttccaggcagatgctatgagaaagaattcaaactgatttttcttttcttttcttggtgccagggcacttcaggtggcgatggccctcctggccctccaggtgaaagagtacgtatgatacagccacataatataaaatgaaaattagtatttctgcaagtatttagatttcagagaaaagatatatgtctgctaatacatgtgcatgtctatccacaaaatctagtctgaatttaaaaacgcttattttttaatttattcctcttcaccaataaaaaagcttaatcaatatgttctactaattttgttatagaaatgagaaaaatgtgtgtaactggactaagatatcactcttatagtcaagacaaaaatagatattttttaaattttaaatacacttgaaacatctttgccctcttctccaatcagcttgctttccatattgatactcattttgttcacagagctggcagcaaaattatgctggtaaaaaacaagctactagtagccattaagccagaatcaatatacattcaactcaagataaaacatctattccagtaaatagaatagctatttagtaaattgatttttaattgatgtaagatgtagccaaatacatatgaacaagcatgccctttgtttggattttttggcaaaatataacatttttgtagccagatttttaaaaaagctatcctcctgatataagtttaagtattataatctgtattcctttaaaaaattagaatcatttcttcatattctataataattttcagtattatggagtcaggttaatatatttttgtatattatgatttgaaatgtataataggcattttacacaagacagaaataccttgcaatgcataacctaaaattgaaaatgaataatttttatttgagtaggagcaatgagcaaaacttgagtttttatttgtgacgaaaatgggagtagataacacacaagaataaacatttaattagagttgtgttaagtctttggctcatatttaattaattttccgctaaatgtttctcactctcgatgaactgttcccaaattaagtctatcctgtaatttttgagctcataaataatacattcatttgaagtattttatggtcagtcattttaataagggacatttaaattaattaaaaaggctaaataattaaatggagtagaacaatttaacaaaaattagcacaactgtgagttttgtttttagagcaccactgattctctcatgcatttggttttgtcttccaaaatgttatgatcaataatatttccttacaagtgaatatgcttttgctgatactgcattttaatttgaaaaacagcaatactgtcatccaacagtatgattacttttaaaaacactttgagagtgagacaagtacctcttgggaatttttgttttgttttgttgttttagtaatctaggtggattcattttcaataactattcatatatgttttcaatgtctatacaggaagaacatatttcctatgttccttgtggttgatgagacatttcatcccaagtatgccttcattttctgccaagaatttttaattatcttaaactatttagttcacgtcttgagcacacagttgaaaaatggcaaaagtaatgccataaaatattttcctcaaaatatatgagttggggaaagttcagggaattagttctgtagtaccattggattagaaaatgaaataactatttttgcccatttcaaaggactctctcatgatcattatatttatatttaactatacagttatacatggcatgcatatatatatgtatacataaacttttattaaagtattctacaaattaaatgtaatccctcataatcataatttgcagatcatggatgctggttattaaaggttaaatatatcttttagttaggtctaaggttaccaaattaagtgaaaacaaaacaaaaatggaacaacagaaccaagacacctggataaatttgaattttatataaagaataagtcatttttgtcacaactatgtctcatgatatttaggacatattaaaattattcattatttatttaaagctcaaatttaggcactggatattttatctagtcatctggtttcaacaccatctgtacactgagtcattatggatttcttaaaatcccacctggaaactattttgattattaggaaaagaatacgccagccaggcgcgatggctcacacctgtaatcccagcactttgggaggcagaggtgggcagattacctgaggtcaggagttcgagaccagcctggccaacatggtgaaaccctgcctctactaaaagcacaaaaattagctgggcatggtggtgggtgcctgtaatcccagctactcaggaggctgaagcaggagaattgcttgaacccaggaggcggaggttgcagtgagccaagatcgtgccaccgcactccagcctgggcaacagagcaagactctgtctcaaaaaaaaaaaaaaaaaaaaaaaaaaagccaacgttttctgtgaaattttataaagactcaatttttcatttttattttaaagtaatgatttttggaatgtttctttcttaaaagattttaaattcaaattgcatttgaaaggcagcaaaattttaggaagcaaaaacatgacattttaataaatcaggaaaatagtttgctacataaccaaaagaatactatttttaaaaatttgtacttaaaatggatttttatttaggaatcatagtgtcatagtttaataagagtttaaaattttgtaagttcctaagatttgcccagtagttttggtagtttcatgtgaaatctatttttgttaactttatatataactttgaagttactttttaaatataagatgctggtaataataaaaacttgtgatgatttctgaactaacattggcttatgaatggtaatgagatttttcttgggaaggctagattgataaatagaaagagtaaattctattgaaggccaacttcagtaaactctatttttgattagaaaaatacataaatcctaccctaaatgtattacttaagacattttacttatgttatctttcataaatcttcttaaataaatgtaactattacgttctgggcatatagaggattatctcttaccaattactttttctgccaacaatggagtcactgtaatgggactttatgcactttttaaaaataggtaaatttgagagatgaataatatagttaattaaaaatcaagccaagaatgatattataatttttatttggactgaacgttaataactacacaataaagttatttttaccttatctacaaaagaaatttatacatgagtaaaaaatatattgacatcatccaaaataaatatattttagatatggagaataaaggcatcttctgtggtctttttgagatagtcacatactttctcttttagttttggaatatacggctagatacagaacagggatagaagatagaataagttttaaaacagtttttttttttttttttaagcggggctgtggaattgaattgaatcaaaatatcttccttgtatgaatgtttctagccaatgttaaaagtaaagacactgcagaacttctcaatacttacatgttctattcacttttaattgatatgaattctaaatatttacagtgttcctgaggtaacattgatgtgatgtgtagttttgagtagaaatagtgtgaaaatgtatccattttacttttagattagcacttactatcgtgttgtattaccatagttctgtcactgtgatgaagaagctgtatgatacattgtattttgtctatgtaaataaacctcaaagtataaagatgcatcttctaaggcatattgttaacttctccccactgctttttatttccagggtcctcaaggacctcagggtccagttggattccctggaccaaaaggccctcctgtaagtgtcagagcttctctttctctttcttcatttgatatttttacatttttgagagtcacagcttacatttatatatttgttagatataatattgataaaatctctgtaaaattacaattgatgtcaaagaaagtagacatttttaatttataaggttcatagatcgtttctgaatataatttcaacatctcttattaagtattttttgacagtataccgaagactagaaaaacatgaatatcattctctcagctgctcctttactgcaatgaatataattgatgacattacaaattgttatcaactcttaaatatttggtatattcgaatttatctttatcttccatcatcaaaataaccttcttcaaatatcacttcctaaatccctccaacattgtgatattacttaagtcatgctaaaatctatttatattaatattatatctgtctctataatcccttctttttagaaaatgtaatgagaattctcattaaatcttaacccttttatgaaatgtgtttagagcaacacttgaatgttcatcaagcatcttcataaagttaattgaaatactttgttttcatatttaaatatttgtggggacatagaacatactggggtcttttttgtttttgtttgtttgttttgcaacctcctcagtttctttaagagagtgggagtcagcttacccacctgtctaggacagtggttctcaaatgtagtccctggcccagcagcatccacagctcttgggatattgttagaaatgttccactgaccaaatcacaattctggagaggggcaggggccaagtctatattttaaaacaccctctagacagttctgatgcatgttaaagtgtgtgaacctctgtgctagtccagatgaacaatactacccatactttaatgtgcacacaagtcatattggtgaattatttattttgaaataattaaacatcaaatattaagacaatccttaactttttacaataatttttagaccctgcttaaattattatttaccactgaagagttttgcattattactgcaaagatattaggaaagtattgttatctgtattacaaggttatagaaagatcgatacatatggctagtgttaaatataaagtaaccttggtactacctgcatataatgcttacctactatgtcagttttgctccaaatgtaacatgaagactctgcaaagtttcacagagaaatgaaaacagtttcaaaagtcactgtatgtatatttttataaacattcttataattattttaagctgtatattagattattgtttaggaacataaagtttagtgacgtatataacctcagtattgtaccatttatgtttgtatgtattgttgagaactgcttggctcatgtaatattgtttcattgtcaaagaaacccatttgactcatttttttatcagactttttcagcccattgtgttatgtgtctttcaacatgttttgagccattgatcgtgcatgcattttgtctgtaagaggtatcagaagcataataaatgcctacacttgagaagcatgcattctagtaggagagacaagaaggagtatttctttcactgataaacaaagtgatttttatactatgtttctctaacaagtgaaacattagagcatgaaataaaaataccccatttctctagtatgcagttttatgcagtttgggacagaattggcttcatctgtttgatatagaaagaagaagttggggtagagagatagaaaaaacctcttcctgtaaattaattggttcatctccttcatcatagcaggaaaaaattttatatatatatgatgtatattcacacagacatatatatatatggatctaaatattcccttcagattctgttaatatcatgcccatatcggcatattttgggaatatgcagccatccatttaaaaaacacattaacttgaaatgattaagaattatagcatgactagtatgagaaacattctatttagaatagaaaaagtcaaaactcagtgccaatgagaagtgagaaaacatccttaaacaattacctacaagttttcacagattttctcgccaaatctgcataccctcatttagatgaatttgttctctctgtcctgtaccagctagatcaaaggggaagcctgggaagcctattttgatgaaaaaattattacttttacatagataccgtgaaattatttggtaattagtctgcttatttcattggttaatagtttgtggcctttatatttatttagggctaattgcttgatattagaagtacatacttaaatcaagaaaaatgataatgacaccaattcttaatgcagtatattaacactactccctcagtctatctaggaaagccattaaatattatgttgcattcttcccaggatgtgatcgcttagacctaagatcgctattttaaagtattataatattttgcaatgaatgtgttatctatgtcagcaaatatgagatatttaatcttatatttacagctttgttaaaaaaaagtaagtcttgtattagtggcaaagtacatcatttaagaagcactttagtatggtggaaaaaaaagccagacataattgatatccttcagctgtcatcctctctataaaacttttattattgcccagaattgaaagcaagtttattgccaaatatatcaaaccagtgataaggcacagaaattgttttatttgctattttgtaaaactggacctcaatgaagtctactaccaatcaactaaatacttatttctgtatgtcacctccaaactgagggcaaaactaagtcttagcattagtatacacctagtaaatgatacgtgggtatgtaatatatgttttttaaagaagccatggttaaatgacatccaagaatgttttgggtccttggttaaaaacactccagttttgttttttgaagaagaggatggcagtagtagccctggaaaacctgaagaagtcactgagcaagccatgatgttgtgaagtagcataacggattttaattagagttgttaatttacagggcacccaggatgtcaatacacatgacttaagggagcaaagatggttctggcaccaccaagaacctttctcctgaagtaactagccaacctggaaaaagtctccctcagttggaagaaagctatttgagaaaataacattttggaacaaagcctgtttttcatactcactctataagaacatatattaaaaatagatgttcaaaaacaattttatttaaataattaacatacaatgagaggtgtacctgttataatttaaaatattattattaaaagaatcatttctcttcattcatctagaagggtgatagtatttttatctctacccgttgaccatgttttgaaatttgaacttgatacgtaatggttactgagtagaatgaataatccataaggcagtctaaagaagcagtttctttctactaagtatttaaaatataggaccctcacagagttgttcactttgtttgtagttaattgcttcatttatttcttaagccatgacaaagacagcatcctttatacaaagtgatagcagcagatttgctctgtggtacttcacaaacattatgcttccaagaggacatttaagaaaatctactgggaaaaatttgtcctgatgacttctagaattgagtataacgtattgtttcctttacttgaaaaaatttgagagataaaatgccattttttatgagtttgtatttattttgcattcttggtttttttttgtttgttttgttttgttttttgttttttgagacggtctcgctcggagtgcagtggcgccatctcagctcactgcaacctccgcctcccaggttcaagggattcccctgcctcagcctcccgagtagctgcgactacaggcgtgtgccaccacgcccggctacttttttgttttttagtagagacggggtttcagcatgttggtcagaatggtcttgatcctctgacctcttgatcctcccgcctcgacctcccaaagtgctgggattacaggtgtcagccaccctgcccggccttcttttgccttcttgtcagttagaagctcggattaccactagagggcactatttctctctgttatccaagttttgatgcaccgggaattgaattaggaacaaatcaccaaaaagggggaaatactcatttgtgaagtgctaaagaagtaatatttttcacaaaaacgaaaatacaaacctttgcaaatattattttacaaatgattgatgcaaatgaaatatatttaaatgtaaaatattcagaaaagagttcaactattttattttggtttcagctatagctacagaattatattgaagagatatatgtgcatattatcatatataaaatcaacagaagagcaaagtaaaatagctaatggaaatataaaaagaaaagaaaattttctaacatgtcacatttagactataaaataattaaatatttatgacatgtggtatttaatatttgtaatttcagggaccacctgggaaggatgggctgccaggacaccctgggcaacgtggggagactgtaagtgaccttgttactcttattaaaaatttccatctctagcacctcatcagttcatacatagaaagctactttattatgaacatttcaattactaggttgagaaaaatggaaaaattaattccattaagccttttattgaaatatacatatatatataaatacaaaaatagatacaagaaatatacttcaggaaataggatgttagttgatatgattgtttttattgtcaatagcagcattttaaggatgagctgatggagaagacaccattattttttggacatctcctcaagattttccctctcactcttttcactgaagactgtttatagatacattccactcaaacccatcatctctccactctaaaggcaacagattacgaatagccatgatcataataccacattcttttatctagaactaagggattaaatacttgctgatattggacccatcggctataactggttgggaactatgtcaaaagcatctttccatgtgaaataggaaaaagtaaatcaaaaacggtcactaaattttacttaaaacctataaagaatataacagtaaacaaattgactgaacaacttaccatgtgtataacaatttgggcagagaggaaactggcagctcagtgatggtttaagaatcctggtgagtttatttattttgcccctttcaaaatcagacatctggctatcccagtggattgtcattctaatcagaaatcatcatggattggcatatttccatggaatcaattcttgcttctcaccaatgattacttttatccagacttctcaaggaaaccacaaatgcagactacctttgactatgtggttgaaaatcatgttagggtagggggcaccctgaatacatattggagttgcatagcaatgtactataataaatctgaaatctgaaaaaaatatgatttttctgctatggaggaaacaatttgtcagcagccacccaattttgccttgcttaccatgtggcaattcttagtttcaccatttcttagttttagccagatgagaaactttggagtcttggatttcaaaagcaaaattgaaatatgatttagtgagacaaaagaaaaaactgtttggatatcctcttgggaaagatatctgtatgaggagcagaaataaactttctaaaggagagtcaacactcaatttgcaaatgcattatcattcaaatctttcagccaaatcatttttaatgaagtcattgtataactttctgggaataactatagaatattccaaaatgtcttgtggggaaaggatacccagagaattactgttataaagtcctttatgtctatgatttaatctggagcttccacttctaacaaaaataattatatcacatataacattgagatttaaacatagaagaaaaacagcataatgtttctagaatgaatgtttctgttttgtagcttttcacagataaaagccaggattatttctgaaaaaattatattcccgatttcacatccactttaagggaatagtgaatcgtcctatagcctcaaagctttctttctcactttgttctctgctgacccagattcaaaggatcaccttgtacaggagtcacaatctagagtgggcattctttgccatatatttattatcttatttaaatggataaatttttgaattatatttgagatttgtctccagccagaaatccattaattaaatgtttgttctgacatcttacattcatttgggttgtttcagtataatagaaactattcccaatttttcctggtggccttaaacagcttcagaaatggtttctattatattgaaatgacccaaatttgtctcagaaacatagtgccaaatgctgtattggtcctaaaattggcttagtcttttaaagattatcagaataggaatcacatttctgttggattgtaacagcatatttttcaaactacccatgaatatgtccaattaatttccattttcagcaactttgaaaaacataatttgactagctactctgaaattaagtggcaagtgtagtcttattacatgacaatattgaacaagcacaacttgttgtgaactgtaaaagttttcctgtgtagtttgtttgtaagatccccaagatcaaatgtattagatacttgcaaacactctgaatggattgaatgagcagacatatgggcaatgctgtcttccagctttcccaaatccatcactcacacaaatgggctagcagccaagacttcctctctccccttaggatgtatgagtgcaagtctatgttgtaattttgtcgagactttctgcaattaagtattgatttttaatctattacatttaattattattgcaatattttgtgtgtgattcttgctctcacagttagtaagacaaaatgctttataagacttttttaaaaagtttggaattgcctttatatcttcctgttgaatttaatgattaaaaattggaggaagaataacccagacagaggaaacaggtcatacaaatatatggtgtgtggctattcagaaaaaggtaggaagatcagcatggctagaatttaggatacattatcaaagcaaaggaagtaactgaatttgcatactgggcccctattggctagaactttgtcatctatatgtttaaaaatgaatttattggctgggcgtggtggctcacgcctgtaatcccagcactttgggaggccgaggcgggcggatcacgaagtcaggagatcgagaccatcctttctaacacggtgaaaccccgtctctactaaaactacaaaaaattagccgggcttggtggcgggtgcctgtagtcccagctactctggaggctgaagcaggagaatggcgtgaacctgggaggcggagcttgcagtgagccgagatcgcgccactgcactccagcctgggcgacagagcgagactccgtctcaaaaaaaaaaaaaaaaaaaaaaaaaaaaaaagaatttattatgtttggttttgtgggtgatgattctgcctaatgtaaacaagttagtaaaccttatttgaaaactcaacaatggtgaaggaaagagatgattatagtttgaataagacaggtctactaggataagagagaagaagctgtatttgagggaccttctcacgtgacacattcagataaaataactgattaagcatgggcactgaagaaaagtctggaatctgaagacacgccattaaaaaggggaagaacatagaaggaaaatcaaaggagaagatacattcagcaagttccatgttaggaatgttgaagagagagcatgatatacaactggaaatttctagtaggcacttactgagagagttttagggctcatactgattagaggtttataaatagttgggaatggaggagttcatcagcatagagatggcaattgtggtgatggaggttgttgagataatccagggacacacatacacatatgcacacatgtatatatgtgtttaggtatgtgtgtatgtaaatctgacaacagatttccaaaccaactggttgatgaaaaaattaagcgactaatatgcttataaaatgctaaataaattttatgacatttccccccagaaatgattgcttttgctattcataatgatagctcaaatagaaccctgaaagtctgaattaatagatttttaaaatagaactctattttctttccctgtagcatcaattgcaataattacagactctttacctacttatacaattttattattgtaaataattcattcatagttattgggaacattgtgatactaacgtgagactgctagttcctacccattttttttctaatcttattattttcagtctgaccagatgttgtagggaataaaatattcagttctttcgaaacttctcccaatattttctatctacttctccagctgttaaaagtaacttaactctcatgggtaagaaatttacctatattcacacaattatgtggaatgaataacccacagcctagagaaaaataaataccagaatatatgcccagaagttttatttagtgagtatattctgctcaaatcaaccagatgatattttaatgactgaattattttcaaaatgcatttatgactatatctcttgagtttcttacaagaaagaatattgataaacgctaaaataattactaactatgcaaagcattattttagtagatctatttttatatcttgttttatgagatttttggaatacaatagagagaaatgtattaatatcacaggctgtgaatttacctttgtataaacaatcagtaaactgtttcaaagaatgtctaaatcatcatttacttcatccataaacattactgggttaaaattctgtatgttgtttgacctagtggaatggggctaagaacacatttttactctagcttcatttattaaaggtaattattgccctaccatgtgaaatattgaaatggcaagttttgaattttaatgaaaactgaaataagtttaacatattaaacatatttaagcatttgaaaataaatatttttagtcaataggtgactttcttttaatgtgacttattcagctatctcatagaattttgatttatgctttgtgttgtatgtagcttttacaaataatactttgcctccttagggatttcaaggcaagaccggccctcctgggccagggggagtggttggaccacaggtatgttcctttgctttatttcccaagcaagatttattttttgtttacattttaaccttcctaagttgtgtaaaatcttctaaatttattatgattcaaaatgatgtattttttatttcagattgcatttaaatatatgcagctttcgtacatcaaatgaaaccaacaaactattacctaactaaagcaacttttcaattgcctgtaagaataaaagagaagaataaaataaatgaaagtaaatcagaaagttcacactgaatttaacactaaagcctgactatgacaccatctactaataaaaatacaaagttctttgtaaataggtgggccattatctttttctagaattttaaattataaaatgacttcatggttttgagtataaattagatttagaaatatacattctaaaattttaatatttgtaacatattaggtgtttcttaagatttttgccttcataataatgaatatcagaaataaaatattaattatctttgaggatatacaaaatagtggaaaagacaagtatttatttcaagataggtggcagaagaagtctcaaaaattggtgcagtatcctgagttatagtataaaataactacaaagagtaattcatggtaatagaaaataatgtttttcttccctggcaaagcatattgaatgggcagaacacatttagtttctggactggaatttagcccctgctaataccaaattataacaaaggagcaaaagcaggtgaatacgtattttaattatttaattggtttagtcttttctctgtctctaaatagttctcaacactgtaactcacacacatacacacacacatgcgcacacggacacacacatgcacatccaaacacatacacacacacacacacacacacacccctagagaaacaacaaaactgcatcttgtttttaggaatatgtataacagaagcaaaaatgaagaatcattggatttattgattattttatttcagaggttaaccctgaggcaagggaaatacgatgttattttatagagtgtgtaaacatgactacttacttgtgctgaaggcttctttttaactgcttatcagttttagttaaaacattatatatactttctcagtaattagaaagcttcctccaaaaatactttcatttttcctgtttaaaacaactttataactattttctgtgagaaaatttaactagaaaaattattcctattatacttaatatccataaacagaaatggaattagactcttaactaaaatataaacatcatggaatgtaactaaatattttaggacctcacatctttcaaaaatacaattctgttcaatgtggtcatctaaaacttctgagacttgtgttcttttttcgttcccctctttacatgaaggcataaaaatactggtgttttactgaagatgcaccttccttgaattacattttttattggtcctttttaagagaaaaaaaaccaacagcctattttaaatgtagccatactttcatgtgaagacaaaagatttggtttaatgggaataatatagattgcaatactgaatatgcacccttttctttaaacagttatgtgaatctctgatcatttttgtctcggtgatcgctgttcaattatggttaattctgtattccttactgttcaaattctggtgttcagatagttaagaaaacatcatgttttggataaatgtttacacattaatgttaagttgagaaattacagcaattgtataattaaagaaatttaaacctagaaatgtatacccaaattgggacaggtgtataccttatccaagataaatagttaagactatgttgcatttttaggaaaaaaatatttatacttcataagcaagtgcaggaacacattctcctgtttaacaaccttagcatctaaaaattttctctttgtttaacttaaacccttcattttgctttttattaagatagagagcaactgatcaccatcctctatttatacatgaaagcctgctatactcaagcaccacaaaacagcaccactcaggggacacgtaaatgacctgatattgttcactttggcatttgctgcaatttaaggcagctgaccatttgttacagcctttggccgagaggaactgctgacccatactcactgccttcaggatcccatgccacattccctagactttgtcaaatgaatatagattaatagtagagaaattttcagtccatggaaattccagggagaaccactggctttttgggttctcatggccctaagtttattttcaagcagtgattcattgagtggctaccaatgtggtttctatgcctctttactactaagctgatttgacacctcatatgaaaagaaggaatgggataaaactgtaattaaaaatcatagttttcataatacttggactggccacactctgcagaaattattgtattaagcaaagaaaacatctttttggactttatttatgtactttccttttacactcagattctaaccaagattatataaaatctttttagactcttacttgatatgctactttcagtgctttatgtgaagtgttttgtaggacatcatgagaataagtgaggatgataaacttttgtaaatgtaataatactgtttttgagtttgtgttatctttgccaaaaataaaagagcaatctaaagtgattttgcttatctaatttagggaccaaccggtgagactggtccaataggggaacgtgggcatcctggccctcctggccctcctggtgagcaaggtcttcctggtgctgcaggaaaagaaggtgcaaaggtacaacatgcttcagaaaactttttttggcccaaaactttaatttatgtttaactatactcaccccttgtctacagattccatttaaatgaatgtcagaagatgtgtcaggaaaatatttaatgtgcgtttattgtactccaagatattgctcaacatttatataagaccgttagctccgttgaccataaaatctttaatatatatgtaacgttaaatgtaggtagtgggtagttcattttaatgcatatggcattccacccaatattctcatcattaaataatattcacattttacttacagtagtttagaggtaatcacaattttgtttgtagaaagatgtgtagaaattaatctgtcttgacgatgtttattatattctttagggtgatccaggtcctcaaggtatctcagggaaagatggaccagcaggattacgtggtttcccaggggaaagaggtcttcctggagctcaggtataatcaatatctatatagataaagcaagtgattccaattgtttattagaagcattttttctcagaacttaagaagtgatgattaagggaagatatataaacatatatatttgattatcattacatatatgtgtatatatgtagttatgtctataaacattacctgacatccttattttactaatcagatatctcctcctattggtattcaattcatatggattcattttctttatttttttcacttttcccagggtgcacctggactgaaaggaggggaaggtccccagggcccaccaggtccagttgtaagtatgatgataataaatagccagacaatcatggttgtgaattacagctcttctttcattactctcatgctgtgattccacagtgtgtgggagagaaaataaacacatgtcaatcaaatcagtcaatgcctagttcccactaattgcatgcactaatgaatgcagaaacagaagggtttggatgattggaaatatttgcttctgctgctgtcaggaggtaaaaggagatatcttgcttcttacggttcccaaggaaataaatcctcattatgagtaatagaagctcatagtcacggaatgcctggagaggctgtagtttgaaatttttacttcatttacatctattattttagaagtacttataaaataagatttgatttcttataaattatattctatcattcatttattataaaacatatttaatttgtttataagtacttgatgagacttgaatttgtcaatgatacaaaaaacataagcataaaagcataaaacccataagcacaatcttatatattatgcatattgctttatttaatcaaaacattatgaaataattggcaaattagtaaatatcagatttttacctcatttttttcttgagatacatatcaatccctcagaaaacaattgaatgtatgcttcattttttaataaattcacctttattcttatctgcacactgaaatttcactataacagccaaactgccatatttagtgtcttcttctcattttcttatttcaccaatctaaaaagctgaaagttgccttaaaggccctctcaacttcctttcacacaatattcattagttttgcttccaaaatattttactaatttttccgctttcttcatttctaccaccaccattttgttcagactctttcctcttcctttctctttgactaataacatcttatcttttgattcattttcttatccccttcagtcagtttcacctatagaatactagtttaacatacatccttaactatggcattcctctatcatacccatcctatagttccacactgcctttggaaaccaagctccttatcctagccagcaagtcatcttcatagttcaaccccaattgctatagtcctttttttttcccttcatgcctcccttttaattctacccaacttaatgcattgaatgttgtcttgcttctcaaaaccatgaccttttctattttgagaagagtatactgtacacctttcccctttctccaggaaactccagtttttctttctctacttgacaaagatcctacccaaccataaagataactcttaaatgttaaatctctataaagtcatctttggataatttgcctccatttcatgtatttgtaaaaattcccccccccacacacacacccagtgacctttattatatctccatttttagaaattacattggaatatagttggctgtctctcgcattaggctgtgagttaccagtattattttggttactcaaaatacggtgcctgaagcacagtaatcatctcacacttacccatttgaattattatgaatacctaatattggaataaattttatatagcattacttaatactgggaatacaacaagtgtatcatttttcagattgattcacatgatacttactctttacttcactcacatcatataacaaccattgacataattatggaaatgtggcaaagatattttttaaagaaaatatattttgataactgtattagacttacactggagttcataaaattatgaacattttctaatgtcctcaaaagttagtgacagtagcattagcagcaacaacaacttaataagacaaaagttcttatttagatatagaatcttctaaaatttcagtaaaatgcaatccatttaaccagaccttcagattctaaagatatcttctaggaataaatgatgttttaagaaaaatgcacactgaactaatcatctgagctgtgactataaggattaaattgttttaagttattttttaggaaccaagcactgaagctctctcaagggttgggaacagttgaaaccagtgtatttgtaggctgcatactatgtccaggggatacaattttcaaaatgttaattgaaatatgtatagttacatgtagaataacattaaatgtacttttatttatttggcttcaactgtgtatttgagaattattacttactttgttatatgcaactgaacatcacagtagatattctttgagataaaataggataaacaattttgaaaagaaatacaccaaagactaaatagcactgtaagttggttggtgattaaatgcctaatgacatacaaacaataaatgttaattctatgagggaggtagaaagagaatataaataaggggaagggccatgtggaaaaggtgaccctcgaacttggcttcacagagtgcagattacaaaatcgttgaagagcgagaaaatactaggaaagagatgtgatgtttaattagtatctgtttttgcccaagtgggacaaaatttgggagatggactaacatttgttgaattcttgctagcatctaagcactctgctattttacataataaaaaactaaatcactaatacaacatataattactgaagctctgaaattgcaagatgtagtcatttgaatatttgaaatgtacagaacaagtggagtaaacaaattgaagttttaagaaaacaaatctgtcattaatgtttaatatctaacagagataggagagaatagatcacaaaagtccagtgaccaatgtcaacattggagtgagccgatgacttgggcaacgtggaatccaaggacattgcagatgtagcaaacacggagggggcgaggtagtaggatttatgactaagatttgatgtgggcagtgaggacaaatgaaaactgaacaatgacctcaagcttatgtccttgagagaatgacagtttggtgacgccttccatgcctagagcaattttacctcatcaagagcaagaacaaacaaaaaccagaaatattcacacacaaaaacttttaaaacctcttggcagtcacaaaaaattacaaaggattttatactttgctaatagatatgcttgatagatgctcactgtgtttatttgaaattaataaccattcttatatttgcaaatcaaatatgcaaacatcaaccaattaaaattattccttaaagttgttggaaaaggattcactaaaaggaagacaccatacacatttattagttcctaacactattgttttaattgctgcagaatctagtgaagcggtgcatgatgatgactcagttcataacaagtgctgagcgagccttagtttactccatttaaagtgattacatcacataaaatttgattttgaattttttaattccaaatgacagataaaacaaaaactggatggttttctagatgtgaagtataatttatctagaaaattaataatgtcaattcttattttttgaggttcaaaacttactatgagtttcccttgcaattaatattgaaaaaaaaaagaatcaggagtagggatttctttaaaaggtaacaagttctgctttgcaatgttaatagaaaaggtgatggcaaaatattaaaggggaagtatttgatcagttggtgagaaatgataaaattctgagtcataaggaataaaggcataagaacatcttctaaaaattcattttataatgtatatgtctgagtttatatcaatcttatgttaactttacctttagaatattgaccaaataattgtaagtgcaagacaggaattcacagaaacagagtgatgagtattcagtggttatttgtattaaggaaaaagcaaagcaaagtgatgagttctgaggaagagaatgtgaagtctaaaggaaatagaaaagggaaatgaagtaatattgagtgtttattctttcaactcttatgctaggtattttatatctgttattcttattcttgcaacttggaatggtagattttttttttctattttaccattccatatttaaagacaaaagatctgaggcttgaagaagtatagagcttgcccaaattatctgggcaaatatccatgatagcactttacataaactcattttcaagtcatcttgacccttctaaatctctgtgaacaattttgtcaaaagagagtgagaagagttagtatttcaactacctaggctttaatattactacatattctctataactattgcttattttgaatgaatcgaagatgaaactgattaaactaatatacaggttgattttttaatgacaagatgtttgtcagaatgccattgaactcttagtttctttcacctataatgcaattcataaggaatgtagttgtgctgtgtatttctggattgctagggaaataataaattccctcattgcacaggatactgatgaactaaaactaaaagtcctaagcagagctttaatcagctaaccttattgctcacagtgatatttgcaaagtttgtatgtgtcccaattatgtagcttatgcactatatccttactatatgactctaatctgcaaaaagaacaaatataatatttaattctaatgtatccattcaagtgttctatctattcatttataagtatatttagcatctattctctttatttataatccatttagtctgaaacataggtcgttattatgacactccatagaagtggatttactgtactcaggtaggtctaggtgtatgtcattgacttatatttagagaaactttatttgtaaaacaaataaactaaaaaaatctgtttgaagatatgggatattgctttatacagggtcatctttatgaatatccttggaagaaatctcttgctaaccatagctttaaaaatatttgcaatttctttttttcaagtatgctttttatagaatatttaaaatttttttaaatattaactgacttggttttttttttagtcagtttgaattacaaaacttagaattcttttcactttggcttacagaaataatggagtcaaaatagagacggtacagaagataatgtttgataactattgtaaaaactttttgaacacaacttactatcaaaagtacctatgatatactttaatattttctattatattttgttatagttaatatttttaaatactgggcaagacctgtgaaatttacctcataacctactcatggagcataacctacagttagaaaaatccttggtcttggtatgcatttttagtttactactactactggctccattttacttcaataaaaagttatttgcttacctgttttccttgcttacctattttaaaatttatattgtctaatattttatgcatactatttaagctgctataagtctttttctgtgaaagtaccataaagaaataaataccagaaaatatcagacaatctattaaactgaagttatattgattcataaaatggaccttcctgcaaagagcttatggtttactgaggaggacaaagagcagataaaataacatagtaaataataagaatatactaaaagaacagaaaacacaaaggtgagaacaatgttttttgcctaaggaaattatgtttgaattgaagctgtaaataaaaaccagttttatctatgaaaagcagcctttttgtgtgctaaatttagtcttgaactgctcatcactttttgtcctcttagtaaagaactagtatttcaaggttagggttatctaaaggttttggtcctgggagttattgtatactgaggaacgttctgtcgtgctaccacttatgacaaaattataccaatagggtgctgtgacgttgggattttaaagtctaggaaaaccaagtgttccctgtatacgtgatgttgtatccaagaactggtaacagatgccaatcaaatccagggcatgtcttctgatctcaggggatgtagtcactaaatggatgtcttgatgcacacacaaggcagaaagtagcaagagactgaacatcaagagagtaaggcagtgcagcatttttctgcatgatgaatataaactgagtaaatgttttctatgtatgtaaacagatatatgtaaatatatcatgcaacaaattctcagatttcacctactgcatatatttttataaaacaaaatcaaggaaaataatatttagggaaaatatattttccctaaataatctctcctccagatattctttatggtagagaacaatctcattaacaacagttatttatctaaaaatgagattaaaacaaatatagtagtatgttttgtaaaagccttctatctttacaatcacatgtatattttatccctaggagttgtggaagttaacatgcagaaagtatatgagaggagccagatagctggtacagaatatatgtccaatatttcaaaattgtgcggtatagcagtctttgctgttttcctgtgactcctattatgtgaccatccccccatgattctgactttattttcctctttatttattatttcttcttcttctcttgcttctctaagagttcacattctcttcctatcataattcctattcctcttatttttttttcttcatcctatttctgagaaccttcttttccttggcttttacttattcttccagcaagggaataaccaaggtttaaaaggatgtcatgtaccgacatgccaagtcagactctatacattttaagataaagtccattttctccattgtgacccaggtagaccttagtggactatgattacatccaactagggatgagataaatgtagcaatagtgatggggaccagtgatcaaaatctgaggtatttgatttgactttgatcatcagagtctatgctttaaattctgataatgcttgatagttcatctgaatttttagttcacgtaatctaaaatgtatgtcatgtagagagtgaaagtacttcatagttttgacatgaaggtcaacttcttttttttttttttttatttcaagagggagtttcgctcttgtcgcccagtctggaatgcagtgacgcaatctcgcctcactgcaacctccgcctcctaggttcaagtgattctcctgtctcagcctcccgagtagctgggattgcaggcacccaccaccaacccggataatttttgtatttttcgtagaaacggggtttcactatattggccaggctggtctcgggcttctgacctcaggtgatccacccgcttcggcctcccaaagtgttgggattacaggcgtgagccaaggtgcctggctgaaggtcaactttttaaaaagacagagcagacgtgtttttgccctctagttgtatagctctggtttgtaagcactttatgtgtttatgcttctatttttctctctagtgggcggcatcttaactgaatgctgatgaggtgatttgtctatcactttcatttactttacaaatgctcctcagaatatgaaacatccagtgaaaataactgataaaacatttattttggtgttctcatctgtgtgagggattaggggaatactttctattctcattgctccaggaatatagaccaatgctattgcttcttgtttcattatcattgtaagttttagatgaaggtgcagcaggatttaggggaagggctgcagaaggggataaagctaatacacaagtaaagaaaggtaactaagtagagaaaggtaaattcttcccttttaaaagcatgtaaatgttcacttttcagttcaaaacaagagaaaaatggcatgttttccatagttgttaatatttagtaccgaaataacagaacacttatgatattatggtcattgtaattcatgaaattaaacagatattattgcctttgggaaacatgtttttattgtcatttaaatcacatattaagaaaataatattgctataatttttagtccctcctttgagttctttctagctaagcactttcaatgtgtaaaatatctatccttcttacagagagacaagtatacaaatagttaaaagttaggattaacaatgccatattaatggtggaaaaagccctacccttcttttaacagggtattttatacctgttgttttgatattcatttattaatgtattaaatatgccatataattttctggatcttagtttacttttctgtaaaattttacttctacaattatttgagattttatatctatttttggaatatataactgttcacttacagtcctctaacatctattacatttatactttttgacaggcattgttcaaagaactttagttatattaaatatgactaaaacctgatgacaaactatttctgtctctattatgacaggcattgttgaaataactttagatgtatcatagtaaacatgacaaaaacctgatgacaaactatttctctccatctatggcaacaaaagtggcccatagagagtttgctccagatcagaaagctagtggttccagtgctagagagggaaagatcatacacttaattgacacacttatttatggcatactatgtgccagtaactactcaaactgctggagatcattgaaaaaagaaaaaaaaagaaaaatcaaaaacctctacctttgtgaagttgatcattatctattttacctatgcttaaagacaatcattcagtttagatataatagtttatttatctgacaattataaagtcccttgttctttagccagctatacagcaatacaaaaatgtctcactatatatgcctactctttatgcaaacaaaaaaagtatatacacaatgtgagtttctcaagggctgcttcctgccataatacatttcatattcacaatcaagtgtcccaagagaatagattctcattagtgttgaacatggagtttttagttgaatgtctaaatggtaccttcttttcatattgggcttaaatttttgcttaaaaaatataacttctccagtgattctgttgagattaaaggattcataggcttattcttttaaagttggcatgagaatatttaaataagatttgcaagtttgctatgtcatttgcttaatgggtaggtaccatcagagattttcacttttcatttatagatatataaaataaaattatagcagagcatgctgttattacaaacatctaggctttgagagtgtttgaagtaactaatagaaaaagaaattgcagttgtactttagggcatggatatacattccaaaagtcttctcttgttttcatctgttgtttcaaagtttatgagctgtgacaagatcatgagcaatattttaactacagaaaagtaatatattctctacactaattttaatgcagcttccacaagcaagatgacaatctgaaatttaatcttatgaatgctccaagggagaaattaaaacagttaagcttttaaataaaaaatagtatacagtatctggctgggcacggtggctcacacctgtaattccagcactttgggaggccaagacaggtggatcacgaggtcaagagatcgagaccatcctggccaacatggtgaaaccctgtctctactaaaaatacaaaaattacctggacgtggtggcgggtgcctgtagtctctgctactcagaaggctaaggcaggagaatcgtttgaacctgggaggtggaggttgcagtgagccaagatcgcaccactgcacttcagcctggtgacagagcaagactccatctcaaaaaaaaatagtatacagtatctacaaactacacacattgccatagagtcaaatcagcattctgtctcttcttgatatatgttaaaataattattaaaatatttcaattaattttaaataataaacatacttcggtataaatttaataagcattattttcataagtaaaagccatggcttactttcatataacatgtcaatcataatgcatccagttaaggtaatatttattttctttcattttgaaaccatttcttacagggaaaatatacattcaatagcaattttcctgcaaatttgaaaaatttctcttgactacatgtgtgtacatttgaagcctaatttttattttattttattttattttatttttttaagacggagtctggctccgttgcccaggctctggagtgcagtggcgcgatatcggctcactgcaagctccacctcccggattcacgctattctcctgcctcagcctcccgagtagctgggactatcacctaccacctgccaccacacccggctaattttttgtgtttttagtagagacgccaccacgcccagctaatttattgtatttggtagagacagggtttcaccgtgttagccaggatggtctcaatctcctgacctcgtgatccgcccgccttggcctcccaaagtgctgggattacaggtgtgagccaccactcccggcgtgacgcctaaatttttaacatgttcaacatgtttgcatacataataaaaacacaaatgcattatagttatttaatgcatacagtcaatatattattgtttgttaatatgaattaagagacatggagatatttactactcagaatgtagtgccaagtgctgcattaattcactccaaaaataatggtagaaaaccaaggttctataagaaagtgtataagaaatactttgaaggatctcatgcttctaattctcaggaaaatacaattttttggtaagatggtatatcagtccattttcgtgctgctataaagaactgcccgagactagataatttataaaggaaagaggtttaattgactcacagtacagcacggctggggaagcctcgggaaacttacaatcatggtggaaggcaaaggggaagcaaggcaccttcttcacaagtaagcaggaagaagtgcctagcaaagggggaagagccccttataaaccatcagatcccataagaactcactcattgtcaggagaacagcatgggggaaactgacctcatgattccattgtcttcacttaatctctcccttgacaggtggggataatgaggattatggaggttataaagcaagatgagatttgggtggggacacaaagcctaagcatatcagatggttattgacctgggtcaaaaaaaagaggctggaattttagtagtataggaaaagaccaaagactttccatgtcagaagataagtgtgaccaaatattcagaagtgaaaattggacatattgtgttagagagacagtgagagatgtaatattttaggataaaataatgttcaaagtagaatgctaagatataaagtaaaaaaaaaattctaagaatgtgagttgaatattttctaggatgactgaggataaatatattctcaaaaagatgcattaacccacactatttcagagttcagcataggtgaactctgaaataaggagtgaaggcagatgaaaaagtaccatggtgtctccagtgaaatgtgttgaaaaattaccaaaagtgaaaacgtcctttgttgttgaaaattacaaataaacttataaacaatatgacaaagagcagagacttcttttttctttcgagacagagtcctgctctgtcacctaggctggagtgcagcagtataatcacagctcactgcagccttgacctccctgggctcaggtgaccctcctgtcctgagtagctgactataggtgcatgccactacacccagataatttttgtatttttattagagagggggtttcaccatgttatccaggtcttgaactcctggcctcaagcaatctgcccaccttggcctcccaaagtgctgagattacaggcatgagacacagtgcccagccaagagcagagattctaatgaattgtgtatcaaaggtcaaatgaactgaatgaatgatggagaatgattatttggataaaggagacaagcattttcatcaattcctttaagttttttgtttgttttacacaatgttcaaccaaaatgagcttgttttggtagaagtggctcttaagtggctatatttcttccatttattaaaatttagcacaattcattgtacccatgagttgtatgggtacaatgagtcaaggaaattttgttttcaccatttataaactgctaagcgttgtagaaaatacttggtagtgaattagggcacacagaccttgagtccatggtttttaacttaaaaatatacaagtcatacagcaataaaattatattgcatatgcaaagcacttagcacaataattgttaattagtaggtataataattgtaagtcagttaattctcttaaaatggacttcaaacttttgttgattctccctttttcattctagtctagtacccatcaacttcgccatagcctagtgtgatatcttcctagggtattctttgaacagttagggtttaaacaggattaaagagagaaaaattttatggcccgacaaattaaaatcgcacctctttttgtatagccaattacaaataaaatactgcagaagttaaattgaatgcttattctagatttgataaaactaatggatagcaatcattttgtgagggttagaagtgaaatactaaacaaaattgtaatatagtcaccttatatgtacattgatcctcaataaatcagtgtttcagattagtggagatttatctttagtggtattaattttaacttgagtagaataaccctagttgcatcatgtgttgtcttctgttgatgtgtttctgttaccaaaaaaggagcacttttattactgacttttttcttttctctctttttagtaattcaagggacacctttgcattcctctcaattcatagaccttgctcttcttgctcttcttcttatccacctcctatacttttttcttccttcctgacctccctctcaaagaattagaggcaaatatttgtgttctttttactcttagggttgctcattttgaatgtgcaacagtaggaggattctattattttttctactgcattgacttctataatcattcaacaggagtctgttacctggttaacagtaatacaacttgtggttgactattttattcataaaatattttaatattattaaattaaaaaatacattgatgaaaaagtatatgtttattatcaaaaaagtactaactgcaattttctcttataactatagcctcctctttagtatttggaatacttcattggtaaaaatagagtttacatacaactcatttattatgcaatataagaatattccctagattagtttttgaatatatacttactcacagctcaaaaatgccacttttgtttatataaagctcaaatttcacaatttccttaattatatttttggcaatgtctctccaaattatttctatcaactaactttaagatacccaataattacaaacattgatgtcctcattagaaagaaccaatgggtggctttgtcaagaaatcagagtagagtccaagctcagggttctcttaactagttatatgattacaggaaggacggttaacttctttgagccagagattcttcatttttaaaacagatgctacaacagctctataaactacctggaattgttgtgagaataaaataagatgaaagttaaactgatttgtgaattgtaaagcattatgttaatacaagttgttggtatagttaccatttttatcacatgtaattagtttcctggttaataaaaatacaaattagaacaaagtcaataatgtaaatttgtataataaaatgatttctaatatatcattaagtataatagtagaaaacataaagtagtatattttccagcttttataaataattttctctgagttttgaaatgatgatgttatctaagtatgttaattattaagaaaaaatactaacaattatattttctaatattttacatttagtttaaacataaaataaaaagataaattgtaattcaatcacccctctgagaatccaaagacaattttttgttatcttttagtaactaaaattggaagtagaaatagattatacttgagctttacaatacttagtatgtatgtttgcatttcttttattcttgttttaataatgttttcttaaattgttggtacagataattactataaaagcagtatccatgtgattattttcaaaaatctatatatatgaggttttttaaaaaagcaaactagttaaaagcattacatcttttttgaaactcagttaaaaaaaattaaaaaacctaatcagattcaaatgatctcatcagtgttcataagacccagtggtcctatagaactctaagttgaatttaatagcttatcctttgggaaaacgtccagactttaggatagtgattatcaaatgttattttgtaaaaaattttgtgtgtatcctaatgcaaagaatttctgaacccattttttttattttgaaaccttggttcagcacatttgaaaaaaagcctagaaattacttcaagaaacactagtttagggattgtattctgccaattcattataatacagggagaaatttatgtaggaggttattagatatattttttataaagcattgtgcacaattatgaacacttaaatggaaacagataacattaaataaatattaaatacatctaattttgatgtattttttcatctcatcaatattttctaacatcaacatctatgcttaatattggggctggaaattagtctctcaaatagtggattcaactgtttctctttgggatcttaaaattatctaaactctaaatgtttctttaacataatttactagactgtaagaagctattgttaaataagtgattcttaagccagtattactttctttaataacaaaatacttcttttcctgtatactagggctcaccaggagaacgtgggtcagcaggtacagctggcccaattggtttaccagggcgcccgggacctcagggtcctcctggtccagctggagagaaaggtgctcctgtaagtaatgtctaggagaaaatatattatgctgctaccctgtacacgttattactttttattcaataatattagcttttcatacaccaccgtattctctctgcatatgtgtctggcatgtaaataccctggctcgtatatgtataatagagaaaatttcaaattcaattaaatgagatgacattttcccacactttatgaaaccgtaatacctgtgagggagttggatattattaatgtaaaaggcttttcattttgctttttttaaaaaaaaaaagttgtgagttttttattgaagctataccttgctgctttacattagaaaagtgtgaactttttacacctcttgtaatacaaattcaatttcaagcatttccatagtctgtaaataagactcatagaaaatagctgcccttctcatgtaatctgagctccgatcgccagtgagtgagacagggaacatctcactaattatttcatctaatatctattggattttaacattttttgggggggggtttattatactttaagttttagggtacatgtccacaatgtgcaggttagttacatatgtatacatgtgccatgctggtgtgctgcacccattaactcgtcatttagcattaggtatatctcctaatgctatccctcccccctccccccaccccacaacagtccccagagtgtcatgttctccttcctgtgtccatgtgttctcattgttcagttcccatctatgagtgagaacatctggtgtttggttttttgtccttgcgatagtttactgagaatgatgatttccaatttcatccatgtccctacaaaggacatgaactcatcattttttatggctgcatagtattccatggtgtatgtgtgccacattttcttaatccagtctatcattgttggacatttgggttggttccaagtctttgctattgtgaatagtgccgcaataaacatacgtgtgcatgtgtctttatggcagcatgatttatagtcctttgggtatatactcagtttatatttacatgactatggactattccactcattatgtttaggtttctttgttaagatttcttctctattttttttcctgcttttgatatgattgtattttttaaaaatgattctctcttcctacaagattaaaacacaaactgtttcagtaaatgtagataaaaagtattggctctgatacacaaaaatataagttgaatatttttgtatactggtaagtattgatatataaaattaagcttaagcttatattcaaaaatactcctctatcactaagacttcagttttatcaagttgatttgctttcattgtctatgcattttctctgattattctgtgatattattccaatatttctgtttgagaccattttgtgcagttataacagaataccacagactgggtaatttataatgaacaaaaatatattggctcatggtgctggtggatggaaagtccaagatagtggggccacatctggtaaagaacttcttggcacatcatcccatggtagatggagaaagacagggctagagagagagagagagagagagagagagagagagagagagtaaaaagaaaacaaattccctttgttttaatgaacccactaatgcaataacggcattaattaatttcattttgccctcatggcctaatcagctttcattaggccctactcccccacactgttgcactgggaattaagtttccaaaagatgtttttttggtgacacattcaaactgtagcaaataaaaaaaaaatgttttctgtaatccattacctttcagaaagagttagaatgttggaatgggccatgccacctgtggatagaacttttaggtgacagaaaaagcacttttaatatgctgagaaaatatattttatagtgtactgtgtactaggagaagatagaaaatagattcagttcctttaatacaaattaattaaaaaatatagggaacacatattttgcacaatacactaaataatgcatacagagaaaatagacataaattgctttgtatacaaattgagaatatactaattagataagtcaatatttctgtgaagataatatattgaatggtagattttaaagtggataaaaaccttagatttatgaagaataagtaagttattgaaataaagatcagaatatcaaaaaacattgaaaccgataagaaattaattaggtgagacagatgaaaaattattgacattagcctttgtaagagccaggattcaggcctgagttttgttggtaattagtgatatcataactagagaagggaaaagggaatgccttgcttccccatcctctttcagttatcccagccaaggacaacaactccagcatgctcattccattttctattagccaaaattagctatttagaataactaaggggtaggcactgtattgttagcattatacttttgaaggagctgtctgcttagggacagtaacataaagtgggtaataagagtgttcagtgaaaggagttatagatatccattcagaagtttaataaaaactgatgaaaatgttgggcaaaatgttatatctagactttacttcttcctcttttcaaatataaattttagatcttacctctgctgagcagcttatcttataaaaatgttatgcagttatcagcaggtttacatttgcattaaaagaaaggcaagatgtgacctgtggaagacaagcccttggtctacctacccatcaaccctgcttcctagaatggagaaatgtcctaattagcatccctatattattaatcagttagattagaaactctaggaggtgagtctggaaagcaggtaagaagaaaggggctaaaaccttctccaatttaatttcattgatagaaaattttgatagggaaactgattctaatgaaaactattagttactggatgcaaagattacagagaagaagtgattttaactatgcatctatttggggacagttgtagaaattggggggaagagctagatctaaaacacagtgaagtcaatgcactaactataactgaattaggcaatagcagtttgaaattttaggaaaagtattcttcaaatacttatttacaatttctagcatgtatgtgtgtataattgcagagaaaataatcagtgccagaattgtaagtctgggagtcatttaaaataagagtgatgtttaaaagcatatttttggattaccacgtgatgtagtgttgagagaaaacagaagcctggactcaagtcttaatggagaattataatgggtgtaagttctgaaagcatctaataagagagaaaaatagtccatgaggttgtttgtgtgtgtgtgtgtgtgtgtgtgtgtgtgtgtatgtgtgtgtgtgtgtatctccagaggcatgccatcaaacagaacaagacataaacaagttcccttttgtgggatgtaaaagatcgagaatactgaaatccgaaagacaaagaaataaagagactgggattttacctgctgggtatttatacctttagattaattctaaattgattcaaaaagaaaaaaaatggactatagaggagtggagtagggacatgtaaatcacctcaagcagggcatggaacccatagaaaaatgagccataggtggaagtactaataagattgaatgcgttgcctcattattattattatgtggtgcatatatttatctactttatcaataataagaaaatagtcagtggaaaagttaaggagttaaggaaatgagagtagactcaagttgcctgcttgaagacaaccagaagtgggttgggagctacccctatcatttatttagttcatgattttggttaagttatttaaaatcaaaacctctgttttctcaactctgaaaagaagatggccatctctgaaaagaagataatcacagtattttgtgaggactagataaaattatagttctaaatcatttttcagaattgtgataagttgtgagaagtgttcagaataatcattactattagtagtagtattatcattaccatcagtgtgtgaatcagagtgccataaaaaaggatgaaataataaactgagaatgaatacacaaatgagcttttgaggaaggagtgatggattttgtgaattgtaataaaagttgtgggtgtgagtataggttaaatataagaccatgccaaatcaaacaaaagacatggggatgtttagctaattctatcattttttaaggaaagatttagttattaacgtaaatggaatgttagaagtggtgaaataaagaacggttacaaggagagatgaatgtttccagtagttgtgcagattgtgggccaagagatacataatggaggaagagttatgtcatcttgaggaattataaatggctaatataaatttagagtgctgtagatctgttgaatttctcccaacatcacacagaccagggtcagaagaaatgaatggcaagtgattcctggctagagattatgtgtactataatgaaggcagaagagaatatatctgccttatttacaggaaaccttatacaaaaggattgacttttagagtttaaggctagcaagggaattcaaattaaggggaactatctgaatcaactattgtatttaatatagtgaagtttactgtgaatagcacagcacatcctatgagtattgatagatttgaaatatcatatttatttgaagaagataaaaggtctccagagtgacatcaggggcatccttcttataataattatggcatccttttgaaaaacaagaacatatgaaacccaggcaagtaataaattagttaacaatttaattttgccttattaatgttgttacttttgttgtcattaattaagtaatgtagcaacagttccttaagtgactactctggtccacaggccagagatatataatagaatgcaaaatcagacacaattcctaccctcacatagtttattatctgatagggcaatttgataatatgcaaagaatcactaaatacatatataatggcaaactcaggttactcatatgaatggaatgtaatagtgtatgtcagattatagtagagagacctgctagaattggggactttccttggacaaggcattgatggtgagatgtaaaagatgagaaggaattaactatgcaaagagttctcataggggcattccaggccagaggaaaaaaatgtgctcaggcaatgtcacaggaatggacatggcatcagatttaagggactgagaaaaatgtctagaagggttggaatgcagagagcaagggttaggggaggctagatgtgtttgggcaggtagcaggagctagatcatggtaggctgccctaagccatgaagtctttatctgaggaaaagtaaacaagtaaattgacctaagaatgtaggtaacatgatctgattggctttctggatgcagtgtgatgaatagattggaaggaagtaagaatacgtatggggaaaggcaggaggtttttttcagtagctcagaacaaggataccagtattatagagtaaggtgtcagtgatggagataaagtcaatatattcaagagataattaggagataaaatgtctaaaactaagtcattttaaaggagcaggagatgttaagggaagtgagggaaagtggggtaatgaaaaggcaaaacctaatgacttgtagattcccagcttgtataacagaaggacagaaaggacctctgaatgcaatcaaaaatattatcttgtgcaaaactgatgaaattttgactcttagaaaataatttattttaaattacaaaaatatattttatcggaaacagaagttgagttcattatcaaggcacttttaaaaaattacacagtataggtaaatttaaacatgaaaataatgccatttttaaaaaccaggagaaccaaaacaaacacttaaaaataagaaagttacatatgaaacatataaagcatatggcaaagttggacatatgagcaactgcattttttgatttctaaagcctaatacccattgcacagctatgccagtggcactaaggaaggggagaagaggctcagcaaagttttgcaaatgtaagaaatctgatttgtcaatatataataattgcatgtttgaaagaaaaattctaagttgggtcctaattatttttgtgtatcatagcctaagatttataagtgatttaaaaaaatagtattcttagtcacaaatgaaggtagggaacatgtatcatttattctttaaaatgtttttctaaaaaacattaaacaatatccttgtcaaatatagaagctagattattactcttgtagctgcacttcaaaactgtaaaattaatgatctttggatattcaatacagggagaaaaaggtccccaagggcctgcagggagagatggagttcaaggtcctgttggtctcccagggccagctggtcctgccggctcccctggggaagacggagacaaggttggtattcattattcgtgttagtagatcctgtgaaaaagcttaatttttgtcaagaattctagataattctaatctttatgattaggcgccaggtgaaaggttacctttttcaaagtttcacacacattttcatatgctcaaaagttttatttaagaggttcagaattagtatctgttccataaaatagtatgtgatacataaacagaaaactcaattaaaagaacagtggtagtgagaaaaactagtagatgccaaaatttatttatttttaagaatatccttctgaaatgaatataaaataaaaaaattaattacatgtatatggttagtcctcatgtcttggatattgtacaataagacttaagaatgagctacatatttacttcataatcctgttatcatttaccaacatgtgagtacagactctaagctcctaattccaaatgtatggctgtgtgttaaatgtttcaattgaatacatcattatattattttaaaatattatttaaaaatttttaaaccagcactctgataatgtgcatcattttagcatctggaaaattagcagaaaagaattttttccattattttgtttttatttttattttttacttttttgagagagagagtctttttttgtcgcccaggctggagtgcagtggtgcaacagggctcactgcagcctcaaactcctggacttgagcgatcctcccacctcagcttcccaagtagctgagactacaagcatgcctcaccatgtgcagctaactttttaaaaacatttatttgtaggacagggtctcactatgcttcctaggctgatcttaaactcctgggcccaacctttcacctcaacctcccaaaacctgggattacaggtgcgcgacccagaacctagctggtaaagtaatttttgattaatgtgtaattatagattttatatgtcagtgtatttccgttaccagtttatacaggtaatatttgagacaaaattgatttttgaattataaattcagttgtagtatactttgaagttaaacggacttgtctgttaacatattagtcaatattagaaagctagaagcagtgggaacccaagattttccattttaaacagtgacattacacactagcatgtaattatattaaaggtaaaatttaactgtttgatgataattaagacaatgcaatagcatgttagagataaactctaagtcaaatctttcaatttcagggtgaaattggtgagccgggacaaaaaggcagcaagggtgacaagggagaaaatgtgagtttcctacttcttactgagagaacattatttatttaacaacttttactgtttaccattgatatttttatatagtgctacttactttcctagccaatacttataataccaatactacattacctctgcagttatatcattctataattttatatatttgtgaagttttctatttctgtgattaagtaaagtatgatgattgtaaggccattatttataactctgctatagcacatgaaagagtaacataatgaaatagtcttttttgtatgattatgagaaattttgtatacatatatttaccaaaattaacagtattactatgttctacatgtatacaaattggtcacttattcccatatgttataaatacttattttaaaatttttcatttaaatcataaaacttcaatataattttggttgttcattcaaatggtgtgttcactcttgtctttatgatgtttttctttggtcactaccagtatatattctctttaaattatgtatttaaacatgttcctacttcttaaatgaaatatgttagatgatgatactgtcacatgcttcagcacttccttactaatttatactctctaaagaatatctgtggacattattttctaagttctttttttttaatttttttttccctttaagtgttcatgtatttgctctctgatagaaacataaattgggggagtacagagatatgtccttcaagttttttttttcacctagtatggaagtttatacattatccccagcaatttcattctaacagaccagtctggttctattttgtgatccatcagtctgatgcttttagggttggatttactgcctacattaacacataacggaaagaagatttttattagaattgatggaatcccaaactgaagagttaccatagtcctatgagatgaatttttctaactaaaaagaaaacactagaatgaaaagagaaaaagcttgtagtaataattgtagtatttaatgcataattcatttttatatgcagtgaaacaaaacaccaacaaacaggtgatagcactgatactccagatccatgctgtaaaattatgacaagaaattgtgtacagaaaaccggctgcatatgtttgatgcagttagtattgactatacatttacaaaatgtattttggtatctgccttagtctgttttgtgttactataaatgaatacccgaggctggataatttataaggaaaatagggttacttggcttacagttcagcaggttgtacaaagaagcctggggctggcatctgcttggcttatggtgagggcttttgttctgtgtcaaaacatggcagagaagttcaaaggggaaccgggcctgaacaaggagggaccaaaccctacaggagtgctgactttaaaacaaccctctttcatgggaactaattcattccttcaagaaacaattcaatctccccagagcaagaactcaatcgctatgcagctattcctgatggatccaccttaagaaccaaaacacctccatttaggccccacccccaacactgggaattaaatttcaacatgagttttagtggggacaaaccatatccaaacgatagcagtaaattactttagattccatttagatttcttaattataaataaatactatggatttaattagactaccttatacactcgacagaagccacatttttaaaagttttatttactccttaaaagcaatgctaaaatgactgcatggccattatatgggccagcaaatctcaaatatttttgccttaggacccttgcatactcggaaaggtttttaggagcccaaaaagcttttgtctatgtgggttactatcatatgaatgaaagctgatatatttaaaatatttatgtattgatttatttataattaagaataataagcccaaagcacttttaataaaaactagctatatttttgcaaataaaaatatatagtcccaagagtaccattgttacatttgttttgtctagcttaatagaagaagctatattctcatatctagttcagcctgtggtgacatgtttttttggttgaaagcatgaagaaaatctaagctcacataaattatgtagttataaaagggaggggcattttcagtaccttttcagataattttgaatattctttgattttacatagaaattttataagtggtagtttttcttaagggtcaattgcacaacagaatttgaaacaaaaacagtgagctttttgtgctattacattatattccactgctctatcttgcacgttgatgactatgtttcatacataattttgtaatatccttcattgataatttggaaattattgatttcctgggtaaggtcctcaaagtgttgacacaattctttatgcgatattaatatcataggaaaatactttcagattgggaagatataaagcctgcaatggcagatgagacatttccaaaattctaatttttgctttaaagtttgaacgttattgacagtaaatactgtcagttgttttctttgaaatccaaggcttcctttatattgaataacatctgccaaaatcatacttactatttataatcacacttattatttataactgattatttataatcacatttattatttataactaaaaaatcatagtttttctgtcagccgctctttcaagtaaaaatagcgttccatgtaaaagttagtgttccatgtaaaagttcagccagcatttcaaactataatccaaatgtttgtagggcttttttttttttttgagacaagcactgtacttcagtatgaggcaaacatactttatgtatgtcttcagtttgtcaaatgaatatgaaaagacacatattcaaggtcaatatttaataatattaataactttcaaagcctcatcaatacaattacatccatgacattcttagatggaacagccatttttgtgttgattgaaagtatatcgtggtaaaatacaattaatgctattacaaatggtagctaccaacatgataagcgctaagttaccagcaactttattcaccacggattttacatcattagtgcaaaagtctatatagttaaaggacaaaaaatgccttactgttgttatgagaagagttatgaactagcagaatcctaaaagcatatcaagaactcccaatggcccatgaaccagcttttcaaaatcttgctttaacagttcccccacaagtagtagttacaatacagaacaatacagttcaatgacagttttatttctttaatgcctgaaccttttatattgcctgacccgttactaatgtaagaaaatgagacaatgaagaaatatctatgcatgtaagactcataatgtcttttgaaaactattgctcaaaataagaggtcctggtgtacttaatatataacaattagtttacatgtgtacgcatatgtgaaaattccaaattttcatatattactacattctatctgtatagaaccctcagaattctgatattcactcagaagacagtatatagacaattttttcatgggccctttcctaatcatatttatctcattaaagaaatctgatactttgaaaattttcaaatgcgaatcttacaacttgatgtctgatagcatagaaatctatcttgaagattcacaacattacaaatgagagtgttttcaacaaatgtcaacttaaaattgatttcaaatgtgaaagcttgagtctcaaggagtaaaataaataatgattgcagtaaatgcaaaataattctatgtgatgcttctttttttccaaaggagtgcagaagtgtttgatcttggtaggctaaatgttctgtttcatatggctgaggctcttctggcttcactttaaaaattacttatttttatctcactgcagggccctcccggtcccccaggtcttcaaggaccagttggtgcccctggaattgctgtgagtattccacattgttcagcaaatctaaatccttacagctccctgattaaatttgtatactgtcccataaccagtcaattttgtggggtaataagttttgtttgtatgtttgacattaaatcaaatttaaattatcaaatatagctagccgtgctgattcttagaaacaaaacatattgtaacttcatttgaaagtaagtaataatttgttgagaattccttaatagataataattcagaaaattatttccgttattagacagcttttacttcacttggtatacaggatcaaatcaaaatcagttatgatccagaagcaaagaaaataagcaaaacaaacaatagtatattggagcagataatgggcattcagtctactttttacttggttattcttaaatacatctgctttgattaaattagaaatggccacattttttaatgactcatatcgtaatgattttttccagtttgtgataatgtttctttctcttctctagggaggtgatggtgaaccaggtcctagaggacagcaggggatgtttgggcaaaaaggtgatgagggtgccagaggcttccctggacctcctggtccaataggtcttcaggtaagatgatcctgtcattgtttactccatcatttctacctacttctcaccaggttttctggtggatgtaaaacaaagtatttttttctttttttctacgtaagaacttgggtacaatgtttatccataaagatcattttatttttaaatgagcagctgaacttgaaatcattttatcatgtatgattaattctcctgaacatgtatcagccctcgctcctgattctggagtatttttagacccaccttaattattacacttcctttcttcactcccattttgtttggaaaatgaattacaaccttgcctaagtctgatacttaaaagtaagataggaggagccaagatggccgaataggaacagctccagtctacagctcccagcgtgagcgacgcagaatacaggtgatttctgcattttcatctgaggtaccgggttcatctcactagggagtgccagacagtgggcgcaggtcagtgggtgcgcgcaccgtgtgcgagccgaagcagggccaggcattgcctcacttgggaagcaaaaggggtcagggagttccctttctgagtcaaagaaaggggtgacggactcacctggaaaatcgggtcactcccaccggaatactgcacttttccgaccggcttaaaaaacggcgcaccacgagattatatccggcacctggctcagagggtcctacgcccacggagtctcgctgattgctagcacagcagtctgagatcaaactgcaaggtggcagcgaggctgggggaggggcgcccgccattgcccaggcttgcttaggtaaacaaagcagccaggaagctcgagctgggtggagcccaccacagctcaaggaggcctgcctgcctctgtaggctccacctctggggggcagagcactgacaaacaagacaacagtaacctctgcagacttaaatgtccctgtctgaaagcttttaagagagcagtggttctcccagcacgcagctggagatctgagaacaggcagactgcctcctcaagtgggtccctgacccctgacccccgagcagcctaactgggaggcaccccccagcaggggcacactgacacctcacacggcagggtattccaacagacctgtagctgagggtcctgtctgttagaaggaaaactaacaaacagaaaggacatccacaccaaaaacccatctgtacatcaccatcatcaaagaccaaaagtagataaaaccacaaagatggggaaaaaacagaacagaaaaactggaaactctaaaaagcagagcacctctcctcctccaaaggaacgcagttcctcaccagcaatggaacaaagctggatggagaatgactttgatgagctgagagaagaaggcttcagacgatcaaattactctgagctacgggaggacattcaaaccaaaggcaaagaagttgaaaactttgaaaaaaatttagaagaaggtataactagaataaccaatacagggaagtgcttaaaggagctgatggagctgaaaaccaaggctcgagaactacgtgaagaatgcagaagcctcaggagccgatgcgatcaactggaagaaagggtatcagcgagggaagatgaaatgaatgaaatgaagcaagaagggaagtttagagaaaaaagaataaaaagaaatgagcaaagcctccaagaaatatgggactatgtgaaaagaccaaatctacgtctgattggtgtacctgaaagtgatagggagaatggaaccaagttggaaaacactctgcaggatattatccaggagaacttccccaatctagcaaggcaggccaatgttcagattcaggaaatacagagaatgccacaaagacactccacgagaagaacaactccaagacacataattgtcagattcaccaaagttgaaatgaaggaaaaaatgttaagggcagccagagagaaaggtcgggttaccctcaaagggaagcccatcagactaacagcggatctctcggcagaagccctacaagccagaagagagtgggggccaatattcaacatcttaaagaaaagaattttcaacccagaacttcatatccagccaaactaaccttcataagtgaaggagaaataaaatcctttacagacaagcaaatgctgagagattttgtcaccaccaggcctgccctaaaagagctcctgaaggcagtgctaaacatggaaaggaacaaccggcaccagccactgcaaaatcaggccaaaatgtaaagaccatcgagactaggaagaaagtgcatcaactaacgagcaaaataaccagctaacatcataatgacaggatcaaattcacacataacaatattaactttaaatgtaaatggactaaatgctccaattaaaagacacagactggcaaattggataaagagtcaagacccatcagtgtgctgtattcaggaaacccatctcacgtgcagagacacacataggctcaaaataaaaggatggaggaagatctaccaagcaaatggaaaacaaaaaaaggcagggcttgcaatcctagtctctgataaaacagactttaaaccaacaaagatcaaaagagacaaagaaggccattacataatgctaaagggatcaattcaacaagaagagctaactatcctaaatatatatgcacccaatacaggagcaccaagattcataaagcaagtcctgagtgacctacaaagagacttaactcccacacattaataatgggagactttaacaccccactgtcaacattagacagatcaacgagacagaaagtcaacaaggatacccaggaattgaactcagctctgcaccaagtggacctaatagacatctacagaactctctaccccaaatcaacagaatatacatttttttcagcaccacaaaacacctattccaaaattgaccacatacttggaagtaaagctctcctcagcaaatgtataagaagagagattataacaaactatctctcagaccacagtgcaatcaaactagaactcaggattaagaatctcactcaaaaccgctcaactacatggaaactgaacaacctgctcctgaatgactactgggtacataacaaaatgaaggcagaaataaagatgttctttgaaaccaatgagaacaaagacacaatataccagaatctctgggacgcattcaaagcagtgggtagagggaaatttatagcactaaatgcccacaagagaaagcaggaaagatccaaaattgacaccctaacatcacaattaaaagaactagaaaagcaagagcaaacacattcaaaagctagcagaaggcaagaaataactaaaatcagagcagaactgaaggaaatagagacacaaaaaacccttcaaaaaattaatgaatccaggagctggttttttgaaaggatcaacaaaattgatagacccctagcaagactaataaagaaaaaaagagagaagaatcaaatagacgcaataaaaaatgataaaggggatatcaccaccgatcccacagaaatacaaactaccatcagagaatactgcaaacacctctacgcaaataaactagaaaatctagaagaaatggataaattccttgacacatacactctcccaagactaaaccaggaagaagttgaatctctgaatagaccaataacaggatctgaaattgtggcaataatcaatagcttaccaaccaaaaagagtgcaggaccagatggattcacagccgaattctaccagaggtacaaggaggaactggtaccattccttctgaaactattccaatcaacagaaaaagagggaatcctccctaattcattttatgaggccagcatcattctgatactaaagccgggcagagacacaaccaaaaaagagaattttagaccaatatccttgatgaacattgatgcaaaaatcctcaataaaatactggcaaaatgaatccagcagcacatcaaaaagcttatccaccatgatgaagtgggcttcatccctgggatgcaaggctggttcaatatacgcaaatcaataaatgtaatccagcatataaacagagccaaagacaaaaaccacatgattatctcaatagatgcagaaaaagcctttgacaaaattcaacaaccattcatgctaaaaactctcaataaattaggtattgatgggacgtatttcaaaataataagagctatctatgacaaacccacagccaatatcatactgaatgggcaaaaactggaagtattccctttgaaaacgggcacaagacagggatgccttctctcaccactcctattcaacatagtgttgaaagttctggccagggcagttaggcaggagaaggaaataaagggtattcaattaggaaaagaggaagtcaaattgtccctgtttgcagatgacatgattgtatatctagaaaaccccattgtctcagcccaaaatctccttaagctgataagcaactttagcaaagtctcaggatacaaaatcaatgtactaaaatcacaagcattcttatgcaccaacaacagacaaacagagagccaaattatgagtgaactcccattcacaattgcttcaaagagaataaaatacctaggaatccaacttacaaggatgtgaaggtcctcttcaaggagaaatacaaaccactgctcaatgaaataaaagaggatacaaacaaatggaagaacattccatgcaaatgggtaggaagaatcaatatcatgaaaatggccatactgcccaaggtaatttacagattcaatgccatccccatcaagctaccaatgcctttcttcacagaattggaaaaaactactttaaagttcatatggaaccaaaaaagagcccgcattgccaagtcaatcctaagccaaaaaaacaaagctggaggcattacactacctgacttcaaactatactacaaggctacagtaaccaaaacagcatggtactggtaccaaaacagagatatagatcaatggaacagaacagagccctcagaaataatgccgcatatctacaactatctgttctttgacaaacctgagaaaaacaaacaatggggaaaggattccctatttaataaatggtgctgggagaactggctagccatatgtagaaagctgaaaatggatcccttccttacaccttatacaaaaatcaattcaagatggattaaagacttaaacgttagacctaaaaccataaaaaccctaggagaaaacctaggcattaccattcaggacataggcatgggcaaggacttcatgtctaaaacaccaaaagcaatggcaacaaaagccaaaattgacaaatgggatctaattaaactaaagagcttctgcacagcaaaataaactaccgtcagagtgaacaggcaacctacaaaatgggagaaaattttcacaacctactcatctgacaaagggctaatatccagaatctacaatgaactcaaacaaatttacaagaaaaaaacaaccccatcaaaaagtgggcaaaggacatgaacagacacttctcaaaagaagacatctatgcagccaaaaaacacatgaaaaaatgctcatcatcactggccatcagagaaatgcaaatcaaaaccacaatgagataccatctcacaccagttagaatggcaatcattaaaaagtcaggaaacaacaggtgctggagaggatgtggagaaataggaacacttttacactgttggtgggactgtacactagttcaaccattgtcgaagtcagtgtggcgattcctcagggatctagaactagaaataccatttgacccagctatcccattactgggtatatatgcaaaggattagaaatcatgctgctgtacatgcacacgtatgtttattgtagcactattgacaacagcaaagacttggaaccaacccaaatgtccaacaatgatagactggattaataaaatgtggcacatatacaccatgaaatactatgcagccataaaaaatgatgagttcatgtcctttgtagggacatggatgaaattggaaatcatcattctcagtaaactatcgcaagaacaaaaaaccaaacaccgcatattctcactcataggtgggaattgaacaatgagatcacatggacacaggaaggggaatatcacactctggggactgtggtggggtggggggagaggggagggatagcattgggagatatacctaatgctagatgacgagttagtgggtgcagcacaccagcattgcacatgtatacatatgtaactaacctgcacaatgtgcacatgtaccctaaaacttaaagtataataaaaaaaaaagtaagatattagaagggtcctctcataggactcataacaagataagttagtacttcagattgatagcaataggaggaacacgaagtcccaggcagacaggggcggatctggagacactttcgcttcctttccccggagaaactcgacctatgactctttactttcaagatggctaaaaaaattgaaagcattttgagaaatgggatcctgccaaaagcaactgccaacagcacatgttaaacaataataggtaaaataaattaagtcgatcatttaagatcgattattatcattttaaaattgtaatttgaattttatgaaacatatccaggaaaataaatattaaattgtagaacactacagcctctgttcaaatatatcttacaattggactcttaaacaacatgttccagaacagataccttctattctgggtttttggttttttttttgtttttttgagacggcgtctcacgctgtcacccaggctgcagtgcagtggcctgctctcggctcactgcaagctccgcttcccaggttcatgccattctccggagacggggtttcaccgtgttagccaggatggtctcgatctcctgacctcgtgatccgcccacctcagcctcccaaagtgctgggattacaggcgtgagccactgcgcctggccgtattctggcttgtttttttaccttccgcttgatgttcactgcttcctataaaccttggaaacgttgagcttttttcttccacttgcttattctgtctcttcctagtgatccacggaaagattatagcattttgtcttaaatgatattgaggtcccacatgagggtaacttatggtatattatttgtattagaaatggtaaattaagtcatctagttcactgaacctagaaatttgtgaacttgtagaaaagcctatgtaaattgaatttatataaaaaatttgtatctttatttttataaatatgattataaaattactgtgttgatattaaatatcttatgtgcataattacacaaattgcatcatgaacacaatataatgaattattactgttaaaacacttaataaatgtttatcagataacaagattttttatttatctcattttaaggtcaaaataattctttttaaacttggagagtgcaaaaacttcactttcatatttgtcatgtttaggttatacttgttagacaattatacgtaaacagtcataagtaccacatatcaatatgtgtgtgaagcatacatatttgaaaacaaggcattaaaattagattgtcaatgggtacattaatattcattttcttttttttatttgactactctgaatcctataaaactgtaatttagaaacagttctcatgattaaagtaggtgtcttgtagattatgtttataaaatattcaataaacatcatcttcattttcacgaagaaatgtgctctttgatgagggtgactcaagaaatcaattcatttaaaaaagtgattgcattttcccacagctacttctgtaaatcaggaaactgaatgatgctaatgtaattaacatgttcacaattgcatctgcctcctttaattgagtcttcatggcagaatagatattagcaattataatagacataaataaaataatctaatattcaggttacatgtcttgatttttcaatttgatgtttactgtcatctgcatatgaaggatatatacacacacacacatatatggagtgagagagagtgtgcattcttggcctaacttcatttttcaactcatcatttaagtggcaatgattttaaattgacagaccttaaaacagaatctctccacgcataaattacctctttggagaaaggtaggacatttcatgagaatggattaaccctagagtgcttttcagagtgtttagttccatgcaacaagagattttgactcattgtgtctccactaattgtaataataataattttttgtcttaatcaatacaaactatgatctaactgaattaaaaataaataaatttttttctattgggatatttttattgaactaattggaataattatatgcataaaaaagatgaaaatgcacaactgggtttgtaataaaaaaactgtgaattaatattgacataccttttaatttggggatactaaattagatgcactctatcctaaaagggtgtgaaaacctggacaaaaaataaggaatgtaattttaaatttatggtgtttttggaaacttaattatgtttaagttgcagtgtatgctatttaagaaaatggtgttaaagtgaaatatttatttaaactgtgttaaaatatacatgcatgtttaagaatttaagtttatgtgtttcatcaaattcagattttgaatttctgaaattgactgatttagaacctaaaattttttgcagtcacctacaatttttaggtctataagatctgagaaatactacctgtctttttcttccagaaacttcacttataattctagaaacagtcatcagatgatggtaacagtttgggaagtatatatagcagtctcttttcttagacatcttactgacatttgagaaaaaaatgaaattctggtacatattttttgttacaaattagtaactaagatttcctcataaaaatgaatatatgccacaattaaacaaatatataaatatattcagtaaagttccttctttacaaactgaaagtcatgtggatatagtaggttataaaaaaattttgtggatcattaccagcattgaaaaaatgaaatagaacatgataaggtaaaatagaatgaaaatatcaaaggctatcatctatgcaaaaggctaagtactgcttttttgaaactcatgtttcagctactttacatgcgcatggttagggagcattaagtaaaatacatttttcacagtggctcacagtcaaataatattcagcaattacagtgcagtgtcaagaagtcagtaatgtcacgaaagtactagcagttatttagagcttttacattgtatttttatgtctaaaatagattacatctaaaatattatgcaaacattaaaaattaattatgtatagcatatataagatgtattaatatataaataattatacactaaaaacatgaaaaactgaaaaaaatccataatcctacaatattagaaacgattactatgtttgctatttgtctgataattagcatacctattctacctacatattttacagttaaacttatgcatattcatttgtattttttatttgttgtatatattattcatgtttagagtattagtatcacattaatagtcacataacattccactactttatgtaactgaatttctttagttcttttttctaagattaaacttttggaatgacaggattttcagtatcatagctactgttagcaagaaacattttattgaatgtagctatccttattagtttattttcttagagttcattcattcaacaaacattttaatttttgattgctcctctgctagttcctaaacagttaacacctaaaagatcactgatgaatgcatgccccagagtagttcatgactgtaaatatacacaaaagtgacataagaaaatttataaatgtacaattgaagtatgtacaaagtattgttgtgacatgaaagaggaaataataatcttcatggaataatttttgggaagatcaaataagtagtcaagaactaaaataatttttcggtgaagacatagacagatgaaatttgagtgcaatctttctgtcttcctttatactgtaacacagagcttttcctaaatatcagttacagtgcaattgaatacaatggaaatagatttgaaagaatttttttgtcttttggagacggagtcttgctctgtcacccaggttggagtgcagtggcacgatcttggttcactgcaagctccacctccggagttcacaccattctcctgcctcagcctcccgagtagctgtgactacagtcgcctgccaccacgcccggctaattttttttttttttttttgtatttttagttgagacggggtttcaccggtgttagccaggatggtctcgatctcctgacctcgtgatccgcccgcctcagcctcccaaagtgctgggattacagccgtgagccactgcgcccggcctgaaagaatttttaaaagtataatatagtaggtttcatgggctcattgatttgtaagattcagaaattgaattaacaggtcaaaaattcagaagatatttataacctttgaaatgtattggaatatttattttaccagactggtacctaactataaaaacctcatatactaaaatattttgagtcaaaagattccagaaatctgtaccagggaagttctatatattatttgtacgggactgagccaatggttgggtgttcataaattcccagatcaaattaatatttagttattataactaaaaataaacaatataatattatacaaaacataaattttatttgtaaatgtaggtgtaagattttatcacatgtggtcaacatttgcatagtaggtattttaacaaatgttagtatctgaatcttaatttccatgtacttattgaactttatacttgattttatcttagaaattgaccaaacttttttttttaaagacatcagtgacttttattatttttctattatattttcttagggtctgccaggcccacctggtgaaaaaggtgaaaatggggatgttggtcccatggtaagtttttatttttggtgtttgatgggtatgtgttatatgcatggcagtcactggtttgtaaagtattatgtgttctttcattactatgtatatattattgaggtgtatataagcaactgacatgatttagttatatattagtctttagctctggattttgatttggagcaggtagagaataggtaatattcactcaagatttagataattagcaatttatacagaatcaaaaattaactactttgaaacaaattcttaatttaataattctgtcttaattagaatgctatgacttataattatttgcatttattgattctggctctctaagacctgaactgaaaatttgaaatgcatataattgtttatgaagcactaccttagataagaaaataattagcaaaggtaattgaaatccataatgaaatgtgatgactgcatgtcttaagtggccctttccttcaacattgcccccaattttcacttccttcaaaatacacattttgaaattttaacacttgtctgttaggttttattctccttaggaattacactcaaatctattatattctttgaaatgatccatatcatcattaataaacctagatataagaaatgcataaaaaactttgctggccgggagcggtggctcacgcctgtaatcccagcactttgggaggccgaggcgggcggatcacgatgtcaggagatcgagaccatcctggctaacacggtgaaaccccgtctctactaaaaatacaaaacaaaattagccgggcatggtggcgtgtgcctgtagtcccagctactcgggaggctgagacagaagaatggcgtgaacccaggaggcggagcttgcagtgagccgagatcgcgccactgcactccagcctgggcgacagagcaagactccgtctcagaaaaaaaccacttttctgattcaaataactggttaatacttccaagcagtaacagatacatagcaagttcctttccagatatggttaccatcgttccatgaatcattgatatattcttcctgattacacggtagtagataataacagaaaagcttttcaaccatggcattagaataaactgagatcttttaaaaatactaatgtccagtgaaatgtactaatgtacagtgaaaaacaaattcgctgtagactattttaatcacaactttgagataggagtttctggcatcagtattttataaaaagttttccaagttaattttactgcactgtcaggagagaaaatctttgttttacaatgaaattaaataattattcttatttctaattctagcatatagaacctaagagttgacatagaaaaagctaaaaatacctatcaacaaaaaatacttctattgagttaatgaattctaattctattcaagcaccatttatttttccaactttacattctctttatgttgtaacatattctagcatgaaatatatctagttatattgtgaacacattataccagacagtagcaataggctttcttggcccattttctaatcaaattgtttctcttgaaatcctaatttcctcatagctatgtgtaaaggctcatttgctaacatgatgttgtatccatgaaggatgacttataaccctgatgtgcttcactaactatagtttttacaagcttaaacttcttttagatttttcagtcataaaatgaaaatgttggaaacacatttgaatttggtctttgtaaacctcaatatttctctcttacaggggccacctggtcctccaggcccaagaggccctcaaggtcccaatggagctgatgtaagaactctgaaatatatgttaattattttgaagttatataggtattgttattttatagcagatgctctttgtgagttataacaatattaaactattgtttaatattaagtggttaagaactcaagggtcacctattcactccactttattatacaatgaaataaatggaatttatagtgaacaaatcatggaaaatgtaacataggtacacattttccattcaatagatatttactggtgactgagaaatgttataatgttgtgtatattaaaattactacattgttcaaaccaacatacttagactgtgccttgcatatgataactcttatgcacttgttaacagtggctttcatgtaaaagctttgcattttgtattttcagactatataatgttacagcaatatgtgcgtgataggtgcaccctttatcatgtaaaatgttttctcttaattgtataaagatgatattctccaagcttaaaaattattttaatgttataagattttgaaatataatgccatatttatcttactgttaccattaatggatccatggctttgatgatatttttccttctggccaacttttcacaatgaagaagtctatgtttccttcatgtctctggtcttcattttcttcattatttaatatctgctttaattctggcaggccagaactgagtaaaaatagactagaaagagaggaattaaaagagtttttagattttcattcttcttaggtaatttaaaagctaaaagatgttataaggggtttgtttcttgcgtggattatgtaattcttaaccagtgtcataattttgattcactacaaaatcaccgcctaaaaccaatctgactattctattggcaaagagattgaaattatgtttcaggaatcaaccagagtttgaaagtctcctgctttatcttcaaaattatagtgaatttgaaaatcagtgtaatatattgaattatttgctttccaacacatttgacaattctattaagcatcatttagtctcattctttaaatgactaagaatactcatgcatctatttctcttttttgagaacaactagacatatgtttacgaatgcattattttaataagaatatggataattacattcctttttctacactgcagggaccacaaggacccccagggtctgttggttcagttggtggtgttggagaaaaggtaaatatgttagtgacacacagtttgaaacagcatgaattaagaactgtaataatattgggtagtagtttaagtgcttctagtatgtgtgtttctaagccttttacatagttatatgattcacatgtcatctagtagttgcaaaaattaaagttaaaatgattttgcaatattgtgttttggttgccaattattatattgaatgagtgcaggcattatgttctttaagcaggaacctcacaattacggtgtccttaatatccacatttataagctgagaaagctgagccctagaggattcctgtaatttcatcaaagattttccttagaaagtgactaagctaggatacactgcagtccatgaatgtctagtaatagtactcaaaatagaagagattggttgatgtaactgacttaaagggaaaaaggaatcctgcaagccacaaaggaatgaatcattcattttgttatattttgagttatattttcattacgaatactctgacctatccttgtcacttgtcaaaatatttggcatgaaccacaatatctgggctcagaatagctttttttttcttgtgaacatgatttcatttaaaggtctgctcttccttttataaaaatgtcaaaatgattcattgatttcttatttatgcattcatgctcacttcttaatagaattttcaagaaaattatcatggatatttgcgtgctttaaaaaataaactaccaattttcagaaagggaagaattatatttataacatcatatattatgcagtgaaaacactaaaaaattccttaatatgctacttgttaaaggatatctgcagtgtagacttactctattcttaaaaatgatttcctttcttggtctcaagttttttgtgtattttatattatatttaaatttatttcttttaattaaagcatttaattctcagaaaaatgtaataagattagattgttattatattttgatatctacttcagcttgacacctgtattctagtattttgattataatcattatttgattaagataatttttaactcattagataaatcttactgcattctttgattgactgccttttttaatatattcttaaatttaaagttgtgtgttgaaactgttccagtagttggtgttgaaactgaaaacacacttttcattccattcagttgtcctagaaaacatttttcatcttgcttagtctcctatgggagagcacttgtctctgaggatatcatcagattagacaaaaggcaccaaggcacacaccttttcctcttctctttgcatcatctccttttggctctaatgctgactcaattgttgtgggagctagtctctaggattattagcttttatcggcttatcttgtttcctaaagaatttgaatgcagagggaaagttgtcattatttcagtgctactcttgaaaataggcatgaatgccaggtgtttagttctgagaaacttccttccacattgtttccatttaatttaaagcctatgtatattatagtaacactttgccaactttgactcttatgagaataattcagtcaatctgaatcattttgaatcaatcccagtcaaaatgagttacactaaaaaacacagttttaattttgctcctttcttttgatttttttttatgtgacagcacgatagaagcagaattctaaccttcatttttttgtttgtttgtttgttttttgttgttgttgatgttttttaatcaagaatagtataatttctaatagattacaaatttctaacatcagctttgattctggctgaatgtatacccatttctaattggaaaatttatttccagtcactgacaatgaagaataaaaaaaccagtatcttttagtcacattgcattttgtctaaatatatttaacctgttcttcatgtactgtaaaattgctataaataacttttgcacttcactaattttgtcaatacttggaaatatgtcaggatattttcttaagatttatacatattttataactttgtacatacagagtaatttgttgttctttctgaaaaaatatgtacctaaacaagtgctttatataatgaggtaaatagttacacgataagtgatgaagacttcataatctaacatctccttcatatatcagtgctctatcataaaacatattaattattattcttcagaatgaatagtttgtagcattttggtattagaaatatagacttaatttatataacattagtcttgttgcaatgatttattgatttgtgattttgtcccacctttcttttaaatgaaacattttagataaattttaaatttcattttagctaattgtcattttacattgtgcacacttggatctaacatactaaatggtagttttcatatattttggacaaatgaatattaatatattattctaaaaatgaaactttgtagtaaaaagctcatactttttttgaagcagaatatattttaaattttttatcacctcaagcatttatcattagaaagcacatacataaattctaagattatttaaacctatctttttaccacatatcatttcactcatttaataaaaagaaaataatcttttcacaatatccataaatttaactttatagttgataagaacgaaaagagaacaacaaaacatatagagggttactacgaaatatttcaactatttcttctgcatttctaactttctgtgatgttaccatgaattaatgtggtacataagaaaacattttggttatttcttttgctgtgcagaagctttttagtttaattaaatctcatttgtctagttgggggtttcttttgcctgtgcttttgaggtcttagtcatgaattatttgcctagaccaatgtccagaagagttttccctatgttttcttttagtatttttatagtttcaggtcttatgtttaaattcttgaatccttcttgagttgatttttgtatatggtaagagataggagtctagtttaattcttctgcttaaggcaaatcagatttctcagcaccatttattgaaaagaggatcttttcctttttgtttttgtcaactttgtcaaagattagtttgctgtaaatatgcttttttagttactacagccttgtagttgaatttgaagtcaggtagtgtgatgcctccagttttgttctttttgcttaagattgctttggcaataagactctttttttggtttcctgtgaattttaggttttttttctaattatatgaaaaatggcatgttcaatgtacatgctcaatagacttatcatatttctaaataaatattttaacatggacattttacaattgatttcaatgccaaactacttgtttcatttttaagatatgaatatcagcccttggaaacatcactaacatcattacattctactgagatgaatgatacctctctttataaataatataaatgcaatttttttttgtaagagttatccaaaaattctggaagtatttgctgttcatcttgagagatgaaataatttacacatcacactacttataataaactctggaaaagtacttgatgtctccaccattaagtgggtaatttaagaatttaaaatatttgtgtattctcacagtaagaaactatgtacacaaaatagtctctgccctgaaattatgtttgtatgtaatatgacacatttatttaagagcagtggatttgtgtcaggaatattggaaatattagagttaaaaagtaagggaaatttaggcctcacttctttttcaatttaaaagaacaatttccacctcacaattgctgagaccactagtgtgactgattttgagtggaaacatggtaaatgaatgtattgttttacttaaatgattacttgaacaagatgttatatttttgtgcattttgaattgtggggcattagcaacagactttcatagctaaaccctactagttacagagatttatttattagtccactgggctagaaaaaaagccattcatatgtaaacagggagataataaaggctatcacatttatgtgtatactcaaatggagcaattttaattaacgtctaagtacctttacatatattataattattgtctttcctctaagttctttagattcctactaaacaaatcctataaaatatcaacatatgtaccagcaagtcatctgttgatttgttgtagttaagataaataaatttacattttagcaaacaacaatttgaaagtgttcactcaataaactttattgtaatatgaatattgacacagtgcaaatacacaatattttaggaaacatgcatatgtctgttatgatggttttgtggtaatctggattaatatgccaactattaaccaaccagtgacaactacagcatcaagcctgcatatttctgtctactcacctgagaaataaaagcactggagtcactgatagaaaaatttatttttgttattaaagtttttcaatgccttttaaataatataaaaaaataagggctaatctaaaatgatatgataacatttgaattttataaatgtaaaagatcatctctgtattctaatactaatttgatcttctctatatagggtgaacctggagaagcagggaacccagggcctcctggggaagcaggtgtaggcgtaagtactgtgttattgttaacatagtgtattattggtttgggaatttcttttacagcattacaaacatgtaacaactcttagctgtggttcgaattttactttcccttcccaactcattaaggaaaatcacaaatacaaagccttgtttaataactttggatatctttacatatgtggattgataaacaaattgaaaaaatatcatatttgctgaagttagaacattaaaactatgggctgtttactgtatacattccctttgatgaactgtccataaaaggaacaaacaaagaagtcctgctgccttaaataaacgtgtcaattgtattgtgactatattattctaattagtttaaaacgcgattaaatttgcccaccaggaaatatttgacaatatctggagacacttttggtcttcaaacgtggagggttggtatccagttagtaaaggccagggataccattggacttcttaaagggcagagaacagctccccacagcaaaaattgtctggcccaacgtggtaaaaccccgtctctactaaaaagtacaaaaattagccgggcctggtggcgcgtgcctgtagtcccagctacttgggaggctgaggcaggagaatcgcttgaacctgggaggcagaggttgcagtgagctgagattgtgccactacactccaacttggtgacaaagtgatattccgtctaaaaaaaaaatatattctggcccagtgtgccaaggttaataaacttttatgcaaaacttgtaagataactcttctttccttcttcttctttttttttttttaacattgtttagggtcccaaaggagaaagaggagagaaaggggaagctggtccacctggagctgctggacctccaggtgccaaggggccaccaggtgatgatggccctaagggtaacccggtaagtgagtttggtcccctctaatgtggcatttatgccaaactcaccttggagcttttcttagaaagatttgaaatcctgagactctggaacatagatggtaaatctgacttttcatcatttcatatattcgtaagcattctcaattgaattaattctttagaaattttttggcgggagaagagaaatattctcagcaggttttgtcatgactttaacctcttcacctccagaatgtcataattttataaaaatttatttttcatttatttctttttctttcaaaacgtcattctagggtcctgttggttttcctggagatcctggtcctcctggggaacctggccctgcagtaagtatcagggaaaaatcaagaaattattttggagtgaatgtttccaatttctgtattgttaataaagaaaaaaaaatctaataacctaagtgaactcccaaaaacagaaagaaaaagaaaacataaaaagtaattgcaaatgcaggaaaatccatatagttggagactattgcaccaacactaagtgattaagctcttcatgcaacataggtacaacaattggattagattcctagactttgatgggttgtaaaaacaagttatctgagtagcatcattattattatttcaaagttacaggatctttgcttttctgtttctcttctataatgcaaatcctatttcaaactataccatatttgttcatggtgaaatgattcactgacattgtatactaatgacatcttctttcttccttatataaagagcatgctggattttaaatttgatatattaatagtagcagttttacaaatttttttgcggagagtgagaggtaccacaatctttttaaaaaaggttaaaagaatataatgattttacttgtccatctgataatttttctcaagagatggcctaacatacttttttcctgataagtagtgtgatttattgatactgagatatatcttgcttcatattttattgcctcttatagggtcaagatggtgttggtggtgacaagggtgaagatggagatcctggtcaaccggtgagtaaatgcactaatttatttttaagtttttacatagtctcaaggcattttaatgagataattagaagtaatcagcctttgaaaaacatagctctatgtatatgcacttttttgaaagaattatcaaaaaaatttttgaattcccattaaaaatcaatcttacatggagtgtttcttatttgatgtaaattaataaacagtatttataatgaaaagtgtaatcatattatactaataaggttgtcacaatatatcaaattcagttatctatccattgtgttaaaaaattaaaatcactaataatactaaaagcaaagttatttcctatcattagcaaaagttattatcccatcattagcatgaattatattaattgtgaacctaaatgaactctcaacatagtataggcctttttaaaaaaaacttgtgaatgatacaggagtgtactttgaccacatttagttatttagggagaaagtaagggagggaactcactttaggagccaaagacaatggtccctcaacacaattttgtctctggggccattcccactagatgctttgctatcacagatacaggcttattctgcatagacagacctgtggatcatatctcagcatgtgtattagtccattctcatactgctgtgaggtacacaagaatgggtaatttataatggaaagaggtttaattgactcacaattctgcatggctgggaaggcctcaggaaacttacaatatggtggaaggcgaagcaagcatgtctttcttcacatggcagtaggagagaggagtgcaaagtgaagggtgaaaagccacttattaaaccatcagatctcgtgagaactcactcactatcacaagaacagaatgtgagtaaccacccccatcactcaattacctcccactgggtccctctcaggatacatggggattataggaactacaattcaagatgagatttgggtagggacacagccaaaccatatcagtatgttatatacaacttggcatagaatgttagtgttgtacaaaaataaatttaaaagtaatagtattatgttttcacatatttatgtgatatgagcagaattattaaccatatgattatattaattagcatgcctgtttaatgcttgccagatataaattagcactttttaataggacacagttttaaataaagagaatttgattcactttgttctaactataaataattttaccatctaaatttaccagctctaactataaatatctagaggaagtttaggtatctgaaatagggctgagattttccaggaaatattgacatgtggaaatgaagaaagagggttggtttccatccagattttgaaaatttatgtgggccacaaaataatatccaattttgttaaaggtattttttcacattttatagggtcctcctggcccatctggtgaggctggcccaccaggtcctcctggaaaacgagtaagtttctttaattctttatttgaaacatatgctcattagtcaccatggataaatttatataatgtgtgtaagctgcaggcagcatgttataagaataatgagaaatatcataaatcctaaaaacaatttttaaatgtgccaaataataactaaaatagaacatattctaactatttcactgtcacaataaaaatgagaaaaacaacttctacttaaagagctttccactcctctgtgcttagaactcccctttgtacaaatgtagtagattattataaaagactttggtggtatcctgaacattaactcctattgtaatacatggggatgagctgtcaaaagtccagtgctagcttaaaacattgtaaaaacatgaatgcatcaatgaaatgaggtgaaatgagctcaggaatcagtatataatgttaaattgctttacactgtcaaacttctctggctcggaaacagtattttaatgatgtgctatagcaaaatataaataaataggtattgctgacaatattggccacagtagaccctaggagatttactttcctgtccttttctcactgatgcattcttttcataataaagcaatctctgcagacctgcctcttacagcagctatctcactttagcgtgttcttctgtaccacctgcagtctattttcaaaccggcacatgagtaaaatatgtgataaacatcaaaatatatttatgaggctgattccctcttcagtaatccaaagtcacagggcaattggggccactactgttttctaatggtatctttatttcaggggtatttttcacactgaatatcctcacattaaacatagaatgtgaatgggttttacttgtctctcagcaatacaaatttgaatcaatatttacaaacatttctctttccaaaaatatatttaatttataataaaacttgtctctgaaaacaatttgctcttcattggccaagtacattttcttacattttcttttattattattattgtgtctacaaccccaaagcatggtctcagtgtcaatagatttatccccaaacaaccatgggactattattcttagaaagtaattggaaagtgtacatgatttttgatatccattgcctctttctgctgtaagtccagctgctcataaaactgtgatgcatagctgtctattatactatttcagaccttttggaagaataactataaaaaacatccttgagaatgagttgaaatacttcttggaacaacaggaaatcattttttttatcttttttctggcctcagatggtgggatgctatataatgtggttagtagaacaatgcagtcacaatagctggctttcaacccagctacaccagttattacctgtattacgttgggcaaattgtgtattttctgtttctcagaggacctaacacccaccctagtgttgggttgaacataagataaatcatgtaacacaataaaaaaaaaaatcacctcataactgttgctgtgttagcactgagttatggcatagttattaaacacttctgagcacagggataatcatcatacaagtataaagtatgatgcttttaatataagcaaggaaattaaaccttgcttcaaaatgtggtagcagctagaaaaggagagactatatcaaaattgattttaaatattctattacatattggcagcttctcagctcatttcattactcaagtcaaactctcagcaagtgctatctagtctagtttcattttaaaatatgtcaaaaaagtacatatttatattttttaataaatttaagtaattatcatttgatatttgagatgaagtatcttaacatggtaacagagttatagaatgtatttgtttctttagccattcagtggtgggtcacatgaattattcattttgaaaacaactgaatatttttgaaaaattttttaagtaatagaataaaataacctattaaagagtattaatgcaaacataaaaaagagacatatatgtgtgaaccagtaaatctcatgagccttttagtataataatatgacccaaaacttatatataaacctataactatcacataaaaatattatatgttaaaactattaaactgttgtgtgaagctattttgacataataatgttgacgctattgatattataaactttcaaaatattttcagtcatatttactaattttaaaatcatgataatataatgcagcaaatttttattctttattataacatatttttaaaatatatttgtgtttattactttggaatggataatgatcgacaattataattttagtgaataactcagactcctaggaagacctcccctcaattctggaattgagaaaatatcgtagaaaattcaatacatattcagatttagattatatatttgctctacaacaccgaagtagttttgagtaagagaaagtccatgtatttacattcttattcatttacatctgagttggacctctgcaatttctagttaaatgagatataattttaaaacatgagttaattgctgattcttaattcttgtctcttataatgaaggatgcattttcatatattagaaataatcagttataataaaatatagtagtatattaatgaaaatataatgtacaaaaaaatttagttatttgttgctttaagaacatgaagcatccttttttagtacatttagtgttgctataaaagaatacctgaggctgggtaatttataaagaaaagaggtttatctagctcacagttctgcaggctctacaggaagcatgatgccaacatctgcttctggtgagggcctcaggctgctcccactcatgctggaaggagaagcagagggggtgtgtgcagtgataacaaggtgacagaggaagcaagaaggggcagcagaggtgccaggcactttttaacaaccagctctctcaggaactaacagagtgagaagccactcacacccatcctggaaaggtattaatctattcataagaaatccatccccatgactcagacacctcctattgggctctaccgccaagatttggaataaaatttcaacatgaggtttggaggggagaaatatccatattatagcaataatcaataattattttttcatccaaaattaaagattacatgatattgtgaaattgtaagcaattggtaaatttttctttagatataaatgtcaaatacaattagaaaatagaaaaattatgttactctcattcctgccagtatttctaactagacaacattgttaactcccctgattaaaatgtatttaaaaacccttaaaaaaataaaattatggttaagtggatttatgaggtgggtaaaaaataagaaattaagataatttacttgcaaagttatacttgatttttttatatagatatataggcaatggtctcattgaagaaaaagaccagaaaatacctaagggtatatgtaaaccttatttgtaacaaattggacattacacatcaatggaaagtggatagactattgaaaaaattctgctgggagaaatgattttctatatggaaaaagattaaatatacctcatctagctcatttaacagaattcagttctaattgatttataatcataaatgtcaaaggtaaactttgaaatattttaccaaaaattatttgagagtaattttttgacctccagtcataaattctgatcacacaggtgtaatcagaaaggaatagattgatgtatcaaatatatgaccattgaaatttcctatttatccaaaaatacttagaagacattggaacaaaaagatccgattaggagaaaatatttgtaacatacaggaaacatgcatagaataatttgttagaatatctaagtatttcttacaaattataatagcaagaaaaaacaatagaaaaaaatatgccaaaggcatgaaaaagtatttgacacaaataccccatgaaacaagaaaaaatatttgtagaaatcaggaaagtgtgtaccagaaattacactgagatactatatcacatacaccaattaacaaaaatgtactctgacaaaccaagtattgggaagaatgttttcaaaaaacagtgaagattattatgcatggctgttttgagttactgggcactgccactttagggaaatagttctatgttacctaatagaatctaacatgaactttttctgtcatctggtaattccatttctaagcacatatcctagatgacattttgcacatatccaccaaaagactcaaggaataatgttttgttatccttgttaataataactgtagacaatataagttaattgaagtatattaataaactaaaattttgtatgctaataaaataaatgcactacagatgcatgcataacagatgaatctcaaaatctaatattaaacattaagcagaataaatatgtgtatgtgtatatgtatgtcttgtgtgtgtatgtgtatataacgttgaactggaaaatatatattacattatttcatttatataatatgcagaattgttacagatatgtttagcattttaacataagtggtaaacatgataaagaaacataagccaatgattaacaaaaatttaggatggtagttacttctgtggaaaaaaagtgggttgcaattgttacgagtggtatgtaggaagcttctaagttaatgatactgtattatgtagtgcatttaggttgaaagcctaaaataatataatattgagtcattctagcatatgttctttaacattatgagatagtacattagttgagttccctttgatttttgataaattattttaaaataacctcataaaaattttagcactgttctatcctctctttttaaattacaatttatagaaagatgatgagctattttaatccattctagtcactttgtaaacaaaattagaaggctttgtattcatgaattaataataacatgagaacggtggtgactatgcattgcttacaaagctattcacattcattttcatataatagaaaaatcaaccttaggtcagcccgatcgagcataatatgcagggttttctcttttaaaatatggcaacaataaattgaaactgaaaaccatttaacacaatatgttaaattgttttctatattaggtttggataaactggcatgcttaattgcttctttctgttttacataataatctattttcttcaccagagtaaaatatattttaatggtgtgaaaaattactcttatgtcaacaatcttattaccaaaactatgatttgttctgatttaacactagcaattaatgcttgcaccattaatttacagcctacagcactagttaatttagtcaataactctacctcaacataaacaaataggtggcttagcttgaaaaaagaaaaagaaaaagaaaaaaaaaatggaaacacaggtcaagtgcagtggctgacacctgtaatcccagcactttcagagacttaggcaggagtattgcttaagcccaggactttgagacaacatagtgagaccctcatcttcacagaaacttttaaaaattacccaggtgtggtggcacatgcctgtagtcccagctacttgggaggctgaggtgggaggattgcatgagcctgggaggtccaggctgcagtgagtcatgattgttctactgtactccaatctgaacaacagagggagaccctctctcaagaaaacaaaaagtaaacccaaaaattgaagcccaaattacttactaacattatttgcaacctataaactgacactccttttatcttaatttcactgaaaagtagagaccagaatgctgttgcatcagaatcagacagaacttgtttcaaatccttgctacttaaaaatgtgacttgggataagttaatttatttgagtctcagttttctcatttaaaaagcaggcataataactaatttacaatactgaagtgaggactaaattaagaaaatgtatatttaaagcacaaagcctaatgcctgaatctatcagaatctcaaacagtggatgttattattaagcattgaataagggtttccaattgtagtatcatttataaactaaataaacctattattaaataaaatataaaataaggagtaaaatattttcttccaatatcctagttgtatacatgaaatgatagctcgttagcaataaattcatggtaaagttagttttgtttattgttgattttgctttgttgtttgagttcagcagtgaccaatactgaactaactgggtgatacacatacaaaaaggatatagaatattaattaactgcactttcagagtatagtatattgtgattttaaggaaatttatatttgtaatactaatataaattggttatcccttggtacaaattcatgtgacatatatggtaaagaatttcctatgagaacaattaccaaaaatagaagcatttaaactcatgacaacttcatgtatattttaataaaatggatttgtcaaacagtagatatttaagaccagtttaagaaataataaagttattaaactatgagtcaactgagaaagaggtatttggtcacacccacgatcccagcacttttttttttttttttaacttatatgggtgctttagcaactcagggtacaaataaaggcaccactaattttccttcctccctccctccttcttttcttcctttcttccttccttcctttctctctctttcctttttttttaatttttattttattattattatactttaagttttagggtacatgtgcacaacctgtaggtttgttacatatgtatacatgtgccatgttggtgtgctgcacccagtaactcgtcatttagcattaggtatatctcctaatgctatccctcccccctccccccaccccacaacagtccctggtgtgtgatgttccctttcctgtgtccatgtgttctcattgttcagttcccacctatgagtgagaacatgcggtgtttggttttttgtccttgcgatagtttgctgagaatgatggtttccagtttcatccatgtccctacaaaggacatgaactcatcattttttatggctgcatagtattccatggtgtatatgtaccacattttcttaatccagtctattgttgtcagacatttaggttggttccaagtctttgctattgtgaatagtgccgctataaacatatgtgtgcatgtgtctatagcagcatgatttataatcctttgggtatatacccagtaatgggatggctgggtcaaatggtatttctagttctagatccctgaggaattgccacaccgacttccacaatggttgaactagtttacagtcccaccaacagtgtaaaagtgttcctatttctccacatcctctccagcacctgttgtttcctgactttttaatgatcaccattctaactggtgtgagatggtatctcattgtggttttgatttgcatttctctgatggccagtgatgatgagcattttttcatgtgttttttggctgcataaatatcttcttttgagaactgtctgttcatatccttcacccactttttgatggggttgtttgtttttttcttgtaaatttgtttgagttcattgtagattctggatattagccctttgtcagataagtaggttgcaaaaattttctcccattctgtaggttgcctgttcactctgatggtagtttcttttgctgtgcagaatctctttagtttaattagatcccatttgtcaattttggcttttgttgccattgcttttggtgttttagacatgaagtccttgcccatgcctatgtcctgaatagtattgcctaggttttcttctgtggtttatatggttttaggtctaacatttaagtctttaatccatcttgaattaatttttgtataaaactggctagccatatgtagaaagctaaaactggatcccttccttacaccttatacaaaatttaattcaagatcccagcactttgagaggctgaagcaagaggatcacttgagctcaggagtaggagatcagcctgggcaacatggtgaaaccctgtctctacaaaaaaatacaaaaattagtcaggtatgatgacatgagcctgtagtcctaggtactctgaggctgaggtgggagaatagcttgagcccaggagttcgaggctgcagtgagccaagatagcaccactgctgtccagcctgagcaactgagtgagaccctgtgtcgaaaagaagaaagtactgtacataagtgagatcactctgtttatacactgtacatatgtgaggtcactttgtctataccacaggtgaacacaaacatctaatcatagaggggtataatgcagagtgaattctatgaattgaaactgatttgagaatactgtcaccacaaacctttgagttcaatatctgatgcagcaatcaatttaataccacttttgtgaaaatagcaagagcatatttctatgcagtaaggtaatatctgttctacaggcttgtgctttggttgaatacagatttgccttacaatctgtttccctttagtccatctagaaatgttaatcttaaattaggtttgtatatattttgtggaaattaacatttctcagatccttactttcccactgtggaaacaataaaaaagccacaattttttttataatatcttatggcggaagtagcaatgacaagaaatgtgttcaaaagtattaccactttttttctgtgattgaatcttacgcatgaatgataataaaacttcctaacagaatattgatcataatgttgtaagtggcagtgatactgagaaagaaaattctagtggttattaaacaagtaggagaattacattatcattcatagtacatgtactttctgtcatgcatttgtaatacttgagaatgaatgtatatttccttaagggactggaagatttgtacagcttgtttcaataagccatggacttctaatactaaagttatcattttagctagttccatgtccttttactgaaaaaaaaatctagagctgaccaaaataatttaagcattataacctgaaaatgcacatattaaatggaaatttgaattcggctcatattgccaaagggaagttcacaataaaaaattaaaatggtaactgttgttattaactggttataatgacagatgaagttttaacttattatgcacacacacatcatatatataatatagtatatatatatgtgtgtgtaccttgtatatgcatgtactatgtgtgtgtatatatatatatgcacacacatataaagtattattatatatagtattaattcaaatttcaaattcagacattttcttttacaaagtcctttgaaaaattctaatataaatgtatagatagaaagtacattgtaataataaaataaattataaatcctcttaaaatttctgtgtggtacaaaactgtgccttccaagtaaggtcattatgaaaacaaggtctgcatttaatttgagaatcactgaagagattatatacctttctaggagattcatagttcaagaagagtattaaaggttctaaaaattttgaatcaaatttatttatttttaagctattttaaatattaatgtttttaatacttttgggaaaattgttctaattttttaatgtggggaaacaaaaattcttgttcatttaacatgttcaaaaatgtctgtttatccaaatagctaactgtatactaaatttggcagtttattttgctaatattaaaaaatcaagatctccatatgccaagactctgcctttctccaattctcttttttcctccctaactctcaagtcaccacatactcatgcaccctaatattctgactcatagcaagacaaatgcatagatgcttagctactggcctaagtgaactcttaacaggtccatagagactatcatgtactttccattcttattcctttaagcatgcacgtgagtgatcagaaggtaaagtgttagaagaagccatccctctctcatcaactcacactgtaagattcagatcagagactaggtttttaggaaaatcctctatactgccaaactggatcattgtacctattttgtacactgatatcatctttgtttattttacagtgttctatttgttaatttttgtatctgtgtttgtgactaaattctgtgaatttcttagggatttgattttacatgttatgtatatgcatagcacattctggaatataagggatatttaaatgtttgtgacatgagtggaaaaatgattaaattacagaatcatactgtaaaacttgaatagtgaaaagaagattatattagatgctttatatgaagaatagttctcttgagtagaaaaatctgttataacaataactactggtggagaattaactaggccctattttagtgggttatgtttttatgaggtatttttcaataagaacactcattacttcatcaaagtgcagcaagagctcaccagattaagtttctgccccttcgtttatgcaaacatatgaggaataagttattgggacaacaatttgtccgtaggcattctttgttttgtactactataacagaataacacagactctgtaatgtataataagcacagatttattggctgaaggatgggacatccaagattgagtggccacattttgcaagggccttgttgcagtgtcataccatggtggaaggacaaggagcagacttgaaagagcaagacatcaaattcacagcctcagttttttttttttttttttagacagagttttgcttttatttcccaggctggagcacaatcgtgcaatctcggctcactgcaagttctgcctcccgggttcaagcgattctcctgcctcagcctcccgagtagctgggattacaggtgcccaccaccacgcccagctaattttttgtatttttagtagagacgggtttcactgtgttggcccagctggtctcgaactcctggcctgaggcgatccgcctgccttggtctcccaaaatgctgggattacaggaatgaactgctgtgcctggctgcctcagcccttttatatttattattaatcaattcatgagccctcatgaccttaacaccttctattaggtcccacttgacttactactctctcaggaaaagtatatctgcttttgtcgtcatttttcttatttttttgtcatctggaaaacatataaggaataaataaaattgggaaaaatgagaaaaagaacagaacaaagtcatttaataaaatttttactatgacagatatttgttcacagaaggaagaaattatttagacaagaagccctttattttaatcacaacttagttgctgtattgtcatttagttatgttaaaattctctgggctcttctaatactgattttctttctcctttgaagtaaaggtgatattttccttccaattttagacaatagatggcttgcttttttaaaagccatgtattgatatatcttttctactataaacttcatgtttgtaaatgcaatcttttcaggttaagcccacatatcattatgttactagtttaaggaaaaactgtcattgaataaggaaaagctattatttcattgaatgtcattatttctatttcccaaataataatcattattattgttgtatctactttgcatatgttattattttaaagatcacaccaaaataatttctggctcaacattttaacaatagaacaaatttgaaattcatggctcaacacagaattccttttgcttaaatatgaaatttgaaagatgtcctttgaagttttaatgtatatattattattagcatattgattccacctcaagagattacccatagaatttatacattttttatctttgggttgaggtacaatgaatgtctaataatagatagttataggaatgatattgagaaaatcattactaatgatgtcatcattgactctttctgagataaaatgagttcgtggaattgaagtgcttgatactcattttattcatctttactttgtgtataaattcatggggtacacgtgcaattttgctatactgatattacattgtgatgaagtctgggccttcagtgcatccatcactgaagcaatgcacgttgtaccctccaagcaacctctcatcatccaccactattgatactcagtttaaaatacgatataaaaggctgggatatattcaccattaaaatattaatatggcatctgaaaaggaacagtcaccctcctgcctcaccttattctcaccaattaacaccaccatgactactctctgcaaccaccaaccccaatctcagttaatgattttgagcacaatttattatgaaaattaaggtaaatgaatggaaaaacaagacagtctgagggaaaaaaatgaaaagcagtttcttagagatcattaagtttctttttcagtcattctgtacttatgcttttggatggcatctaaagtgtaatttttttttcaattttacttctaatattaggatttaaaaagtgatatttgctttcattttacctatttatgtgaactgcatagttctcaaaaatgaaaatactgtgtctgttgaccatcataatttaaaatattgtgtttctttagttgttatgtgatcctgtaagaatgcatgaacatatacatattctaagattaaggaaggggccattcttaaaacacatatgagaataaaagtagaatacaagtagatatattaaattaatttctaataataaacataaatgatatatcagtatttaacacactcagggtggcgattttaattcatcagcatttctttaaaaactttatttttactgctttcttatattgatgtgaagtgattgttgtatacttaatttgtgctgtttttcagtattctaagaggaagtttgtacataaaatgggttttgattttcgttattatgttttaaaccaaatagtgatagaaaactacaatttattcatctgttacaaactaaagtttagtgtttgtaaacaagtgctcattaacattacttttatatgtgatacatattttacaataaatcttatgtctatagggtcctcctggagctgcaggtgcagagggaagacaaggtgaaaaaggtgctaaggtaaaaaaaaaataatatatacataatatatattatatattatatatacaaggtattatatttgaaaatttcatgcataaactgatctacttttttcagtgcatttaataaaataataaaagtattttctcatcactaatgtgctcccatattttactttctaacagggggaagcaggtgcagaaggtcctcctggaaaaaccggcccagtcggtcctcagggacctgcaggaaagcctggtccagaaggtcttcggggcatccctggtcctgtggtgagcatctgtgttaaaaagatgccattttgaaaataacatttttattttaaaaaaattttgaatgaaggtgtctatgttagcattatttcataagttataacgtggataattttgtgggaattctgtaaatataatgtaaaaaagatattcttcatatatttaagtatatcatttatttaataagttcatggtgaaacactaacttataaagagaaaatagaaaaccaaattttaaaatttcaatgatgtgaaatgtttatatataacctatgtatatgtatatataggtgtgtatttgaatatagacatatacacatattaaagacacaaaattatttacaatatttgtagatgtcctccatatggtggaacttaagggtgatatttcctttgttttcttattgtatttctaaaatttaaaataaataaataaatatgtattattttattaattttaaaaatcaatcatttttattttctctagggagaacaaggtctccctggagctgcaggccaagatggaccacctggtcctatggtgagtaagatcttttcagtcatttaaaaagtgagaatttctaaaacaaaattgtttattagctagaatttttgacattttagtttataaataggtttgtattttttctaatagtccaagaagtatattattttgtcttagaggaaagtaatcctaactgataggtatatggaaaataaaccacttgatcagaagatttgtttctttcttatgcactttggatgaaaaaatatttccactctgaatgaaatgccactaatgatccagccagtgtttttcctagtctggatagttccctaaaacgtttgcagttacacttattttcctggcatttcactttaaaaagtatgctggcaccagcatagagtgattctttgacgaaacaaattgttctcttcgtgagtcatacaggctgaaacataaaacagtaaaactcagtgaaaaaagatatggctactgtaacactgaagcttggtcactatcattaaatctgtgtgcaaacaacatgcttgagaaatgcaataaagtattttgttgactgggatactattcataggtggagtttattataggatctgaggctatacttgatacaaatttgggcaaaaagtgagaataaaagacttgccctttaaaataattccttactaggtgacttagttgctttatatatatatatatttttttttcttatggtagagatttttgagtgtcattatccagtaatagttaagtgtggagtgattaatcaaaatggcaaatcatacatatagcactcgtatgtgtggtgagtattagttaagtcctgctatatggtattttaaaatttattcaaatgccttttatcataaatatattaattatctcagagatagaaacatacgcacaaagccatcacaactgggattcacagttcattcaggaaaaattttggttattccttttaacaaagatgccacagcatctttggtatgcaaagcatacctaccaaatatttcataagttttaaagagattatttaaactttcactgaagaatttaaagatcacttatttagtaactagataaaagttatcaaattttggtagatttcaagcaggagatgatcagttctgcccattatctcatcagcttaggaaaagggccccggttgaagcaggatcagctccacatctgtaccattacttatgaatattctccttagatatgataaactcataactgcccagagtcagagcctggaaggaaaaaataccttgccttaatgtcactctaaaatttgccagagattttttcttgttatttcagattttccggtaaatattttgacctttctgcagatgaaataaaaagcaccatgctggagatttccttcagctaatattaaaaataaaaccttctgacataccacctgatttggcatacaaacttttgtatttttgtcttttaaataaatgtgagtttacagcgcaagaggacagaataatttccaaatcctttaggtaaagcggaatgataaacatcagaagtgggctgcatgggcacattccattctgactgcttgttttatggcgagtacttacgatgtgaatataatgtgtagttttttcatagctttaattagtcttgacttgtgatatgtaatctcaatgaaaatgctacttggtcttcatgaggtgaggatgggcagataaatcatcttcaaaatgccatttatggcaatttaatgagcctttcaactcaactaagaaagatctattttagtaggtaatttttaaatcagaatgagaagtaacttattatggttactagttaaggttatcgactctagagccaaactcctgggttcagaaacaatcactaccacttacttggtggatgactttaggaacattaccttttttttttttttggctttaagttcttcatttataaaatgggaatattgctagcctctatccagtgatatttctaaagtttaagtgagttcaattgggatatggatatcttctaccccatggggttcttaagttaattaaatgaattgcttgtaaatcacttttatatcaacaattagcactagtagcaccaaatcaagaatcattaaatgaatgaaataatgataaatatgttgaaaaccaatcaattttatattcttagtggaaagtaactaaatttgacctcattcatgcatgtgtgtcatcaataaaccttatgcaagttgttgactattaaagcaaatggaagagatcaacaagtacaattatacttagaaaagttagagtgttaacatgttaagtactatgatagactcaagcagaggatactagatatacacagagttggaccatttaaatgtaatttcctctagggacccttccctgtttagaaatatgatacgattattaaagaaggaacagagaggtgtaagtgtggataacacagtggctgtgagattaacgagatttggaaattcatagaggtttctattaatctctgaaattaatctgtgtgaaagctataataataatactttctccatgatgaattttttcctcattataacatatattcacatccatatccaaatctacacaggcttcaatttgcttatcattggagttccacaagtacctattgggtctcttttccccttctagaagctgcctgtaactacctactgtattgtttctactggtgagataaagctaccaagacattccccttttccccaccttttaaatacaacctagctgttcagtaagtacaacttacctactttcatctctccagattggcagctacctatttagacaattgaaatatctaacagagcatccattagacacatagataagtttaacaattttataggaagtttctggatatgaaattctttggggtagagtaaaacaaactgattttttaaactcttaaaatgatttctgcttggtgtctgcccacactatgttatcagctctactagagtcagatgtgatatagtatttattttttacttgaaaaagtacatatttcacatggtaaaaaacttgtttataaacatgaattcaacatatatttacatttgtatatgtgtataggtgtacacacacacactcacacacactacaaatgtgtacttagatcaccgtatggaactgaagattgacaaatagcacataagggttgggcatggtggctcacgcctgtaatcccagctactcgggaggctgaggtgggagaatagcttgaacctgggaggcggaggtttcagtaagccaagatcacaccattgcactccagcctgggtgactgagcgagactctgtttcaaaaataaaaaagataaatagcacatatggaagctaatcaaaagctaaggatgatgatcagcctatataaataactctattggagtttgtttttttaagtgggactctgctagagtcggtataatataattttattagggtttcttaaaggatttttaaaattttcattagaattttgtattggttgaattatactactattttagtagtcaaccaacattaaatgggaataagactgaatgtttcagtatttatttattgagacagagtctcactctatcaccggggctggagtgcagtggcacaatcacgagtcactacaaccttgtccttctaggcttaggtgatcctcccgcctcagcctctcggttagctggggctgcaggtttgtgccactgcaccaggctaatttttgtcatttttagtacagataggtttttgacagttgcccaggctgctcttggactccagggctcaagcgatccatccacctctgtctcccaaagtgctgggattacaggcgtgagccaccaagcctggccaattgagtgttttaaagagaagaatgaagatgtctaaattctaccctctgatacaaagtcaaaattaaaatgatttagtcacttttaaaactaaaatgtatttgattttttgaagtcagaattaacatctgtcttagctttaaggttttattttgttttgttttgtattcttttaagactctatttgttttaatgcagctgaaaaattattcagcatttatgttcaaaaaagattatttagtattatcacacatttctgcttttgataacaaaatgttaaataaaatatctgatagcattattttttaaacaataaaaacttaaaagataggatgggatactgaattagagtttatttctttaatcctacatttaagttatctgtagacaagggtgatatgggtagcattccacaatgattaaaaaggtttaaataaaaaagcatttgcttttcaccagattaaatattattccacaattttatattttaaataaagtgtaggatctgcagtttctttaaatttcaatgaactagagttttgaaatgcagatcaaagcaaatattccagaaagtataatactgcaggggaaaatgtttgcttgtgtattctagacacttaagaatgtatcatccctgttttccttttcactttattacttatgaattatgtatttccctgggggttttcaatttacaatatccgaaagagaaaaatagaaaatatgtatagttagaataacatttttatatgcagagttgatgtttttgatctgtttcaggttcaaagggttatttataactgctctcgatatcataccaatttctatttccagctgatgaaaataaaaactgattttgtttggcaaactcatctttagatgtagtttataatgttaagagagattattagcttagataaattaatattcattatctttaacttcatgaataatatttatggaaaggatttttaatgcatttaaaacacaaataatgtctaatatatttttcactaagcttgagcaattagaatcactagtagttcttttcttgccattttagctttttctattagaatgggatgagaaagttgacaggtatttatctgtagcatatctaaaactaatgataataattcaaatttatattatgcttcactgtttatacaatttttactatggagagcaaagccccagtaatggggagataactatatacttgaaagtgaatttgacaatttcattgtggtctttttgtctgagatttaacagggcaggatgattgtttattcttatacaaaagagaatgtaactaaattcatataaatttgactctgaggattagtaattttctccttattagaagattattattaagcatatctacacttaaaactgcatgtgcttgtatgaaaataacttttgtctgttgttaattgaataatatagggaaattgtccactttaatacttagagaattccaaattcagttatgaattaaaaaacataagtatacctaataatagtctaaaataccattgttacacaagggctaatttatattaacactattcttgctctttcctgatattcacagttttggtttgagaagcaggcttcagaaactaaagaatagggagggcccatcctcattcatgcagcagctctatgagataggaattgtagtccccagcttgtagatgagaaaactgaagctctatttgtccaattaatttaagtagctaagaagagagtttggtatctatgccagaccttatctattctgaacccatacttttcctagtacatcatactgcttggatcagatccatagttcttaaggctttaaattcacaaaaattatggaccaggatataatgtgctgttttacactgaagaaatagtgtttccagatagaggaaaatattactcatggtagccttgtagaagatacaatagtggtgactcatgatgtactttggtaaaaagttaaaacaatttgctgtcatagagccatgatgaaaattattactgaaattataattgagctaattgaattctatcaaaataattctaattcatagagaaaccatatgaacagtttgcttttgttgctgggtgccttaggacttgcggcaagcagtagtgacatagtgacatatctaggttatcgtggccctaatttcataagtcacatataaatcatttttttagcatcagtttcacttccaacagcatctgttgcctgcgtagtttcacttgtataatttcacaaggactgtattttgtgttgtcttcaaaattgtagtacaacaatttggcttgttagtgtggtgtgtttttgtgttttgttttgtttactttctctagcgacagggtgttcctctgtcacccatgcaggagtgcagtggtgtgatcttagctcaccgaagcctcaaactcatgggttcaagtgaccctcctcccttagcctctcaagtagctgggacagcaggtgcacaccaccaattattctagtttttgcttttttttttttttttgtagacaaaatgtctcactgtgttacccaggctggttgcaaattcctaggttcaagcggtcctcccacctcaggctctcaaattgctaggattacaggtgtgagccattgtgcctggcctagagtacaacaatttatagataaaacagtttgttcgaaagtcatcagtatgaaaatttccttgggcgggggggcaggacagagttggttgctaaagtcatgccataattttcatagaatgtaagttaaaaggataaatgtcttagtctgggactattaaaaacgttaaattattgaaatagaagtatatttatataaaaaataaatttctttattaatttcataaatcatttagatatgaggtgcaatttagaaattacagctgaaagtaccatcttgatgtagtttgtaacgtcttatactttagcttagagaaattaatagtcatgatctctaacttcttcatgaataatatacatgcaatattttattgggattattaagtattcgtagtatatgtctctctccagtaatcatagtgaaggacatctgatttcaagagaacaaagaataagaattgagatcagaattcagaaaattggccatggcctagaagaattacagagttccatgttttaatttagtatatataggaattatcttcttattctatagaatattattaggcaaccattctaacatatacaaatagaggttgttatttaaatacaaaccaaacagtgtattaaaattttgtctattttttttcctgtggttatcaaagatctattgactgttcaaaagtttattgagttttttcaaaaatgttactaaaaatatcataaacttttaaattcatgtaacataaaaatgtttgagtaactggatatataatttggaaatcccttccaaaactagtgtacttaaaaattgacactttattcttaactgaaaagccatataaccatgttctatttctaactttacattcatttaatcaaaattatcaatattatggttacaaattaaaccatagtgttttaaatatataaatttacttagaagccttaaaaataaagcaacattaatcattactattttcaactccgtattttcaaaactaaactaggtctgtgactagttataggattctctaattcatacctactctgtttttgttttggggttttttttttgttattatttagggacctcctggcttacctggtctcaaaggtgaccctggctccaagggtgaaaaggtgagaataaaagaatgtgttattaataaaagaatatgcttttatatactaatagccctgcttttgcagattaaaatcattcaaaagaaaatttcaaacaatatcttcattctaaccctgaaaaaagcttcaatccttagcttcccagatgtatgtagaggggagaaaatatgcaaatagtgaaaaatgtgctggaattcagtgctatatcttctcaaggttccattatagcaaccatatgtagaaagcatatggttatactaaaataactattcagaaaataaacagactgaataacaaaatatctatttttatgtttttaaatgtgaaaataaaaattttaaactagaaatatctttcaaatactaatttgatgtactagaatttatgctgagttgcaccaagtacttagagaaattagcctttttaaaaatggtattattattgtttggattatttttaaatcttcaaatgccttttaaagactgcagagtctctgaagagtagaaattatttcatattaaatgagatgcctattaaaataatgagttttctgttatttattcaacttatattataggagatcattattggtttagagattcctcaaatggaacacttaaaatgatatttttagaaagcattttgttttgtaatatttccaatgcttaataaagccctcacttaaagtaagcagtaaaagatccagttaggtgatgagaaggagattcttaactgtatatttcattcagaagggtattttaatgttgttttatcagcattgttcatttttatgctttagaaatttaatgtgcaaatattttataactaaaattttatgaagatagtaatgtacatgttattattttttttctctgcctttcaaagggacatcctggtttaattggcctgattggtcctccaggagaacaaggggaaaaaggtgaccgagggctccctggaactcaaggatctccaggagcaaaaggggatggggtgagtaaaaatataggttattttttctactcatttccaataatacacacacacacacacacacacacacagtcctttaagtatgatcaaagaaagaatttagagtgtcttaattctaatttaagtcagtaatgttcttaaaaagatatttttattcagccctagagtaaataaattttaaaatatttaagttagaaaccataaaaattacagttgagtattatttaaacaaacatgtactaaattcccatcacctgtaaatcatattctgagggataaaggaatatacacattaacacatatagattgaaaacaaaaacctcattgatattgtagcaacataggaaaaatcctgattattttgcacaagttattttttagattcaccatggaaaaatgtttaagccattcataaatatttttgcattctctaaattttacagtgtatgctgttatgaaaatattgaaaagttatgaaaacatgaaaatgaaatagctgagaaaatccctttaaattggctgattctctctctagggaattcctggtcctgctggtcccttaggtccacctggtcctccaggtttaccagtaagtacaagacaaaataaccttataaggtagggttaagttacaaatataacagagacacaaatgctccagatttttatctgtgcttttgcatttgcattttgtagggtcctcaaggcccaaagggtaacaaaggctctactgtaagtacttttccctttgacaatttaattttgcattgaaacctatttaattgcctcttctttatttatgtcctctctcttctttctaacagggacccgctggccagaaaggtgacagtggtcttccagggcctcctgggtctccagtaagtatatgttaacaagagtgatgttctgacagtttgcatctggaagctgccaatgatttctctgaacttataagatagacaaaaagcacattctgccaaaagtgctgattttataggaaacattatatcatttaagtaatcaaatctacatgccaagacttaaattttaattgatttcactcttcaaatataaatgccttaattgtatattatagtcttgtttttattattttttcaagagaatcatatactattttgtcacgttaatgaaaccaacttattttatgccgtaaagatacatttttacttgactctaggaataatgacaaaaattcagatgcttcacattttttcctagtgcattataaagatactaataaaaacaatagtaatagctaccactttattaatactaaaatgttctaggcttcacataactaattaaatggtagaattaaaatataggtccatgtgaaagaaatgttattcttctttcttgagctaaaatctttccaactatatgtatactagtttgctagggctaccatagcaaagtaccacagagtcggtggctcaaaccacaaaaatgtattgtctcccagtgttggaggctagaagtcctagaacaaggtgtcagcagtgttggttccttctgaggtccatggcggaagggtctgttctgcacttctcttcttggcttgtggtggctgtctttcccctgtgtctcttcacattatcttccctctttgggtgtatctgtgtttaaatttctcctttttataagaatatcacttatattggattagggcccactctagcgatgttatcttaactaattatattttcagtgactgtatttccaaatgggattacattctgagatactgagaattaggacttcaacattacaaatttttgtgggatacaattcaacccatgacaatatgataactatttgatatagctctgctcgtaatgtaaattcaagtcgggttgcattgattttaagtttgttaatttataatgatttaagtcacacatatttgaagcaaactaatgtgtacatattttttaaagtttaatgttttataatataaattatcatcaaatataatacacagttgattagatagcgcaatagctttaaagtgctgttctaatcctcagagactttacaatctagttgtggagttagggcatataaatgatgactaattaataaacaagagactaacatatataacatatctacacaaatctgtgctatattattgtatagataaagggtgagaaatcatctaacttattcacctacctcaatatctccaccaagttcatcatagaagaatctatgacgtttatatatttataaacttatcctatagcataaattttgtagctaatgaaaagctaaaccaactctaatttcttataacaaaaacataaccagtaataattaatatctgcagaatattccactttatgaaacaattgcactcacattatcttctttacagggtccacctggtgaagtcattcagcctttaccaatcttgtcctccaaaaaaacgagaagacatactgaaggcatgcaagcagatgcagatgataatattcttgattactcggatggaatggaagaaatatttggttccctcaattccctgaaacaagacattgagcatatgaaatttccaatgggtactcagaccaatccagcccgaacttgtaaagacctgcaactcagccatcctgacttcccagatggtatgtaaataatacatgacaaagcaaatgtaccgagcccctgagtttctgaggtgcattggcagctcattcattctagttaaatgtttaatacagtctctaaataaaatgaaacagttattaattatcttctagacagaaaaaatcatttatactgcataaatcaagatttgctttggaaaatccttgtctgttaaatgggattttattaaattatgacaagatcatttttggatgattacagctaacacaaatgtactttgcttgtaataactatcacagaatggatactgtgtatacacacatgtgtatattgtaatatgattactaacttcatgttaatgtgaatacttacattaatatgattattattttagattaatatgaatatatggatatgtgtaaatagcataactgatgtatatttgatctatcagtttggcaatgatttggtgaacagaatattaagaactgggatagcttggggcaaaaatgtatctttaattgagccacagatattccaaacagctgtgaatagcttacttactaataacaattaggataattcatcataccaactctttgacaaaacctttatatacctattggtcagagaaagaaagagtttcaggttgctaagttagttgactaaactcttacaattattaaagtagcaaggggcagatcttcatctgatttttaaatttcccactgcatgttgaactattttgtctcccctttactctgtagaaaatattgttttgcactaccaatcatataatgtcagttataactgtgatctaagtaactcaatgcagatagaaaagttcagtgtagttcagaaacagccagcataaaaaaaaggatgtcacaaaaatcttcttatcttaatcaagcatagcctgttaaaggtaaaacacaggtaattattagcgttcctatacaaactggtatctaacatcttcatgtttataatatgtttatctgaaaaatatacatttagtttagtgatttataaggagatttacttttaactggtgttatttaagcaaaagatgtagatgatttagataattcaatgttatatactcctaaaaaccatgtaagatatatcaaaggtttacagtggttatctctacttggtaaaatcttagatgattttttttatttccttgtatttttttcctgggaattctaatttgtttcagacatgattatattaatggtataatctgaaaaaatatagatgtttttgttaaagatattaaagttatgcgactattagaatacttttcctgtttatatacaagtagtagcagaagataaagcaggttgatattgcattgtttagagttccagcaccaagataagcaatttgagcttttaaaatattaaaagttcataaccagtggacttatataattcaaatatttcaaatgaagtggcagcatgaaaaacagttggaagtataaaggtagaaataattcgattcctttccttctcagtataaaggtcaaagctgacacccctataaaaaaaaaggttaacaagagaaaaatattaaaaatgtatttgattatagttcaacataacataggcgccttcagattcaagctcgaaagatacagaggaagctatctgattttatgcttaggttcgataaggcagggacagctgtgtagaaatgcaatataatattggacaaaaaaagggtatgagctaatgatactaatccgagtagggaaacctagtaaggccttctgttcagatactccctggcctgtgttgtagtattccatcctcccaggtacggggtagaacccctctggaataagggttttaatttctttatggccagctgttacacagaaaggtgggtgaaggttatgttaacagtggcaaatccatatggtatactaagggttataggagtgaaagtttattaaaaagtttcagaacagaaatgaaagaaagtaaagtacacttggaagagggtcaagcggacgactggagggcttcaagtgcatggtttgacctttgacttggggttttctacattggcatgcttctgaggtttgcatctcttctcgcctgattcctcccttggggtgggctgcccacaagtgcagtgggctgccagcacttgggaggggccacacacacattttgtttcctggagctgtgcgcatgctcacttgaggcgtcagtttagtgttcccagaggaaggttatttaccagttaaactccaaccatttgcatcttagtgcacatgcttgagcccagtagcccacctcctgagatcgtataaagaagctgctggtcaccagtttcaggtgttttctatgaggaacaggaagactgccattccctggcaccagctgcaaccaattgttttagcaagacagtttaacaactgcctgaccttcatctgatggtcgcctgacattcctggtgggattggcagggctctcctgccctgtttatgtctgactacctactataacagttagagtagtatgtttaggttttatagctggctttgcaaaaaaggggttctggtttctatgacccactttggggaggagggattctaatttccatgacttgcctcgagggagaatgagggatgagagacaggagggcagaggtcagagaaaaactgcctcagcggctttcactttggggtatcattttctgagtcccaacagaaggaagcaaagtaatgtttacatgtatatcacttttggctcctagtaacttttgttaactaaagccgtattgtcagttatctaaagaataactttgttactcccactattttccatgcttactcacataacaccaaatgaatggtgatgattattcacataataaaatgtgttctgcaacatttcagcaatggcattaatagcaggctgcattaaaatataaagtagtccttcttaggaccccccttcaaagagagagtacatttattgcaagaagttttttttttttataaaataaggcagaggtatgatctctgaggctaagtagatacgatatcacctccactgttacaaatgaataaactaggaagaaaatatattgattacactactcagattacttaagtagtaaataatacttatgagatttggagtcaagtatatcttatttcaatatgcatgcaatttattacacagggataaatggaatgttaatatttgaggagatgatatttaagttgaaaccaaaaagtgataggcatgctaagaattttaaaaaggtattccaggtagaacatatggggcatttgcaaagctttgaggcagacaagagaaagtatcactctttattaaaaaccgtaccccaatatgcccaaaagcttaaaaggcaaaagatctattaatatgtattttccttatttctctttctaacaaaatttgacatctaatgcattcaacaatgatgtcaatgaatttttatatgacatattttttgctaccttctaggtgaatattggattgatcctaaccaaggttgctcaggagattccttcaaagtttactgtaatttcacatctggtggtgagacttgcatttatccagacaaaaaatctgagggagtaagtaccaatctgttttggtggtgaatgttgacagttcctgccatgttttgcaatattgaactaaacaggaaaattatactgtcatattttcatttatctgcttttcttacaaaataattagagtacttcatttgcataaacatgaataagcaccaaattgatgcacagagttaacaaatacttctcttctttattttttacccagatgtattctttctgcacctgcttgctcactaaaattctatggatttccatgacacagcacagctgaatctcaaattttagtgccactaaagtgttcttctgcccaattaccacatcagagacctcacagctgcatattacacccaaaatatctaattttataaagaattaaacttttatatacaagtcttttctgcacttacatattttttaaatatttagtttctttaaacaaattctttaatttttacctaacattattaccagtacactgagttctgtcttcaaagctaaatgcaaatcattaatgtaaagaaagtttgttcacgagcataactatattctccaaacattttataagtggacattttgtctttattggtattcatgtaataaatctcattcttcctagtaaatggtgtggacaatagaggcacagaaactccttaaggcaaaacaagtagctttatgtgtgactaatggttttgggagaaaagttaagtttctgagtaaagagtgggtagtaagggcaggagaaaaaacaacttccatcttccaacactacttggcatgtaatgaagcacagtaaagctcccctagcctccagagaaatgtggaaaaacagaaaatgttgtttcttacacagataactcgagttccctattgtgaagacttatataccctttgctgttcttcacaaagcagaacaataaatgcagatctataagattctaaatattctaaccagcagggagtaattcaggttgcttccaatcagtgcctttcacacagtatatctccttagctactggctaaatactttcaaacatgttccttggctatggagtgaagatggtacctgccttgcttgatgaagctgactgacattttgaggatttcctttgcaaagggtttctgagtgttccaccaatgtcccctataacccttagtatgcctatacccggttgtctttccccttttcctttagagctgataaagacaacaaaaaggaaatgactcaatcttcactacatagaatgtacaggatctatctcaaatttttctctttgtctcattttgtataatctaatttgtgtcattttaaaacgattttaagcactctttattttcttagtcttactgaaaatgaattatatgtatataaaaatactgtttatattgtaaattttcacctactcactaacttttctgttcctttgcaacaggtaagaatttcatcatggccaaaggagaaaccaggaagttggtttagtgaatttaagaggggaaaactggtatgttattacctcaacatgaaacgatttttcacgaactcaagaagtgacattctgattatgtatttctggactttaacagtgaaagtctaaattatgctaaatgaggattccctgtggtctctagtttgttccacttaatatctcttagaccactgtggtatcttaaagcaacctaacatttttgtataaaagtaaatggaaatatgctaaatttatggaaaacaaggatcaaatcatgcatacaatttattaagtacctgagatagacatcataaaaattgattatgttagaaatatcaggtataaagaatataatatctacttaatatcttcctattatttcactttctgtctgcttgaaacctaattccttctttattcttcatatcaataagttggaatgtgcaactttttctgattgttctggcacaaatttaaagatttccatacaattaccagttcatttcaataattttctaaagatattttaagattagatgtcaaaattaaattaatctttaaaaggtgtttaatcatatacatgtgtttaaagtattttatttagaagttattgaatttaaagtgttttccagttatccagataattattcagttgtttaattttctttgaaaagctattattttccatttatgattatttatacagttattatttctatacaaactcatgcatattaaccacttttattgacactctccactggagttataattctctattacagtcttcaagttgcatattaaatatccatattacattattatctttgtataagtttaaaaatatatacagatagaactctatgtgtgtggattgaattttcccagtagatttttttcttcaacccccaagaatactcatgatctgacctactattcagtaagaactaagtaaaatctgttttaaggaagaaagtaacaaataactgcctttacattgacctaatctataatctaggtgaacatcttaaccttttttttttcaaatttaagtgtatatgttacagctgaactcagatatttttattaccaaaaataagacaatttataaagatgatatgagacagttgctaataaattacaactgagactattttcctgctataatttcagaataagtattgactcaacaaatattaacttgccttgtcttgcacattatgcctgctgctggcaatacaatgttgaatacacacatcatctaaaaatagataaacaggcatttctgaaaatattaataacctttgaggactatagccccaaaatgaaaagtgtaggaacatgtttacagatttgggtaaagttgatacattttgaaatgtttgaaaggaatagtcaaaatcaaacaacataaaaccagctaatctttgcattattctgagattccttggttttcattgttccattattttaccaatttttttttcaaaaagatacagaaatatattgaaacatttcttggaaactaaagcattttttatagtgtttactgtttaggaaactaagacttagagataaagtggttttttcaaagataagcagtggctacagtaacttaggtgggatacaattcataaaatcttgtctctgggtcttctgaccctcaatgtacactttttttcattaggttaaggtgggtcttttgattcatctacatgcttctggcatcacagttcactgtctgcagtgatttaattctttgtagcataaaagaggaaaagagtcattaggtgtctttttattcctttattcctagctttcatacttagatgttgaaggaaattccatcaatatggtgcaaatgacattcctgaaacttctgactgcctctgctcggcaaaatttcacctaccactgtcatcagtcagcagcctggtatgatgtgtcatcaggaagttatgacaaagcacttcgcttcctgggatcaaatgatgaggagatgtcctatgacaataatccttttatcaaaacactgtatgatggttgtgcggtgagtataagttctgcttgtctcccttcacagagatgataggcagcatgtcaccgtttcagtcggtccttagccagatttttctcatgaaatggacgtcagttgttattaacatttgttgcttaatcttgacatgttaaactatggtatgtgagaaaccagtaatgttaacacacacacagttatgcacatagacactctgaaacatttttaaaggcatacagaaggtaatcttggattatatgttattttattctgacatttgaatcatatcacagctagttattcctaaaatgaaaaagaaaataaaaacacttatttcatttgcctccttattgctgattttaaaatgacagataaaggaatcaccattataccatttataatatcaataatttttagccctatattttgtttataagaagcttgttaatttgtactatatcagtttgagatccagtatcattattgttatctctatcttatagaactaccttgttcacacacataagattttacataagaaaataataaataggtgccctaaaaagttcattgctttagctgagtattgatgactgaagagaagtcacaattgtaaataagtaagttcatgttttcatcaaaatgagtggagtgcaagtagaatgaagaagagagagtaaagcaaatgaatggagcaagagttgggaaaagcttttccaatatagtttattgttaaatattcataaaattaacatatagcagaagaaatttttttgacatttgaccttgtgtgttatagttgtgaacctgtatttaactttttctgtaagagaatttgactatgtatatcttaactataatggtaaagatgtattatttatactggaggggctgggtgtggtgtcttacccctgtaatcccagaactttgggcagccatggcgggcagatcacctgaggtcaggagttcaagaccagcctggccaacaaagtgaaacctcatctactaaaaatacaaaaagtagctgggcatggtggcacatgccagtaggtccagctactcaggagactgaggcaggagaatggcttgaaaccaggaggcagaagttgcagtgagctgagatcactgctctccagcctgagcaacagagcaaaacttcatctcaaaaaaaaaaaaagaaagaaaagaaaaagaatatatatatatatatatatatatatatgaggattcaataccaacatcaattttcatattaaattgtatttattatgaaactcaagactctttttaattacaaaatatatagcactatcatagttaagtaattacagctaagtattaaatgtactaatcaatattcaaaatttagaactatacagtgataagaattattacatagataatagaaaatttgtttttctattctcttctctctcagcttcttacctccactcagaagcccaagaaaaaataagatgcatttaaaaatattaaaagattgtataactttttatttctgctttattttacagtccagaaaaggctatgaaaagactgtcattgaaatcaatacaccaaaaattgatcaagtacctattgttgatgtcatgatcaatgactttggtgatcagaatcagaagttcggatttgaagttggtcctgtttgttttcttggctaagattaagacaaagaacatatcaaatcaacagaaaatataccttggtgccaccaacccattttgtgccacatgcaagttttgaataaggatggtatagaaaacaacgctgcatatacaggtaccatttaggaaataccgatgcctttgtgggggcagaatcacatggcaaaagctttgaaaatcataaagatataagttggtgtggctaagatggaaacagggctgattcttgattcccaattctcaactctccttttcctatttgaatttctttggtgctgtagaaaacaaaaaaagaaaaatatatattcataaaaaatatggtgctcattctcatccatccaggatgtactaaaacagtgtgtttaataaattgtaattattttgtgtacagttctatactgttatctgtgtccatttccaaaacttgcacgtgtccctgaattccatctgactctaattttatgagaattgcagaactctgatggcaataaatatatgtattatgaaaaaataaagttgtaatttctgatgactctaagtccctttctttggttaataataaaatgcctttgtatatattgatgttgaagagttcaattatttgatgtcgccaacaaaattctcagagggcaaaaatctggaagacttttggaagcacactctgatcaactcttctctgccgacagtcattttgctgaatttcagccaaaaatattatgcattttgatgctttattcaaggctatacctcaaactttttcttctcagaatccaggatttcacaggatacttgtatatatggaaaacaagcaagtttatatttttggacagggaaatgtgtgtaagaaagtatattaacaaatcaatgcctccgtcaagcaaacaatcatatgtatactttttttctacgttatctcatctccttgttttcagtgtgcttcaataatgcaggttaatattaaagatggaaattaagcaattatttatgaatttgtgcaatgttagattttcttatcaatcaagttcttgaatttgattctaagttgcatattataacagtctcgaaaattattttacttgcccaacaaatattacttttttcctttcaagataattttataaatcatttgacctacctaattgctaaatgaataacatatggtggactgttattaagagtatttgttttaagtcattcaggaaaatctaaacttttttttccactaaggtatttactttaaggtagcttgaaatagcaatacaatttaaaaattaaaaactgaattttgtatctattttaagtaatatatgtaagacttgaaaataaatgttttatttcttatataaagtgttaaattaattgataccagatttcactggaacagtttcaactgataatttatgacaaaagaacatacctgtaatattgaaattaaaaagtgaaatttgtcataaagaatttcttttatttttgaaatcgagtttgtaaatgtccttttaagaagggagatatgaatccaataaataaactcaagtcttggctacctgga

SEQ ID NO: 24 - DNA, 236150 bp, Homo sapiens
gacggaactccttccattgcaaaagctcggcgcggcctcgggagctgcccggcggccccggaccgaggcagccctcccctttaaaagaagcggaggacaggattgggatccttgaaacccgaaacccagaaacagcatcggagcggaaaccagaggggaaaccttgaactcctccagacaattgcttccggggagttgcgagggagcgagggggaataaaggacccgcgaggaagggcccgcggatggcgcgtccctgagggtcgtggcgagttcgcggagcgtgggaaggagcggaccctgctctccccgggctgcgggccatggccacggcggagcggagagccctcggcatcggcttccagtggctctctttggccactctggtgctcatctgcgccgggcaagggggacgcagggaggatgggggtccagcctgctacggcggatttgacctgtacttcattttggacaagtaagtgccgcgagttgtcccccccaccccaggctaagcgggcgaaaacgctttcgccccgggccgggctcgttggcagggtcgcctggggacaggagcgcatctccagggccacagagggaccgcgcggcaggcggcggcggagtgctgcgcctttgttggggcgcgctcctcccagcctcggctccagagcccgcagccgaggcgacgccgcttgctcggaaggggacagacttcttttctgtcttgctttctgtgtcccaggagcaggcaaggggcttggaggatgctattgtcttgctgagtttctgtgactccctcccgtgttggtgggaaaggcttgcttaccaaaggcagaacttgcaggcacaggcactcctaaagttagaggcttgggcattttaaagccaatcgtcgcattttgtttttgtttttgtttttttgttttgttttgaaacgctgtcccacggaaggcattatctttgctcctaatcatgtaatgcatacttctcaccgggcactgagtgagaatgaaaggcagggtttcttaaccttggcacttctgagattgaaacctggtaattctttgtggtgggggctgtcctgcgcgttgtaggatgtttagcagcatccttggcctctgcccactggatgccagtaacatcccccgccccccactccttccttattagtggtgacaactaaaaatgcctccagacattgccaaatgtccctccccttcgacttgagtaccccagatgtagtgaattcaagctcttggccatttgactggtgggctaccagggaggtgcaggagccctggtttccttgcaaaaagtggttaggctttaggatttgctcaagggagagctgaattctgaccaatgaagcacttcccaaatccgcataagtttgccaagccacagtcacccaaggaagcttcatgctatctgctgaaaaccagcttcaacgataaaaagcccctcacagaagatccgtgctcattaaaactgagtgagctctccagtgccaggagaggcgctttgctgttacagtggtggggagatggatttcacagactggaaagtatttaggagttggaaaaagagtcctgcaaaataagctggctagctagacaccaaatgtgctttgcagttgcccctggagtttgatttttccgtaaaggctgttttgaactccagattctttggatgaaaagtgagatttcttttctgcagatttatgagaaggtggatactgaaaatatgctccagtgctaaggaatggaatttcttttgttacttctagtggctggaagcatcagctcacagacttagagacagtgcatgaaaacagtcggaggtgctcctcctccgtgcttttttaaaaagccaattcagaatgatattcaggaaaatctaaaaaaaaaaaaaaagggggacagaatcaccatgtctctgaatggatgactgtagagatactatagagatatggatactgtagagataaccagttttccccaaattaatttagaaattgaattcaacttttcagtcaaagttctgaaagagtttgttttgatgataagaatttaacaaaatgattctaggcttatcttagcaaaaaaaaaaaaaacaggtaaaaagagctgaaacatttttggaaaagaataatgaagccatattctctctccaaatattaaaatgtattataatgtaaattaataaaaacaggatggtaaaggccaaagaataggtggatagagtagaaaatctaaaaagacaagtacatgtagatccaaacacatgtaaacatttagtggaatttccaatcagtatataatgattcattaatttaaaaaaaaatggttcctggacaagtgattgataacatggagaatgaaaaaggttagatttatactttacaaaccatacacataaataaatttcagaaaggttgaaaatctaaatatttagaatgaaatgatcaaagaactagaagataatttagatgaatattactgtaatcttaggtttagagcttttaaaacatgataaggaagaaaccataaaggaaaatagagatttgaatatattaaaattttacacttctataaatgaaaaataagccatgaaaaaacataagaagttacaataactattgccacataaatcactctcttaagattgattttcatatataaaaagcagtaaaagcaaaatcccaataggaaatagcctaagtgcataattcacaagagaaaaaaatatgagtcaataaatgaactaaaaaggtcgttattaatcaaagaaatgaaaaaatcaaacaatatgatttttattaggttggcaaaaacttttttaaaaattacaatattcagtattggccaatttgtgggagataggcactgtcatttcttactagggaaaatgtaaattggtgcagtctttctagacttgcgctgtccagtagaactttctaggtcggtagaaaagttctatatctgtgcagttcaatacagtagctactagccatatgtgactcgagcacttgaaatgtagttagtgcgattgaggaagtgaatttttaattttatataagtttaactaatttgaactttaatagccacatgtggctaccataccggatagtgcagacaagaagataatttggcgacacatataaaatgcttttaaaaaatgaggggtgttcctttccatcgagcaatttcatgtcctaaagaaaaaaaatccaaatagtcacaaagaagtacctacatgtatgtttatggaggtgctgtttataataaaaagctgaggattacatgtgtctaacagcagtggatttactaaggtatgatatgtgtatagtattgaacctgcattgcatgttatacaagcttgtaagctattttaggagaaatacataattcttaacatactatacacttttagatggaaatgcaattaccaaacgtcatctgcgttatgattccacctgtttaaaaagttaaacacacacatgtgtatgtctctatttaccaatatggtactactatttgtctctagcaggtagaattttaaattttgtttacatgtttttcttaatttttctgtactgaacatacattacttttatattcaacaaaaataagttattttgaatttgttttgaaaatcatgtcaagtgggtctctaaacagtgtgctcacttccaagccccttgctgttgtaaaggatgctgctgcttttatatttaatcctggagtaaatgtctgagtgcatcataggattctatgaagcacattggagacccaaaaatgctccaggaaaagaaatggtggggagacctttacagacattcaggtggatgcctctgacttcctttagctgttctgttgctggaagagaaggatatttttgtgctgaatgaaaaacttgctagaacttggtgcggtagtgcacactccaccagcttaccacctccatccaggctaatttatgagattgatgagtccagagctaggggatgggccaaaacgcagtggtggcaaacagacccctgggtggtcgctaaagacatgatcttctgtcctagagagaacctcctcacacagtgctgtccagcacccaaccacagccagagtggaaagtgaaaaaatgctgactcattttttccttgggcttcttagatcctttcgctggcaagacactgtctacagtctgaaaccgagggatcataggggactgaatccaccattcttctcccaatccctgcaactccttcttcccctgcaactggttctcttttcccatgacattaaatctcagctcatttcagctttaagcaagctgcatctctggcctggagggaacccagattatacatttaatggaacgtcatgttttctcaaccaggagcaaagacttcataatgataacctagaaaataccacagtaacacaatagggcattattagtggctttggcgactgggctggtggactgggctgcacaaggctttatactgatggaatttcatgttcacttaaacatgcttttctggttatagtcaggaaaaatagattgctgggaattcagtcggggatttgaaaagttagatttggaaggctctgttcaacaaaaagcaaagaaacagctagcctcttttaagtcttccaggggatcttccaagatgaatgcacccatttgaccaacccacagacataactaccttccctctctcacagcacccccccaccctctcttattacgtatatgtttatgtattacatattggactattttacatggagctattagtcacttgaatggagatagtggattctgcatcatgaatctcaagtggctggctatgttatgtgtgccctgaagacttcaaaaatagaatgtgggaaagagagcaggaggagtggagatggtggtctggaaggcaggagtaaacgctgagcagctttatttataggacttgccaaagccacagcctgtcattcattttctgcacctaataaatccttatatgtctaaaggccccccacaggctcaccatgtgctccttccccgtaagacctccgactccccctgccatttcccttctgttcggcaccagttttctttttcttccactgtacaaagggattccatgttgccactcccccagagttccaaccacagcacccacacctggatgatgccctgctggtgctgatttgcaggaccactgttatgtgttgtactccagggacaggatcatcagatagatttttgtagcattaggctggaaatttccccatcaggtatagtactggcttttttctgggaaaatatcttctgagttcccaactactaacttacaaaagaaatactggattgggaacttgtgtgagtcttgcagactcatgctctctcacaagggtcccaaagacaaccttgtttggtaggtagggcgaagcatgactgtccctaatttgaagataagaaaacctttgttcagtccactgggttaagtgacttgcccaaggacctaggattagatcacgacagagctaggacagtgtctgcccttgactcccagaccagctctttccactcatcttccctgtagagttgggccataatgagaagcacatggcaatacaactagaggaactgggtagattccaggaattcaaaatccccgcatcagagtttcagtaaatcatggtgcataaggcgattaaagttacttaattgaggagctactactctgctgttaaatcagctgtagttgatggaaagtatcaggaactccaaccccctgcaacccagagaaatgctccagagatctagggggttaattgatgagtcagactttaaggtgtgttcaggacattttattatgataaattcgtaatttgttcagactgaatctgatagaaaaaggaaactgaagtctgtaaatatgctaaaacacacagatgtagcttattttcagaaatacattggaagatggcttagtgtctgcaaaattggctctgaataaggaaagcaaagagttcaatagaaggcaccttgaaggtgctacaatcagatattttttatatttttggattttaattcgtataagtcttgtatatttattgttaatttcattcctaagtatttgatcattttggttattgtaatgggaaattttcttccattttaacttgtttgctcttagacatataaagagtataagtatctgtgttgattttgttgtgaattattttactgtttcaaataatttcctagttgattctcttgggttttctggatatataattatataacctgcaaataacaattttatctcctcttttctcatttcatactctaatttctttttttcaacttttaagttcaggggtacatacaaacctgcgcatcctgcatatgtacccctgaacttaaaataaaagatgttaaaaaaaagaaattacataagaatgtgtcatggagttttgttgtacagattatttcatcaccgaggtatcaagcctagtacccattagttatttttcctgatcctctccctcctgtcaccttccaccctccgacaggccccagtgtctgttgttcccctctatgtgtccatgtgttctcattgtttagctcccacttaacaagtgagaacatgcggtatttggttttctgtttgtgcattagttttctaaggataacagcctccagctccacccatgttcctgcaaagaacatcatctccttttttatagctacataaaatgccatggtgtatatataccacatttgctttgtctaatttatcattgatgtgcatttaggttgatttcatgtctttgctattgtgaatagtgctgcagtgaacatatgcatgcatgtatctttataatagaacaatttatattcctttgggtatattctcagtaaagtgattggtgggtcgaatggtatttctgtctttaggtctttgaggaattgccacactatcttttacaataataattttaaagggcatcagaaaaatagttatcaggggccaggaatttcttttattattattatttttgtattgaggtggacttaatgcttggttttaaatgctcctctaattaagttccacatttggagaaggcctttgaggccaggcaagagttggtagaactgcctgcaaattggatagtttggcatatgggtcaaaaataaaaataaataaggcaaaactgttttgttttgttttgttttgttttgttttgtgtttctgtctgggtcagccaagtaactacctctactttatttagctgtggagacctggttaaactcagtgtcaaggagtgttggaggaaggcacctgtcccaagataacctgtaattatgtccaaatgctaaaggattcctagtggtccagaaacaaattctgggatcaattagggagacttggctgtcacataaatgcaaatgggatttgctctatgctaatttagaatgtgtgtctatgtttggtatgcggccaagagactggatcttgcctctccccctgattactctgcaataaaagacaaagagaatatttaaacatttgttgacacgtttttcagacacgtcaggttcatactgaaaaagtaattagatttctccaatttgactcagcagattcttccattcatttggcatagatgacatactcagttttgatcacaagtgtgtactccaatacatgcgtggatgaaacaatgcctattgcaagcaatgtcctgctatgggaggtaaaaggaatgcaaaataaacaggaagaagtcccaggctgtcaggtttttatggagaaaagttagaggactctaggcagccagagctaaaggcttcagtgaggatttgggaaaggggccaagtaaagtcaattttagatcagtaagaaataagaagtaacatttactgaacccttgctacctgccagacgctatagtaaacactttgcctgtatgaccctgtttagtgtttacaacccccataaggtctgtacagtcatcattaccatttcacacgtgaggagaccgaggtttagagaggttacccaaggtcactctgaatggtgaaactaagtctcaaacccaagcccctctgactcataatctatgcacaaagttaaaaagaatctaaatatgcaaaagaacattgaatcaatcaaggtaggtcaggttatgctgtgataacaaataacccccgaatctcagttacacaaaacaacaaaagttttattctctgcatatactacatgtctgataggagtcagcagggctcttcttatggtgatggttctgggagccaggctggtggagattccttcctgatacctcctgccaccatcaaggctgcgagggaagagaatgctagatgatgtcttgctggccatgaaatgctccagccagaagtgacgtgcatccttctcctcacagcctgttggtcagaactggtcagatagcctcactttatggaaaaagacttgaagaataatcctccatgtgcctagatggaagggaaagccagatatgggtggacaataaaagcttctactgaaaacgtataattatagcttgctttggcttgaataagcaagaaagaagtagccattgagagagaataaagagataagacttctggagaaaggtcagttttgagccaagtcttggatatacagcattcatcaacctagaattactgtcagacgtgatgtttcaaatatgcccaagaggcaatgatagctccttctcttttcctcccttccccattctctgcatactttagatgaaatattcagtgaggtgggcgggggattaaattagattaaatggaaagtagaaatggagattagacatgctctcctgccacctaagtattacatgaatatatttgaaagataaaactctctttttccatagtttatggaatacgagggaatttgaaaggctggggaaagacagcagcccatggaacacagaccactgcagcagcagagctcagaggatgcctgtacactgcaggggctgattctgagtttgaatcaagagtatctgggctcctactagtgcttctcaatgagggtgctgttagcatttttgatgggacggtgtttcattgtgatggactgtgggatgctttagcattcctcatccttgctttctaaataccattagcctttctggtcattgtgatgaccaataaataacagcctctatacttatttctaaggttggtaccaccttggttgagaactcctgactaaaagaaggcagggcagagcagggtatgccattgatgttgattcctagcatccaagaaccacatctgggcatttgtctgaaggaagaaattgggaagcttccatgataaaagctccagtggaaattgtagaccttgggaatgaatatgctaaactgaggttctcaaccaagggccagatcacaacttcagaggcctgaggcagacgtgtattttggaaaagcttcccaggtgattctgattcaggtccctccctcagtgagtcataagactgaacaggaagacaagaaaagttgccccataatgatggctcatggttatggccttatgatgaggatatagctgaggcagcacacaccttggagctgggctataggcagagctcttattttagatggtggcagaagaaaccacacacaatatgaaggcagaagagcaaaggtcactgagaggccatgttttgcccttcagtgttgccaggtcctgctgtgtgtacatatacatttaagccatgttgtttactagccaggacactcctttgcttcctttctcataagtctccctacatgaaatgtgcctcatgggaatgcttaacacagggcttaagaaggccaccttcggaatcaggcatctgcagctttaaatatcagctcaatgcttcagcaagcattgtgaccttgggcaaattatttagcctctccgaacttcagtattgttaataaaataggcattaaaatgtctgcctcacaaaagtgttgtaaagattaaaacctttaattaaccatttggcacatgagtgctgagacgatagatggtgatggtgatggttatggtggtggaggtggacgtgatgataaagatgatggtgatggtagtggtgatggtgacagtgatagtggtgattatggcaatgttgatagttgtgatgaagatgatgatggtgataaggataatggtgatggtggtggtggtgatagtgatagtgatgatgataatggtagtagtgatgatagtgatggtggtggtagtgatgatggtgatggtgatatggtggtggtggtggaggtggagatgatgatgatgatgatgatgatggcagtggtcatggtggtggtggtgttagtgcagaaacagaatatggtcctctaacaaaagatgcctccatagattccaagcagtactgcctggctaggataaggaatatatcagttcaatatttatcaagctgtgctagagttctggaatcaaaaaatgcctaaaacaagtgccaagtctcaaggagctcaaagttttgtagaagacatggggaaacagtgaaataatttaattttggttgagatgagagggacttaggaggcttcatagaggaggtgactttggatctggaacttggaagttgatcaggattttgtcaggtgacaaagtaaagaaaaaggcaacatttaggaaagcaaactaacacatactctttgtaatatgagtgtgacagggaaataatctggaaagagtttggattttattccatcaggaataggttatgagattaaaggtttctaaggacaaaagtgtcaagcttatgtatgtgttttagaaatacatatctatcatctatgtttgcagtgaggatgaaggaaaaaaataataaatgagactgggggctcttttgtattaaggatcagcaggattggatgagccactggctgtgagtgaatgggagaggaaagggttgcaacagtaaggagcaggcatcagaaggaaagagaagttggtgtggacatgctgagtctgaacatgtagggcatgtgcatggagatgttgagtaggcagttggcttgataccctggagctgaaaataaaaacttgagtgttgtaagcccaagggtaatagttgaaaatgcaggtatggataataaataatatcaagataatatcaggatttttaaatgcccagaagaggtggagtttgaagaggaagatggccaaagtccaacccaaaggaattgctaacaggaattgtctgggcaagagaagaaattacactaaacagagctgagaagaagcagaacagtcagagaaccagcaaagaattgtattagtgaggcaaggagggacagaatttcaatggggggaaggggtgatcattcagatgctttctcctgaaatcatctcctcctcaatttatggtcttggtgaatggtggccctataagtccagctgcttaagccagagatatgagagtaatctcttgttcacactcaagtctgatgatatccactgccatatctctcccaggttgaccttgtactctaccttgtcattgtcttagctcaggcattcaccattttcacccagttattggtctctttgcttcatttctttacccctctccccaccttgtattcttgacaatcaattctaaaattgatctttttagaacacaaatctgatgtcgatactatcttccctctcacctcttaccccttagacatttccgaagctctttcaggataaagtgtaaactcttcagcaaagtatgcaagacccttattgctcaggtcactatgcatttccaaaacttcatatcttaccatatcccacatctttttaattttcaaaaaactgtactgcatagttccccaaactaacccatgccctctcttgcctttggctctaatgcccttcaccaccacacccatctttacctaggtgatgcctgcccatttatcctttgagacgattactagtgcatggtccccttctattactagttgcgggctccctgtggtaagaaaaaaaataataataagaacaaccacttttctatgttatttcttcattcaaagttccttccttattcagaatctcctaaccccataacaactcatattgcatgacaagcagtggagtggtccattttcaagagatggagaggaaaaacccttagtgtttgtcctatggggtttcatccagtgacctgacctgtttttcccctgatgcttaatgatatgcagccctaattaataaatacctgtagagacctcctggaagatggctttcccaacatcttgattgcaaaaggattatgatcagaatcatagtcagcctaccatcgctcttgacgttaaaaataatgcagattccaggtctgcagaaattatatagtaaataagaattctatagcaaataagagaaaagtgaagactcctaactgtaactttagaccagtcacaataataaacaatataaggtaaaatgaaacttcagatgctattagacaacactaagcataaataaccgttaaagttcattgttaacagagtgaccaaacatcctaatttgcccaggacaggcctggtctatgcttgttgtcccagcataattatgaatgtcttcttcttttactctcaaaagtttctcagtttggattttaaattatatggtcatcctgattattaactattgtaaaagacaatatcaaaaggaaaggggattgaaggtcaaacaggtaaagcaacttgcacactttgttccattaaaatgggcagccatttcagcactcctgcttccatttaagtgctctaattttaagtcttttctggaatcctcactcccaaattcccgtaacaattagcggaagttctttaatacctctcactatcttagcacctaacactctgaactgtaattgtacatttcctgacccttccatggggaggcagtgttgcctaatggttaagagcacagggttaaacccagaaagactttatgagcatagcgtttggacaagcatggacttcaacatggactctaagtctagaccacctgggttcaaatctcagccctaccacatactagctgtatgtccttgagtaagctacttaacctctctatgaattcagtctcctcatctggaaaaagggagataataatagtatgtgtcacataaggttgtgctcagaacagcgttggccacactggaaatgctagctgttattattaagtggcaatgaatgtaaagtgcccagcacaatgcctgctgcttagtcagtactcagtaaatgtgaagtgtcataattattcatctttatatagactacaaaggaccaaccaggcactcaaatatcagtttgctgatcaatatgtgcatactataagtaggtccagcaagatgagaactgaaaacaagccatatactttagcagaaataagggcattggtgacttttggaagtgctgttttggggcatcataagagcagaaactaaaaattaatgagctgaggggcttaatgggagatgagaaagcaagtttatgacttcagaaaaagatctggagcatctggagcataaacagttagcttctccctcattcctttcccctctatcatctaaaactgtcccatctcccaaaagaaaaagcctgaagaaagtgtctaggagacgctgcatcgggtccagagactaagggcgttgacactgacatgcaacacatgcgttagaaattcactagaaataaagcagacggactgagtatgaaagaggtcaagccagggtctactttcaactctgttgccaaattgtaaaaaaatatggagagaaagatcagtgaggagcccctagaataatcccagatctggaagtgagtttgcagtcgagtggggacctgagagagatgagaaccatccccttggagccctgttgctgttgggcatcagcatcatgcagtggcagctgctctgtgggggtcaaaggggaaaccaagccacaagagatgcctatgaaaaccaggcacctccatgactgtgatcctgtccagcgctgctgagtcctcccgccagatcgcgcgcctccagggaaacggcagagttttgtgtttaattatgtggatgtactggggatcaagatgaggccaggtatagcacaatgcgaacctgaagtagaggccaggccaaagcatcccctacatatggcaagctggaatgatgtaactgtgtccaaaacaagcaaacaaaccttgcaaaggtgaagttcctttgtggaaatgactggggttgattccattccccactctcccctaactgatggaacaacaacatgatcttactttagccatcaagactaactccttttcaccagattaattccttagagaagtttataagtgtgagatgatgcaagtgtgtgtgtgtgtgtgtatgtgtgtgtgtgtgtgtgtaagctattttggaagcaaatgccaagccaagttatacctttccacattcaaggatgaaaatagggcctacaaaagtttagcaccttaagataagtgattaaacaaaattcctgaggtggaagaataatatattcatggaaagcattttcagtagcaaaaaaaaaaaaaaggtcaattgtggcaccatatgacttcaattaagttaaataaaacagtaaatttgtgaaacaggagaaaaaatatgaagtgagaagggacttagaacggttaaggaaatataaaataatatggaaaaatttaaagtcaccaaagaagcagtaaagagcagaacagacaatgcagaaaatgaaataaatgatgcaggcatgtttaaggaattctcataatttcaggaggaaaacacagctagaggaaagtgatgaatgataaaatgataaataatgaatgaaaaaaatagctattcaaaggaccaaataacttttcattgctaaagtatagtctagaagaaactttcaatgctttaatagaagaaaactcttctgacttaagaaaaatttgaaaatgcagattaagtaggctcaccaagtgataatctcaattaattattcattaaaaaacactaatatttaaacatttcctggtgacaatctttaaaagacaaaagaagaactttataagtgggaagaaaacacatggtacctgcgaaggctctgaacattaaatggtgaattttgattgacacaattaatcttttatgatggataaaatttttgatgaagaaattctgatggatttatgaactaaaatgttatacctagccaagatatcacttacacatgaaaaaaaataaaaaagcattttcagatacatatggattctttctgaaaggggaatgggataattttcttcaggaaattatctgaaatgtgaatcaaagtttaaaaatataaaatataatagttattacacaaaagaagtggaaatgaccattgaatcaattttagcaaatatatgtctaaatagtattttcaataaattttgacataatattgcatcaacagacaaaaccagtctgtcgtgagaaaggaacaagctgaaaataagaagctttgggggaaaaaaatacactgtttctgaatattcaaatccattagaaataatgaccaccacattgaatattgcaaaaaagtagattcagttcatcagaggacagtttgagaaaattcctcagaacttaagctgaaaggatgcagagattaaaattatgagaaaagaggctgggtgcgatggctctcacctgtaatcccagcactttggaaggccaagacgggcagattacttgaggtcaggagttcgagaccagcctgggcaacatgttgagacccccccccctccatctctactaaaaatacaaaaataattagccaggcgtggtggcgcgtgcctgctgtcccagctactcaggaggccgaggcacaagaattgcttgaacccaggaggcagagattgcagtgagccaagttcacaccactacacttcggccagggcaacagagcaagaccctgtctcaaataaaataaaataatgagtaaagagaaaagtaggtcaaagactagatccaggatatctaatatctaatatatatatatattagatatatatagatatagatatatacacaataacaattctggggacagagaacacttataagagatacaataaaaaataataataaaggaagataattttcctgagctgcagaaagattggagtctttagatttggaagatttaggtaaaatactcagcctaattagtttttttaaatggtctacaacttgtacaatcttcgataatttcttaaaatataagaatagaaaagtctacattcttccaacaaagaaaaaaaaataggctcaacaaaaaggaaagtgagattcagactggcgttagtttttttactctacacattaaatgttccaaaaaagctcaataattataaggttttgagtgaaatgtgattttaaaattccttagtcaggctttaaaatgatacacattttaaaattgtattacttactgaaaaaattacctaaaaatattgacatcggaatggaaaatatatgtgaaaaaatatataagaaaaagacatggcataaaagaaacagaaggaatggctctagaaaagttaagaagtcaataataaggccatcagtgagactttgtagcaaaatataaaactgaaagaatggattgtcaatagagaaaatgaaaaatgtaaaatttttatgcgaggtagcaaaaatcactcatattacatttacatatgcaagaagatgcggtttattcttagctcccaaactcctcttttcttccaagtccaccttctgggtagcaagagggagggaaatccataaattttgaatccaagttgtgataatagtccattgtggtgattttttaaaatccctttaggtaaaatgctcagtctttcaaatgttgcctttccctcaccaatagaatctgggtatttgaaggagatggatttgtctctgtgaaggagtccttcgattctggaccagttggtttcatggaaagttctgtcacatcttcaaggaacagaaaatttcagtactagtgttaaacgcatacagacagcaggaaaaaatagtttctcaattcactttatgaagctagcatagatctaataaccatatctaccaaagataataccttcatacacaaaacttcccaccaacttctgaataaaaactttaaattttaaattaaatacatattgttaaaaaactaacagtatagtaaaggaataatatcctaagaccaagtaaaatttatcctaggaatgcaacagggcttcaatatttgagaaatgtttaagataactccaatttttttgactgctgaagataaaaactgtatctcagcagaatctgaaagacatctctgaatacttaagcattcaaggatatattcaaaatatattttgaaccctataccctacagagaataaactttcctttcaaatgcccatgaaatatttattaggtcacaaagaatgcctccatatatctcccaaggcgcaatttttccagtctgcattatcggcaataaataacaggaaatgaatagcaaagtacaccaaaacttcagctatcaggaaaaaaaatacagatttgtatattatcttgtcgtgagaaagacatgacagtgaatacagaaatttagaaaaaaacgagtctgaaagaaagtgattgtctgggacataagctggcgaactatggcctgcagcctgtttttgtaaataaaattttattgtagtacggccacattcattttgttcatgtactatcaatagctgcttttgtgctacaaaaagcagagttgagtagttgccacggagaccacatggcccccagaacctgaaatatttactgtctggcccttcacagaaaaagcttgcccacccctggactaagaaaacatttgcaaccgaatataaaatgggccaaaaatattgagaccagggtcagcttcatgggcatgggacctgtgcagtcagccacccagggcctctcatttcaaagggcctggcccttggtttaagggccatcttgccatcttgaattttgttaagttttgaacaagagacactgcattttcattttaccctaggttctgcaaattatgtagcttatcttaattgatacaaagaaaaatgaaccataaatgtgaaaaaattatggcttatagttaaatacatccaaattaaaacaatagtgaaatcagtttgtccttcctctgcccaccctcactgcacagtctaattacgttgatgtggggacagtctatagggtaattggctcctagagagccaaacatgaacccctcattcttagcatctgtccctccctctctcttttcttttcataatcctcagatagcaaagggctttctgtccctctgctgtactgccagcctaaggcatggatttcttcaccaaatgacacaagaggaaattatgtcctccttatattgtgatcttaatcctccaagttttgttctttaactgctaaaggaatttagaaaatctctctttgacaaagtcttgcttccaaaccagttgtcttgctgcaaaaatcatattttgaatttcaaatgttaactttttccccttttctgcatcactgctggaaaaacagaatcccccactgctccagggtggctcctgccagatggatgtctccgactgaccagggtcactttctgtgcagttgctaaagagaaaagcacagtacaaagttcaaaatattacccccattatgtatgtaaagatattgttaaaaaatattcatcagaattcttttataatggtgaaaaagtagaagcaactcaatgtacaaaaaggaattatagctattataaagttataattgtacaagttataaagtggagaaaatgcagatgttacaagtgatgttgggaaggattagtgaatgaaataaaaatttgttcataaccataatgacattaagtgaaaaaagcagagaccataacctgtaaatacacaaagtgaagatgcttggggaaaagtctgaaagtaaaatcattgcagtgaaggcaatggttctatctgagctgtgggatgatgggtgatttttattttcttccttttgtttgtctttccctcctctctacccacccccccaaaatttccaacaatggacctgctgcttttgtgatacgatatttgtaaaccctctcccttggtgccctcattctgcgtcacttcctcctaagtaacatcatccacagccactctcacccgacgatgttgacccatccccctttgatctttctgggggatgcaaagtggctactgtggcttcatctctgtgaatctggcgagtgtgaggaatggagccgcagctgtgcatttcaattatgggaaataccttttgggttactaacccattgtctgtattcttaacaacagtgcttttgtgttgaatctgcaccaaaagtaccaatagttgatatcagaaaatgtttttagggttctcctggtgtacatgtgttgtgtgtgtgtgtgtgcatgtgcctgtcgaaaaaggcagagtggagttgaaaggagtgcatattttgctgtaatacctttttgatcatgatccacaagaaaaatacattttatatcttgacacagtacatatacaatacttatgtgtaattgaacaaaagttaacacataacattcttttagttactgtatgcagtatattctggtatttctattctattctatttttttaatgttagcaatgtcccatgacattgctttcccaaatcactaataaattccattctgcagcttaaaaatcattgtttccataggcatcagttagatatactaacaggatatttcatcacaagtcagtcgagtggggccaggcaccctgtcctggggtctctgtgacacagacaggagcagagcgggcagccccaactcaaagtacagtgctcagtgactaggtttgggtctgtattgatgtctaaagaagttggagtggaggcaaaagtcaaggtcaagctttttgagcaagagggaggtatggctgtgacttgaaacagtaataggaggacaaagcctgaaggcctgggccaggtttaagactccaggcagtcagaggacagggcaaggctaggaggaagcagaggaaggcattgccctcagattattgttcagttacttccaagggtctaatatgcaaagagtagaagcaaaataagaactccaaatctcattctgacttgtcttctaaagggcactcttttctttggaagaagctggggagggagcacaacagcaaatgaatgcagggtctctgacagcagaatcaagtgtgagtcccacttacatgcgcctgaagctgctgaacatgtctgtatccttccaggattgggacccaagtgggttgctgaggacatcagtgacttcaactgggtggggctaaggacaagtagaaattggcagttttataatttccatccttagagctgctctgctcttccaggattaaaagactccttggtgatggttccaactgcaaactttctttttcccttttattctattctaatctgtgtgcaaaagaagggaggataatttaaattcattttggccaacttgattctttctgactctggttgtatgtgtggctaatggaaagagcctgtgttttctaaggagcttaaccacagggaggtttggaaactcacataaacagaaaagaatgcacttcagaaaacaagtcagaatgagatttggagctcttattttgcttctactctttgcatattagacccttggaagtaattaaacaataatcagagggcagtgtcaggttccatgcagaaccctgcactgggaacacacagtgagtgcaatgtcacaaaaatttcttgacttcttatcatgttccaaacacaagagagagcatagtaaaacaaaaataagaaagacactctggaactgctttcagcaacaaccttctgggtctagtagtgaagactggtggctttccctccccatggtctagtgagcccttctccaaggccaagtcagatggtagtgtgggaggacattgactctggttttgagtggacccaagagtattgaaagaatcttcaagcacagaactctgtaagactatcttcaagcagaattcctgggaggctacttgaattccaaattctgctgagatttgtgcagtgaaacacaggcacaaaatcccaagaagaggtctggaccctctgtgccattctgagaccaagttgacctataatagccttcaggggctagaactgcatttgagttaggatttaatggagtcgaaattagggaccttttacatccactgatttctagaacgtggcactgcaactctctgtgactacagcttgcccagcagttacgtgttaaaggcagttctggaaaaaaaatctacaacagagtccaatggaacactttctagtactatttatatttgggcttagaaggttttaatttccacctgcagctttggtgataatgagtgggtgggccatactatctgaagatggtatcaggactccatagccagagtttaaggtcattgacttataaagagactgacatgataaatggcatgttctatacattgtagggtggaaagaaactggaattggatccactttctgccatttcccccagccaacacctacctggttgtgaccaggagtccacttaggtcttcaggattgagaggaagcccagggtctgaactaccctgagtcagttattctggcagtagctactagggcagtttccacaccagaagatcagttacaaggccaagtgcaggtgagacatacgtgtttcaacagaaagtctaaactgagtcatagacccagcaaattcatccctatgcaagaaggcagcggggggcggggtgggggtctggttgaggtcccagtggtcatggataggaagtcagctgggattggtgggtggtggtgaggcaggggagaggactgtggcatcagacaggtaagcctcctgccactggggctttgggttaaagaaatataagcagtacccccaacaagtttgctgccatgctgaaaccataagcagcggacacagggctctttctttctccaagaggtggtttgatcttgcgctaggacaatgcctgcatgtgtgggttaagaagtttcggaaataaagagtagaaggagtccaaggtgcagatcgagatacccctttactctctttttcctttagcagctgaggccccttggaatcccagggtaacccagagaagacaaacccagtttggttcctagaatcttagaagtttgtggttttacctttgatgattgaggaggcaggctatgtacatctccagcgtggctcaaagggtgtatattttggtcaaggcttaaataattgtgtaaagaatgatcacttacatacatgaagtgacaaaccccagcagcgacagggcagctgttagcagaggagcaagcctgtcattgcctttttgcctccagttttgttttaaagctctcattttattttcttcttcagaaaattcagcttttgcccattagcaagagttttgatggatgtagacttttgtcaacacccaaggatatattttggatctttccctatatctggcatcaacaaatcaggtgaacatcaaaatggtataaactttacatcagtcagatagaagtatagtgaaaatgacatgttttaagaaagctggaagtatgaattatcattgggtgacacttttcaataagtaaaggaatgcaaattaatttgtggctgtgaaatagggccactccttgagaatgaggaaatattaacacaaaaaggatttacttcaaactcttgctccttaaacagggagtcaataatagtttcccaattctaattcaagttcctatttcaccaacacattgcttctcctcctagtataatttcctgattttattcttttatttctatgggtacatagtggatgtatatatttacagggtacatgagatgttttgatacaggcatgcaatgtgaaataagcacatcatgtaaaattgggtatttatcccctcaagcatttatcctttgtgtaacaaacaatccaattatactttttaagttacacttaaatgtacaattaaattattatttattattattgactatagccaccctcttgtgctatcaaatactcggtcttactcattctttctaattttttttgtacccattaaccatcttcccagtataaattcctcccggcagaaattctctaccgatgaggaaattggacatgggataaaggaggtttggagattcctctctaatcattagatatctcaccctaccccctcagtaaccagaatttcaaagattaatttttctggttgtatggaccaaaacacagcattgcatttcagaagtggccactaatggccagtctttaaggaaatctcttgattctagtggaaaggggttgtagaattctggattggcaatggcttataggcagtcatgtggcatatcttctgaggcacctggagagcattgggccatctctgccagatcaccacccaggacccccagggccagagcatccaccctatggctgaaggatggcaccctggaccagtctatgtgacctgaagtatacaagtgaaccctgtccaggaggatggccaggtctttatgaaagaagatttctaaagctttaagcccagggctaggatatgcagttctggtgagctcgtgggagactccagatgccattctgttcagagatctcctgatgatcatgtgggcccagtcaccaagcagctatgccctagaatcagtgacccatctgggaaggcttcttacttcacgtaagtcacgggaattggcgagagccatctgagtcccaaacccaggctgtttatccaagccaaggcagaatagttgaggttcagttggcaaaagatcaggaagcttccatgagcaatagaggcttttcctcttcatgctcttctttctttcattcaataaacaggtaatgcttgggagggaaatttctttaagaccgattgccacccagtatcaggggatgctgacagagaggtggacacggtggccctgagagcataaggcagggccttatgcataaggtagtgagtcctgtctgtgttggttaaaagcaacacggagagaccaacctgagtttgcttgtttttttgttttttgagatggagtttccctcttgttgcctaggctggagtgcaagggtgcaatctcagctcactgcaacctcagcctcccgggttcaagtgattgtcctgcctcagcctcctgagtagctgggattacaggcatacgccaccatgcccggctaatttttgtatttttagtagagacggggtttcgccatgttagccaggctggtctggaactcctgacctcaggtgatccacctgccttggcctcccaaagtgctgggattacaggcatgagccactgcgtccactgacctgagtcttgaatgaagagttgcttgccactgcggacaatgagtatcccaagcagatgcagtatgtataaaggctgagtaagcagaatagacaaaggggtgcttttgacaggaggggaccctggcacgctccttccagatcccttccccatctccccagctcctcacctcccctctacaggctgcatggtgctgcaccatgaaaccacttgctcttccccaacttccatgttttacaccaaggatgatccttctccccttgtcttcctcacaagtttctacctgtccttcaagaatgggattaaaaaccaccccccttcacagcctgcaccagcacagagagccattccccttttcttttttccaaatgcacagtcctcaactacagcacttttcatgacaggttacatattaattcttctgtcttcctcactcatctctgagttcttgaggggaaagcaccatttcttagccatctctgcaccttaggcagctagagtagtgctgggtgatgttatttttaatagttaataagaaatattaaatccccagtataatcttcctgcctctggttatgccaaatatcatctcaaattagccaaagtggggttcaagatgagcacacaaaaacataattataatgaatatctcctgtatgaggagaagaatccaggattgaatcattgcttttgaccctttttacagtgcctattataagattctagacaatctgtgttgttcaaaaaagaacaaaggataatataatgaacacccatgtgttctccacataaaatgagcaaatgttaacttattttcccatttttttaaagaaataagaatgtgtatgtgaatatattcatagaaattgtgtactggtggatttataatttttttctctaacagtggaacaatgactatcactgtaaaagatgcctatgtacattctctagaattgaatgtgaatttgaggaaagtgagacatccttatgacacagagtatctaatggtatgaccagagcatattgtaccactttttcaggtcagacagatatatcatttctggatatgggacaaagaaaaataaattgccctcctggaaatggaatacacccgatcagaatgagaattcttctgactatcattccattaaaaggaaagcaaaaagtcctcttaaatctctataaaatagtttgaaacaaaggaaaaacagcaacaaatagctctctggatgttaaaattgtaaacgagtgcataataaataaaaataatcagaaatcagtggaaaatgtttgcaatacacaatgtcagagtagaaagagcaaactctaacctcaacagttattagaatggcaagcagaaatgcagagcttgcctgaaattgatccttaggtgaaagggaggaggcatcacagctactaaaaagagtgggttcgaatagaaaaaactaatcggagccattgcaacaaactgaatatgagcactatggaaaatataagctgactgaagcagtaggaaatggtaccagtgaaacagaagtcaaacttgggaaataaagaagcccctttccaaatctaaaatctcatgattccgtatgtcctagggaaacagtttccttcttttgtcactaagaggattcctttttcgtataacaaaaagctgtgtcgtttttcttcttttgtttattaatacgactaaattagatttccttaagtgttcaactatcactaccttcctgaaataaacttcaccaattaattaattattattcttttggattcctgctgtgttcatttcattaatatgatttacagattttgcatctatatttacaaatgaagttggactctttggggaggggatgtgtttatcgtgtgtgctaatttcatttaaatggattagaacagtttttcttccctaatcagagaaataatttaatagcacaaaaatagctgtttctcgaagacgcaaaactcatttgtgaatctctttgggcccagcgtttgttgttgctgttgttgtttttcagggtttgggtgtgtggatttggggtgggggcagtgcgagattgggggagttcttttacaacatcttaaagaaccctaacagaaagttgaaacagcctttcaaataatttccaaagttacagaagtttcaagtaatgagtccagttattggagaggtcaaatgtaaaataacagaatgtgaagataaataatacaaggtaaagacaagtaaacacctgagtcacgcaacacctgcttttgttttcctagatcaggaagtgtgctgcaccactggaatgaaatctattactttgtggaacagttggctcacaaattcatcaggtgagaaacactatgcattttgttcacttgtagttctctgtcatgagtcaaactagtccatgtttgctattctattaattactacatactttggggatgttttttgactaagttgggctctcagatctcggaccagagactgtttgctttgttttcatctttgccacattttagaataacatttggctttatgtttttgggaggagccaaatctggttacgagaccaaaaatatttagcattctcccttctctgttgaatagcctattcttattacctttaacatttttcttgcacactgcatcatgcagcagcaattggcacattttagctggactcacgtgtagggtgtacagtgtgtaggatgaacaattcatcccagtttgcccagatctttcccagttttagcactgaaagtctcacatcctaaggggaaccctccttagtcctgagcaaaatgtgacaattggtcgctctctagctgtgtgtactattatcaggtagaatcctctgagcattttcaacaccactttcccaggcaaggcaatgcagttttgaacatagtcactgcaaatatcatgggagtcttggacttagtggtaaggaaatgaggtcacttcaccccactgtgtgcagcctccaagggataacacaacagtaatagctttcatagagtgcttgaagcaagttgtcaaagtctttggtaaaattggtctgatcatcgtaagttctaacacagctccacttcatgctgatggcctccatagagtcttccggttgataggagtgaccataaagttcttctttgagtaaggttctctgtctcagaatacaggttatcctctaagccctgggtagtgacagacatgttcccctcaaatttggttattgacctcaacgcatgcctacctgcctaattggagggaaagggttaggaggtagcttgtctgttatgccaaaaattggaagctacagcaggaagcatctaaacccagatgattaggaaaaacagatgctgagaggacagaagggagaaaaagtacaggaaaaggagagaaacaaatacatgggtggtgttagaaaatgtttgaaaggatcatagaaactaggaattaaaaggaacgagacttcccagcctatcctaggaggcattgtgtaactctctacttgaatagctctggtgaaaactcactgcctttgaggcaaaagtccaatagttggacaattccagttttcataagtctttttgtcattaggccaagatgtcctttcttcactcgcagccattggtcctttggagtgatataaaacaagtctgcctccacacccttcacagtaactgctctgtgtctcatttgctcttctgggcttctgttctctctgaagtggaggagtctagtgggataggctttgaagtcaggcagatgtgagtttgaatctaagttccgttgtgcaaccgtagcaattcaccaaccttggctgaaccctagtttatatatgaggcttataagagaaaacatgtgcaagcccaccagtccagcacctggcttagagtgggcacacaacatctttctcagttccctcagcaatcccagactcttcactatcttagaatcttagaaaattgtgggcaggggcaagggaggggattaagagaacccttaatccaattcccttgctttatagatgaagaaaccaaggaccagggaggttgacatggcttaatccagacaaggcacccttctctggttgtctccgctaaccctgcttggccatggagcccctcaaagtgtggagccaagatcttaccatcacccaaactccaccaggcagaggctgggctgtcgtctgttgacagtcacagcccaagtgcccataacagtgccagacacatagtacatgctcagtcagtatttttaaataagtgaatgaatgggcaattttcatttatttattcattttaataaaaagtctaaggcagctgggactacaggggggaaattcattcaataacagtggctgatgccagtacaagtacatcatttctaatctcagtgggatttttgacattttgagtccttttatttatctttattctgaccttctatcatttttctaataatgattcttatgctttgctgttttcctcaagccttcaacctacacctcacacccattgctgtcagcaaataacctcacctcctacttcaccaagaatccagagagtagtagacacgagttcaagttccaatctactcctaaaagatgcatatgtgtccttcccactagtctctgagatccaagtatccctcccatgtaaggccaacctctccattttagtctgactttatcccattgtctccagtttcctccaggtctttgtttctgtcttgtatttttctctacctttcccctggctccttccccacagtctacaaacacaaactaatctctcctgccccttgtcccaaaaaaagcaatgacagtgaaactcttgatcttgtcttcctatagatgggaccctatttctctactagtttctcactcatttgtctttaaagactggccatctccatatccttacttctcattcattccttaacccactgctgtctggccctcctccccacccttcacctgcttgctcgccaaggtctcacccagggatgacccagaggaaaaatccaggagcactctgcagcctttagtccactggatgcaggggtttcattggatccagacttatccttccttgaaactctttcctccactggctctcattctgcttccatctcactggcctcagccagcccttcccatactagtgttggttttgtatttggctcacttccctcctcactgctgacactctctctgaacaactttgcccacatcagtacgctgaggacttccaaattatgcctctagcctagacttatatgccagttgcctcttggagacctttattttccacatttcaaatttattatttccagagctgaacttgacagaaggggagcagtatataatgtggcagttaggagcccaagttctagaattaaaacacttgacttcaagccccaggtctgccactcccccactgtgtaacctcaaggaaattgtttcatctttcagggcctcaatttccttttgtggaaaataggaactgttagtttgatatgaactatcaggattggtactataggtaccagtctcatacagttgttcaagtataatgagatcatacgtgcaaatcactatgatctcacacatggtaagaactcagtaaggttggccattattatattattataatcattatgattgttgttattatcatttaggacatggtgtcctgctgccccagtgctggggaagtagtcccaggcagcacggggtcatggacagaaaactgagatctgttttagggaccaatattcaattcaccaggtattgcctgagctcctatcaaatattaaacaccatgccaagggcttccaaagatgcatcaggcatttattaccatgtggtaataaatgcagactttatcctggagacagtaggagtcattggaaattttatagcagataagtgacaggttctaatttttgttttaggaaaataattctgggagcagtgtgaagagtgaattggagcaaagaaccttcctaggcaagacgccagctaggaaattgtagtggtcagacgattgaggccaggatcctaagctaagatacgggaagtgaggcaggtttgagaaacacttggggaactggaactacaaggttcagagcccgatcaggtgtgggaggttattgcattgtgaagaaatagattgatgctatgacggaagaacaagttggacacacagaacggcattgcattgctgaatccactgcagtctgatggtccatcttgcagactgagaaacaagttcgtcctcaggtgagagtgcttctgtctccagagtgtgactcttacattgagaatgctcctgagcactgccatataaaaaccatgccaatttattcattaataatgagaagtatgactaccaagtggaatagatattcttatgaccagtcagcacattctctccttataggataatctccttgggaagccaaggagaaattaaaagttgatggtgatcccactttcagatcaaagggagtttgttatataatgttaatagctgatggcatcaagctgcaactcatcattagagaatacaccaggctaccgtggaaacattatcaaattttacctatcgggatccccttttatagacaccatacagattggtccccttgttgggacacacttcaaacagaacacagggcaacaatgaagtttatcattcttactcgtaatccacactcactaagcaatgatatcaggtcagaagcagcctcaggaagatccagtgtgtcttctctttgacccacacttcaagtccactgctggctaatcaacacccgcagcaccagcctaggaggccccctgtgggttatgggtcttcagttctggcagccgtgatagaaagggaaggacagggagggagcctgaagggagtggcatgcgcagtcttattgtctgtcctaatagagcttcttttcctttccagcccacagttgagaatgtcctttattgttttctccacccgaggaacaaccttaatgaaactgacagaagacaggtaaggatacttcttatctctgttgttaaaaagtccatcacttcctgagtagccctgagatttgtgctctggtgccagccttgacctgttgatcactttaatctaatagttccttcttttaccctaagtttttaaccttacgtatgggcacatgggtcctgctgctagttcactcttcagttacttttgatagaatttcctgatattggtgaaattttataaatgatgaaattacattaagataaatctcacatttgattgttgattccatctgctaacttggagcgaaatgttggcaaaccatattattgggggactatattttcttttacttaagttagacttattttggattaaggtttcagatacaagtgcactgtgagacaggtaagagcttgaaatatttactgttcataattacccaggaagggagtagaaagggagggcttatggtaccacaaaataaaaggaaatttaaatagtgtaaaagaatgttgttgatacaaagaagttaaactaggtagatctagcttaacaaaagtattttaggatttgccacattttacttgcagatgaaaactagcaataacagagtcatgtcatttattcatagttaggatggtatactagagagtggagaggatagtcttcccccatttatgaaattgtacactttttaaatagtgagatggcccacatgagagaagcaccatggggaacacatgtgggattattgggagactcatatatggatgtgttggaaaaagaaaaggaggaagggccagtacagggggggcaggaagactttattctctaacgttcttatagaaatgaatataggactaacaggacagagtaaaattttctagctgaagtcagcaaacttgagctagtccctattttttttcccatgactttgttaggatttgtaacagaaagagtgctctgtaccatgtaggagttttcaaatcctgttactccttcaacctgatctactatatgcatgcatttcattcaaaaaaacaggagtttctgatcccttattaacagaaggagaaactgaggccatgtcaccttcccaagaatagcaaacagaacccagaccagacccaggctccacattctttccagtttaccttgctgccttctgttcaacagagaatcataaaatccaagacacttgtgtgacttgccttcaatactggccaaggattttaagaagctctgagaaggtgtctctggccatctcaagactcctcatcttgctcagtctttagatgatgccaccccttatgcagagatgttttttgttctgcgatggggagctaaacacccctctcgcctgttcttcacatcctcctacaacccgaggcttcctagtgcagcttcatgctgtccatgccccatgcataagagtttggccaagagaccaggttcacacatcacttgcaggtgctttgtgtgctaatgctcacagcttctgggaagttgacagggtcagaggggtcagggatttataaacactatcagaatgccaagtcttccagacccattgtggtttgttatgcttgttggaattagtcatcctctgaatctactgggaatctaatttttgtgtaccttaacgtcactactgctagtttcctgttctgaagagaaaacagagggtagagtccctggtttgctggaagcagcattttgtatgggtcaaatgtgcatcaaacaacagccaaaaatgccttgctgaaggctgtgtggatttcatgtggtgactgcttggcctaggtcagctgggaaagcacagcatggtttatggacacacccccaacctcatcagcctatggaagaaatgtgggcaagatctctctgaaactctttctcaggagactggctaaaagaatcaggctttcagatcttccaagctagtactgcttctgaaatatatgacttgcagtgttttagttgggcacaggaatttgtatttttctatctcacttgattgtcacaatatccctataaaacagtaaagggtccattaagatacctgtataatacttgagagaccttatagaattaagaaaaacttgttcaaaagcaagacatgaattggcaaagactttcatttcagcaaaagttttgggtaaatcaaaagaaataatatcaaagatatacggctgatccttgaacaacattttgaactgaatgggtccaattatacacaggtatttttcaaccaaatgcagatcaaaaatacagtattcgcaggatgcaaaatccacatatatggagggctgacttctagtatatgcaggttctgcagggctgtctgcaggacttgagtgcatggatttggtatactcagggatcatgaaccaatcctctgcctataccaaggaatgactgtattcgcattcagttcttgggatcaaatacacgtagggtaaagctatgagaagatgaaaaaatagaatggaaaataaatataatgtgttaagatatagtaaagaaactccaattagaataataatgcctacgatttgtgtcttttatctgcaagcactttatccttttttatttatcctcatataaccattgttactctattttctaatgggaaggaactatgcggtcatttgaatcattgttatatatggaatgtgtcgtttttctctgttttcacagtttcttcttttttagttcttagcagtttgattatttgtgtgggcatggttttccttcagggtaccctattttgactttgcagagcttcttgaatctataaacttgtctgtcaccatatttggggagtttgcagctacttgagttggggggggaaattctggacctcatggtagtgtgggtcatttctctaggtttaaattttcctccccagtccaccagttttgtttaccttccagtctacttggttgctttttctgttgtaatcagcaggtgatataggcagtagcaagcatactctatcttggctgctgctacttcaattttacagataaggacactgaggttcaaaaagtttaggtaacctgccgaggtcagatagctagtaatctgccaaattagtattctgattctggattctaaatttggtccaactcctgtactttgtactgtatcatgttgctcttccaagatttcctggcttcatcagtttaaatagttgatagattgtaacaaagtttgcaggtcacttccttagtataatagagtatacaatgtcaatttaagtactgttagaataaaatgatgttaactactgcatatgagtccctggatactccaaggagagtcttgttcttacattaattgaaatacttcaaatgtgtcatcatttagaaataagaaataagaccacgtgaaggaagttcaactattcatttaaaaaaaaatagatgctcaatttaatcaaatgcaattttgccttttgttaagatggtgatatttttcctttacctactagtacactgaatgtcataaaaaacatttttaaatattggatcattctagtatttctgtatacatttggttatgatatattcttttaatgtatatctgaattctgtatttttaatattattcagaaatttagcacccctatttataactgtaattgggctgccattgtcctttttattactacctttctttacagtacttttgattcttttttatttaaattagtacttcttctagaatttattatgatataaggtacaaggtcaacatccagtgtttctttccccgattgattagccagttcttcccacaccactgtgtaataatcttttaccaacaacttgaacagttaaactctttgctaggcttgggttcattactggattttctattctgttctgtttttctgtctgtttctatagttggatcacattgttttaattagttttaacatctggaggaccaatctatcctcatttctaatcttgggtgaaaatctccttggtctttactggatttttccaaccacatacattttaaataattttttatgttcccagatatccctgggattttcactcgaactgtgtgaaaaatacagattaactcagcagcaatggcgctgcattttctctatacttattttcttatttagggatataccatgtctcgtttacgtccctcagtacgattttgtttttttcttcaaattagtctaattgtcaacatttttttcccaggcattttaagttgcctccattgtgaaagaaatgctttgctgttgtattctccaaactgtcattcttcactcttgactggtgaacctatagtttgtgatccatgggcttctactgaactccataaaatgatttacaaaaacgtgcatgtcagtgggttttctgtagaaaagaccatgcatgcagcccccatccccatcccctgccaaaaaaagagcttcagaaacattagttttggggaaaacaataggtttctaacaggttttttgttgatttcttttatttttattatttttatttttttaagagggagtcttgctctgtcacccaggttggagtgcagtggtgcgaactcagctcactgcaacctccatctcccaagttcaagcgattctcctgcctcagcctccctagtagctgggattacaggtgcacaccgccatgccaggctaatttttgcattttagtagagacggggtttcaccatgttggtcaggctggtctctaactcctgacctcaaataatccacccacctcggccttccaaagtgctgggattacaggtgtgagccaccacatctgccttcttatcccaccactttaatgaaacattttattagttctaatagttttccagttaatttttaagtggttttccaataaggtgattgtagtatctgtgattaattctgtcttcttttctaatatttatagctagtatatcttcctgtgtatcttcttacattctaaaattttcagactttaattcccaattgggttttacaattatgcattttattggatgctaacttcatacattttatctactttgttaaggaaggattcttcaaatgcgagattattaaaactttttatctgaaatagttgttatattaaatacccttttgccatatcaaaatagttatatctttcttctatttcctttgacctgtctgtaaaaattttaaatcaaaagctctcctaatgggcctggcacaatggctcacacctgtaatctcagcactttgggaagctgaggtgagaggatcgcttgagcccaggagttcaaggccagcctgagcaacatagggagaccccatctctacaaaaaataaaattaaaaattagccaagcatgttgtcacacccctgtggtcccagctactcaggagaatgaggtgacaggatcgattgaggcatgggaggtaaaggctgcagtgagccgtaatcatgccaatacactccagcctgggcaacagagtgtgctgtatcaaaaataaataaataaataaataaataaaagattttctaatgaaaaactaaccttacattcctacaataaactttatcatggtttgctatgtttttattgtgtttctggtttgatttaagctgaaagatattacttatcaatatttaatattgagagtattctggggctttatttcatacaatctctgtcagtttgggagtaaacggattacatgagcttggaaaaatgagtaggcaatcttgctgtaagctgcagaattgcttaactaataaagagagcaaacgtttgttcaaagtttgatataactcagaggaaaactatcaaagcctaaattattattgaagaagctctttgacagttacctcagctttttgtgttattgcttttatcgtgttttctaacttgagaaacagtagaaattaccaatatgttgacattttaaatttatcacgtatctttttaattttcaaaagctcttctgtatctttggttatatccctttcctccaattgtataaagctattttcttttctcttatttgccccattcagattacctaatggtttgtttcttaaatgtattcatcagttctgttttatatattgttagattttatgattcattattttatcttattactattattagttccttccttctgcttcttatattgcaagtttttctggtttctcgaaataaaagataattgcccggtgtggtgactcacacctataatcccaggactttgggaggctgaggcaggctgatcacttgaggccaggattttgagaccagcctggccaacatggtgaaaccccatctccagtaaaaatataaaagttagctgggcatgttggtgcgcacctgtaatcccacctacttgggaggcgagaatttcttgaacctgggaggcggaggttgcagtgagctgagatcgcaccactgcactgtagcctgagcaacagagcaagactctgtctcaaaaaaaaaaaagattattcactatactttatttctttctaaataataaaagctttaacagtataaattgtactttaaatctgatatggttgttgaattttatacattttgacatgtcctgttcttattattgttaattttttaatagctatatttactatttttgatttaagatgatttaggaaaagtgtttcacaattttcacatttttgtttaccctttcctcaatttctagagtcatggaagtttttaaaaattcaatttatataatttctattttttagtttattaatttttgttggtggactactacatgatcaaattttatttagtatccatggatgttagaaaatatgtacactttgatgattaaaattttgttataagaaacattaatttttaaatattttatatttttgtttacttgatctatgaagatagacattttgcattttccaccatgactgttttattttaatttccaacacattgctttttaatttacatcatcttacttggcttatgtgtattttcattatggagtgtgcatctaatcaatataaaataatctttttgtcacctttagtgcttttggctttatatcctttgtccaagattagtattattaaacttgaattttgtttgcacttcctgatatatctttttcattcatttattttttactttcgttgatattttgtgtaatttttcaatgatttgaaaagtataatttcatttgcatcctagtaacagttgcaagttaattttgcttgcctcgatagtgacaagaattgaataaatatctactgattcttcttgctgaatttctttttaagaaatatttgcattgtattttagaaacatatcaacaataattatctaaacttactgtaagatttacggatttcattgaatatatatgaatacacgcacacattcacacacatacttcctttccagtacttaagttttaattatatatttttaattcctcagtttgctaagtcttttttttaggtaagattttcctgaagaatatgtgactattaagacttataagtcaccatttatatgagaatttttttgtattcacctccaggtaaatatttccattgaatataaagctcttccatcttaactatctttccccttacattttctaaagacatagtcaacttgcattattagaaaggagagatgccaatttaatatatctcttctatgtgggtagcctgttttctcttcctggctgcttatagaacttttctctttatcatacatatttttttaaatatcaacagaatatttccaggtgtagtcccttcattaattttgtaaagtactttgtgtagtacttgagccattctatctgaagacttaatacactttttcagcttaaaacatttctcttttatgccttttgtgattaacatttcttctgtccattcgattcttgaatctatccaatatctctttatattctaagtataattttttaatctttctattatttttttgacatctgagagaatgtttcattcagatcctgtaattaccagtctaagttgtttattttgtttttgcttctgttttcacagtcacccagcttacttttcactgcttccattgcatttttcaattgacaatatctttcatccctatgaatactttcctgttcctaaatttttccacatgtgtatgaccttgctgttgaaggtatgtcttcaacataaatatacactagaatgtcttcaacataaatataaattagaattggttatatgtgctcccttgttttttatatgactttatttcaaagggggatattttctcaaattcctaaaattggtcctcttcttcccaactgctgagactttttctgagtatagtgacttaaaaatggaaccacatgggcttttcagtactgggatttgggaaaagttctgcagcagatcatgcaagatccttgttgaaaatgttaagagctcaggctaaggaaaatgaaaacatttatatgtagcataattttatcttaggcagagtagagacccagcagtctttccaaggcaaagaggaagatgaagctaaaggaagatggtcaggtgtagatgctggattattgtgttaagaactagtttccttcacttccccgccatccctcatgcttttcttcttgtgctctaggatcccggggtggtgggtccttcccttactctgacctcagcagctccacatcatgcagaaattcaaagtttctggcatccttgcctatttttcagcagtgaagaaacattttctctattatatcagttagctatttctacagtaatttggaaaaagaagcaaaagttaaaatatgcagaccaagatcattatctttgactggaaatttcacctttcttccaaactttgcaagattgaaaaacaaagcataacagaacaactatgagtcaaagaattattatatcttatccaacccactgacctcattttactgctgaggaaaatgattcccagagagacagaattctttgctcaaattcattcatatactcactggcaacaccatctttttaactcacaaaattaaaaagttttaactcagtgatttttctattacattacaaagctacccagtacatactgcctctgcatgtattattttgtttcttatctgtgtaatagtcaaatggaagccaccaatatgtgtatgtacatatatatgcatatgtacatatatatgcgtatgtgtttatatctaaatataatcttttattaagggcttattatatacctgtagcctagtatactttcctcatctataatcagaggaaatagtagtatccccctaatttggtagttttgagaattacatttattatatgtattatcaaagatggggattatcgaggtggagaaagctcatggccactgtcatgtgaaagtgtaggaacctgaatttgaactcaagaagcgctatcccagtgttcatattcttaattactatactgtaggatttcccatgattttactattacgtacagttttaaatttaaaacaaatctaagcatacataattcaccacccaaaccctctgacatctttaagaaaacagttccccgaggcagcctatgcccgctatacatttcatcttcatgggcttttggaaaccggaacttggaaatactcctcacaaagaggtaaagaggtagcatcagcatttcacagatgggggtacgaggttaagtatcttgcttattgcttaaggaggtagaatggaagccaagaacacttggctccaactgctgagtgaaaaccaagagaccacatgtctctctccttctcagtcatcctttggtttggttgaaagtgtggttttgctattagtgtcacaggggaaaatgacatactctgaagacatcacttgattcctggagctgaatgattacaggctgccattaccaagagacatagttctaaaggccttttctaaatttaaaagcaacaaggagaaagagtcttaagatatttagtgcttgaaagaacttggattcatttcattttgaggtactgttcttttagttgtgtgagggcttgatggtgaaattaagacaaatggtgagggagtggggcatttgtttattctcttgtcctgttgattgggagatattatgtggtctgagtccataggcaagtgtcttgcctctctgtgcctcagttttcttatctataaagtgaatgcaatgatgaccccacttcacagaactgttggaagggttaacaatgcaggcacatagtaagtgctcaattaaccttagttgttgttactattgtggttgttgttaggggtttttataaacagctaaggaatggccccaaatcctcctggacaaatcccacctcaaatcatcacagtaggcccaacagtgattcaaagggtgagtccccagctccccttggcccacatccttcttgaagttttaacatttggccagcctatccctatatagagggatgcaggtagaaaatattgcctcaacatgaggccagatgaaaattattgtttcttttgtgtaatagttgtagggagacttcttccagataaggggacacaggcaatgtctctacagaaggtttgtttaaggggtctccatgttggtcacaatgatggtaaaaagaaatcaccatggagcaatttagcaggtctgggaacagattgatttgtgagagtagtgtagtccactgcttctcaatcccttcctctggagtacccttgttagtagaagaaagtaaaattgtaccccctgaggcctcacggtatagtatgaagtgccttgttaaaagcaagaacttcttttaagttcttttatcttaaaaatgtgcatgcatgtgtattctattccataacataattccattatatgtgatgttacataaaaattctgttctttctcaaattttggagtacaatttatgctccagaaaaaaaacattatgtgtctcctgtgtctttgtatatagtacactgttacataccaagtttgggcaccacagatgtaacagagaaaacacagactttggaccaggacccattatggtttccaatttgggctccaccaccatgtgcatgtaattgcacttctctgagtctgttttctcatatgtgaaatgaagatagtaatgcccaccatatggagttgttatgagactttcatgaattaacatatggaaagcacctaacagagaccctagcacatcacagataccacccttcacctgctactactcatgtggcaaatacaaattaagaataaaaactgacaaagcagtgcccagaaacatttctgttgtctggatggagacagcaaggtaaactttagaagtagtcaacagaaccaaagaacagtagcattctcatatccaaagctagctagccaaaaccaacatattttttattgcccaacaaaaacaatcccagtactggtcaacatccacatttctacctctgaagccacgtggctgtcacctgactcagctcctttaccaccagtgtgggtgacctgttgagtcttgtatttaatgctgattctgatagcctccgaatgcctcctcatgaactccaggttcagtctttgctactcacttcaattttttaagtgactaaatatttgaggtataacaaaagtatagaaaaaaaaaaggttaatgaacactcattacccaccaaccacgcttgtggaataagaggttacaggcagcatctcctatgtagacctaccatttctctttcctcaccagagataattattatcatgaattagggatttatcatttcaatggatattgcatacttttatatgtgcataagctataatatatattcatattaaactttttttaaaattttatttatttttgagagggttttgctctgttgcccaggctggagggcagtgtgcgatcttggctcactacaacttccgcctcctgggttcaagcaattctcatgcctcagcctcctgagtagctgggactacaggcgagcaacaccatgcccagctaaatttttttattttattttagtagagacggggtttcaccatgttggccaggctggtctcaaactcctgacctcaagtgatctggccacctaggcctcccaaagtgctgggattataggcatgagccaccacaaccagccgaaactttattttttaaatggtcatattgtgtgtatttttcttgaacttgctttttatacttaatgtcatgtttttgagattttttttgtgtgtagatacatatagctggttggctcattttaactactgcatacttttctattttgtcatattttattgtaataacataccacctgtacttacctgctctcttattcatagacaatttgtttctaactttttgttattataaacaaagaggaaatgaatgtacttatacttgcctcctgttgagggtagggtgggcaaaagcaagaattgctttatgcactttgctttattgcactttgcagatactgtgttttttacaaattgaaggttcatggcaaccatgatttgagcaagtctgttggcacgatttctccaaaagcatatgctcattatatgtctgtatgtcacattttggtcattctctcaatatttcaaccttcattattattattatatctgttatggtgatctgtgatcagtcatctttgatgttactatctattgtccttgttttggggtgccacaaaccacacacatgtaagacagcaaacttaattgacaaatgtgtgtattcttactgctccatcaaccagctcttcctccatctgtttccctctccctctacttggtcttccctattccctgagacacaacaatattgaaattaggtcagttaacaacacttcagtggtctctaagtgctctagtgaaaggagtagttgcaagttcctcactttaaattcaaagctagaaatgattaagcttagtgaggaatgcaggttaaaagccaagacaggccaagagcaaggcgtcttgtgcctgttagctaagttgtgaatgcaaaggaaacgtttttaaaggaaataaaaagtgctactccagtgaacacacaaatgattaaaaagcaaaacagccttattgccgattttagtggtttggatagaagatcaaaacagccacaacattccctaagccaaagcctaatgcaaagtaaagctctaactctatttctagaaggctgagagaggggaggaagctgcagaaaaaaagtttggagttagcagatgtgggctcatgaggtttaaggaaagacgccatctccatgacataaaaggcaaagtagcaagtgctgattgagaagctgcagcaagttacccagaagatttagctaagatcgttggtgaaggtggctacactaaacaacagattttcagtggagatgaaacagccttctattggaagaagatgccatctaggactttcatagatagaaagaagtcaaagcctggcttcaaatcttcaaaggacagcctagctctcttataaggagtgaaggtagctggtgactctaagttgaagctaatgatcatttaccattctgaaaatcctagggcccttaagaatgatgctaaatcttctctgtctgtcctatctaaaggaaacaacaaagcccagatgacagcacatctgtttactgcatggtttactgaatattttaagcccactcttgagacctacttcttgaaaaaaaaaaatcattcttttcaaaatattactactcattagcaatgcacctggtcacctaagagatctgataaaggtgtacaaggagattaatgtcattttcatgcctgctaacacaacatccattctgtagcccatggatcagggagtaatttagattttcaagtcttattatttaagaaatgcatgtctatagctgccatacatagtgattcctctgatggatcttggcaaagtagattgaaaacctttgggaaaggattcaccattgtagatgccattaagaacatttgtgattcatgcaggagtggccaaaatatcgacattaacagcaacttagaagaagttgattctaactttcacaactgactttgaggggttcaagactttagtggaggaagtaaccacagatgtggtggaaacagcaagagaaccagaatttgaagcggagcctgaagatgtggctgaattgttgcaatctcatgataaaacttgaactcatgaggacttgattcttaacgatgagcaaagaaagtggtttcttgagatggaacctactgctggtgaagatgctatgaacattgttgaaattacaaggaacttagaatattccataaacttagttgatagagcagcaacaaggtttgagaggattcgctccaattttgaaagaagttctatggtgggtaaaatgctatcaaagagcatcacatactacagagaaatcttgtgtgaaaggaagagtgaattgatgggtcaaacttcattgttgtcttatttttaaaaattgccacagccaccccaccttcagcaaccatcactctgatcagtcagcagccgtcagtatcgaggcagaaccctccaccagcaaaagattatgattcactgaaggctcagatgatcattagcaatctttagcaataaagtatttttcatcgaagtgtgtacttttttttttttttgagaccgagttttgctcttgttgcccaggctggagtgcaatggcacgatcttggctcactgcaacctccgtctccctggttcaagtgattctcctgtctcagcgtcctgagtagctgggattacaggcacctgccactatgcccggctaatttgaagtatgtactttttaaagacatactactattacatgcttaatagactgcaatatagtatagcataacttttatatgcactgggaggccaaaaatgttgtgagagtcactttacttcaatatttcaatattcactttatcttggtggtctgggacagaacccacaatatatccaaggtatgcctgtagataaccaggagttaaattgctaagtcttaaggtatgtgaaggtctaacagggcttatttcaaaagccagatggtgccatagaaaaccacatggtgaaattactgcacaaatgtgtgaccaatgaaaatagagttgtataaagaagagtttggacaaattcatcttgtcctgtgattaaaccatccctcttgtcttttatgccagcttatgctgcaacctttaaaaattccttgatgggctcctctttgtcagcttcccttctggctctgcactggatcctgtgttacatcatggactattcctgtctgccaagtgtggcctctccagttcccagaagatacccaggttctatttctgcttgctcttttgttcccagttcaaatcagatgcaatattctaagctggaagaaatctggtagatcttagcattccacacctttgttttactttgagaaagctaaagttcagggaggttagctgacatacctagcacttggtagaataagatttccatcccgagtctgtcttcctccaaagctcatgcttctttgatggagtttggctctgaagtcatggaagaatgaggtgaccttgtaaaacagtgctgatgtgaggatgggtgatcttactgagttctggagctggaactccaatctttagagttctagatgagatggaacaacttacatagaaatgtgagaaagaacaggtggtaaggtagaaggagagagtatggtgtaatggaaatcatgccataaaacacaaatctactctcaaatctttcagagaagagagcattgcttaaatgaaggacatcaactgtgtcttatgctgaaagaggttgaggaacatgaagccagagaggtgaccattggattggtaacatagcgggccttgctagaagcagtttcagcagaggcagagttgtggagacaaaagtcagagcagagtgggttaaaaaatgaggacttccaactttaaaatgagatttttaaattaaaataaataaaaatattttgataagttaagatgttttcccctttctttcaaaaaaccaaccccaaaccaggaaaacttgaaacaaaagcacaaagaccatctttgaggaaactgagaaatatttaaaccataaaaacaccacatataagaatagaagggaaggaagagtggcaaatgatatggcactgtggagaaaagtcaaatataatcctgtggaaggaaatactgaagatgaacaaaccatgtagccttgtagaatcctagaaagctcaaaacctggatattgcaaaaggcaaggaagggttagagagtgaaaactggaatattgattgtttaaaagctcttcaaccttcagaaccatccctccttcccactagagtttgaaaattaccccttatttacctccaccagagaggagaagcatattttctgacaaaattgcacaagaatggtttcatagtcagggacaccaggcacagagaaattatagagacatctgcaaaacaaatgttgctacttccagccttcttccttgtccaatttcagacttaaaatctaagaaaagagtttgaaaactacttctctgtagaaataaatgtcttagagggaaaaatacatacacataaaatgatatttgagagtcttcaacaacaacaaaaaacaactgccaaaaaaaaaaaaaaagctggtcattcatcaattggcatgcccaccatgcatgcagagcttccaacaaggcttttagtctcattcatttgatatggacagacagccaaagatcactaaacatttgaagaaggactccaccagaaaagacaaggagtgaggagacaagtttcaagaagctgtgtcatatagagagatgtgaataaataggtcagtagctagagggagatgtgggatcaaagaggactttaaaaaatgtttttaagataagagatactagagtgtatttgtatgctggtaatcagcatctagtatttttctttctgatttgagacaaatgtgtagtcacaaacatttagaaaagaactgtaaagtatgtctgcttctgtttatgatattcagagatgtgaaaagccttcatttccatggtcaaccagaaaagcccagacaaaataaaattcatatgtttccgtgaggctagtagagatgcaggaagcactgattaactgaattagagagaaacaaaccctttatataatagctaagcagagaaggttctgcagaagcttccatacttaaaggtggatgcgtggtctaggtttgggtaattggaggagtgggtctgccatagacagacactctgcagggataaggaaaagtcagctgagtcttacataaacatgtgtgccagaaggaggctttagaatctgaaatgaaaaagaaatatctcagcctaagttatcccccctcacccacatttctgcatttttccaagaaagcagcagtggaggaattgcctgcagagtagagataaatcacataattaggtggattctcattgtgcttggattctggagtcctaccagagtgaaatacaaaggtcaagcaaaaatatctgaagctgcacctagccatctaccaattcaaatactgagaagatcacaaaggcagggcagggcaaaagtccaggagttggcctaataacagggaacatgaatctaacaaaaggtgcagcccagcccaagctcaccctgactcaaggaggaatctaatgatcagcccctcgccctagctcacaaagaataaaagccttatgctctgcagtgagtaaacaacacaaatcaatattataccgaagtctccactgctttttttatactcagtgactgaaatgtaaactgttatgaaaaatgggaagaagcagaggaatattactcacaataaagaaaaacatagttaatagaaacaaaccacagatgactcagttatttgaattaatggacagggacttttaagcaactattataaataggttaaataatttacaggaaaaggtgaatacaatgggggggaagatatgggtgatcagaaattaaaaaaagaaaactcaaagaaagaaccaagtgaaaactgtggaactgaaagatacattatttgaaataaaaaatttatcagataggtttaaaaccagattgaacaccacagaaaagggattaataagtttaaaaacaagtgaatagaaatatccaaactgaaagacagaaagggaaaagtctgagggctggagggagaaaatgaaccagtcctgtgacttatgggagaatatcaagtgatctatactacttgataacatgtatttgtgtaattggaataccaaacgtgatccacacacagatccaagaagctcaaagaacctcaagcaggacaaatgcaaagaaagcatcacctaagtgcatcatagtcaaatttctgaaaaatctaaaaagcggccagagggaaggcaggaaagatatattaaagagaagcaacattaaaaaaataacttactttttattaggaaaaaaaaatgcaatccagagaatgaaggtccaatatctttaaagagataaaagaaaaaaatcaacttaaaattctatatccagttaaaatatttaaggcagaattagacattttcagaagggggaaaatgcctaagagaatcatcagcagcaaatctgcgctattaaaaaaaatgctaaaggaattctttagggtgaaggaaaatgataccaggtataaactagatccacaaaaaacaaatttaaaataaagaagaagaaggaagagtaccagaaatgataaatatttaggtaaatataaaaggttattttttatcttttcataattttgtaaaaagacaattgactaagacagaaataacactatttttggatttgttacaaacagagaaataaaatgtatgacaataataacacaaaggataagagggaactatatggaaatataatattaaaaggtttttctattttgtgagaagtagcataatactgacttatagtagcttgtgataaaataaggatgcatattataattcgcagagcaactgctctaaaaaagacaagacatacagctttatgtttttaaaagctaatagatgatactagatgaaataccaaaaaatacatgatcaatgcaaaaggatataggaaaggagaaagaaacaaagaacagaagtgaccattagaaagcaaatagcaagatagcaagatggtagactcaaacccaaccactccaagacttacattaaatataaaatgaactaaagattccagataaaaggcagagaatgtcacactggctaaagaagcaagatccagcatatcattgatttattactgcataaaatataccccaaatattatagcttgaaacaataatttcttatgctgatttcacctggacttatttatgcagcttatatataggattcagctggggattaggctcagctgggaaatacaatgcttctggaacagctgaagatctctctctcaatatggtccttccttctcaagtagttgaaaagaccaggttttccctcacagtggctgcaacagtccaacaaaacaaactccaatattcttgtgctaatggagccttagtttttgtcatatttacagatgtcctgtgggctaaagcaagttacatggccacatgcacagccagtatgggaggggaccatacagggaccatacagtgggaggagtgatctttggggacattagtataacagtccaccacatacaattatatatggtttacaagagacactttaaatataaatatggtgatagattaaaagtgaaagaatggaaaaagatatactgtgcaagcatcaatcataaaaagttagaatggatattagacaaagctgacttcaacataaaaagtatttactagagataaaaagttatcgaagaaagtctgtgtgtcaaagacaatccatgggttaaagaaaaatcacaagggaaattagaaaatgtatccaacaaagaacgaaaacccagcatatcaacatttgtgggatgcagctaaagtcacgtgcctagggtaaatgtatagctttaagtgtttttcttagaaaagaagaaaagattaaatgatttaaaaccaatgaaaaagtaaaaagaacttattaagctcaaaataagtagggaaaggaaaataataacaagtgaatcaataaaattgaaaatagacatataatagaagaagacaaataatacagaaaatcacaaagctcaaagttgagtattttaaaagaataaattgataaaccactggtaagagtggtttttctgggctgggagcagtggctcacgcctgtaatcccagcactttgggaggccgaggcgggcggatcacaaggtcaggagatcgagaccatcctggctaacatggtgaaagcccatctctactaaaaatacaaaaaattagccaggtgtggtggcacgcacctgtagtcccagctactcaggaggctgaggcaggagaactacgtgaacctgggaggcagaggttgcagtgagctgagattgtgccactgcactccagcctgggtgacaaagcaagactccgtctcaaaaaaaaaaaaaaaaaagtgatttttctaaaaggagagaaaatacgacttacagataatatcaggaaagggaatattactacagatcctacaaatgttaaaatataataaaggaatattataaacaattttatagaaatatattcaacaattataagggaaatgaacaaatatctgggcatgttactgtgtataaattgtatttcactaaaaagtacacaagaggagctttggttcagcatgcatcttgatattatgttaatcattttggcctatgcttaggtaaaagtcccaaagagactgttttatatacattgtaaacaaatgattacaattggttgtagaacttcataactcctaaaataacagcaaaatgtctttaattaatctgtgttcttctgttcactacactgttttcttatagtcaacaattggagccataaggccatctgggaatgttccaggagtggcattagtggtaataaatagtgataggtgtttactgtgtaagttgagaaccaaaggcaacaactgcaaagcatttgagaagagtccaattccacagaaggaaaatgataccaggtgtaaactagatccacaaaaacaaattcagaataaagaagaagaaggaagagtaccagagatgataagctcttttacaagaagactaggaagttgacaatgcagagctgatattgggttatttttggatggtgatggaggttgtttttatagaaccaaaatatgatagccattgcagaatcctaagggagattttgcagtggaaacctcagtagaatacttgggataaaggcttgttgaagcacttcttgacattctatgtgtgtccatcttttatttttttttctttcttttatttatttttttagagacggagttttgctcttgttccccaagctggagtgcaatggcatgatcttggctcactcaacctctgcctcctgggtttaagcgattctcctgcctcatcctccctagtagatgggattacaggcatacaccaccatgcccagctattttttttaatttaatttttttcttacgtgttcatcttttaatgttttcatcagcaatgttatcaaactgtcataacacaaccagaatcccagagagtaatcatgaagagtagagcaattcctagaacaacagaaagcccagaagacattgtgactgattctccccaccttctacccctacaaaccagcagagtgctgggtgcatggtgtatgctcaacaaatagcagtggccattaatgaatgatgggtgaatgcacccaaactggaatcattcatttgacaatcacctgcttgaggtcaatcattaagtgtagtgggagttgcaaaaggaacacaaaacaaatggcctaaaacccttagcttctaagtaggaacactggcagacatgtgaaaccaccaaggaaaacaggggctctgtaatagcagcctctcttcataggattccctgcctctttcatttcccaggaagataacatttcacttgaaataaccaagtcctcagagaggttcttatcatcccctaaaagatctttctcccaatctccttcagtttccaagagaaaataagaatagacccttattaatagtgctgttgtcccagaactaaaacacacccacaattcctatgaaaccatccattttgtttgcttagatgttgtgggtccttcaagaagggcagagagtagggagatggggccatgtgttatttgatcttttgagcagcaagggtggtataatggggaggttgtgatcaccactcgcaactagtgagttcatatcttgccagatacaaagcatcaaggataaggacattttccaaaacagcctttggttgttctggtacaaaaaaaaaaaaaaagtcaagaaaatacttgtaaagaaagggaaataggcttagagaaaatatcccagttcccagactttatttggcagggaaaaaatacagtgaagccaagcaaatatttccacacccccaagaagcctttttttttttttttttttgctctctttttaaatctcaagtcttaacacaatattccacttttagtgttacccaaatgtcccagacttcactagtctgtgaccaaagaattagatcatatttacttttaatgcccaagcgtctctcacctaactgtcagaaattatccctctgccccatagtgccccccagctattatgaggggttccatggtgccacctctgtgtgctcacaaacagaccccagttttcctatcccagcctccccgtcatgtccccttgccactagctctgctgctcggaccctcatgaaactggcaactcacagggcagagctgccccctgcctggggattgctggtgccatgcactgcccccagcatggccttggtgggggacactgctctcatctttattctccaggatatatgccctttctcattaccaaacaacagagtttgaaattaaagtatgccttttgatgggatttattggaatattagaggtaatataagaaatacaacctagagaatgatttttaaccaccacatgggcccagacttgtcaatgaccagatctggctaatgtccagatcaggtcctgcttggcctccttccatatggccaagggaagctcatccctgccccaaaatggtttcttcccagaatgagtaacagtggagacatccattccctccactcaccccttcagtaagtatttgttgaaagtctattatgttccaggcactgtagtaggcacagaagatataatggggaccaaaacagccatggcccagtcctcaaggaatttaaagtctagaactgaaacaaacaaaacctaaataattgcataatgaaatgttattagttataaaatatcttaagtgctataaagcaaaattgtggggtaccaggaaaaagtctaatagaggaagacaattcagattaggaaggtcaagtaagactactctgagcaagtggcatttaacttgggactgaaggctggataagaattagccccatgaagagctggtcaaatagtgttcccgggcagcagtgattgccgatgtgaagtgcctattggagaaaggggcttgggaagaccagtatggctgaaggcaagagagtgggggcagaatgatgtgagatgaggctggacagggaggcaagagccatctacataggcactggaaggtcatgaaaaggatttgggatataatcccaggtgtaatgggttggtgttgaagggctttgagccagagtgaatgccatgatttcatctgtactttaaagacattcttgcagccttatggagaaagaatggaaaagggggcaagaggccattcaaaagatagcaggtgactaccccagtggctaagcaagagatgatggtggctgggacagtggtgttggctgaagagatagagaagtagtccatttcaagatatgtttgaagtagaactaacagaatgtgatgatggtgagaggaaggaaagtcaagttagtggatcaaggagggcttccagtttctgacttgggcggctgggcatgtggtctgatacacgggtattgaaaagagaatagtcagtttccaaagtctgagttacttggtattaaatattccacctatgaagcatcagcagcccagggacaggcaaaccccttttcagtttgtcttttaaaatctccagcagtctggcaagccaccctcacccacggtctccccatcatatcagttttaacaaaagattactattttctttagaattccccctccaagcaatgccaggataaatatgagagaaaaagagagtatttatcatactgattaagaacagggcctctgggattaaatcccacctctgtcttaggtaagagtggccttgggtaagttctgtaacctctctgtgactcagttttcttatctgtgaaatggcggtaacaatagtactactgcaaagagctgtcataaggcttaagtggatcgattgtatttcatgtatttagacagagcctggcaccataagttctcagagccataggttcccagacagtgttaggaactgccattgcctttcactgatgccaggttcccacttcctctagcattgttccatgctagaggctgctttgcagaggagaaagccttttttgagtcaggtagatttgacttcaagtctccactctcctacttaacctctctgagcccaagttttcttacctgtaatgtaaggacagtaatactcactttcagtggttattatgagggtgaaatcagaaatctttggtcactaccttgtatatagcggatgctcaataaatgttagattttttcctatccaaaagagtttctcttcccaatttaaatagagcatctccaccctgtaccactaaaaagaccccagcaggaggaaggcaaaatttcaaacccttcatagggttacagtttatgaataaggtatgtgagtcagaaattttactttattgccctttttggcacaatatggagctatttaaaagacagaaacatgaatgtagacttcttacatcccagagagaatggtccacaaagattccatttggcccccaagtcatttatgtttcccactgccagttgaactcttcctgcccgcactgtcaccttgaacaatcagagtaagaaaacacaggcaccggcccacagaaaacactcttggctgtcctggaaagcggagattccttgggtttttattttccgtttcctttggcacacccgtgcggtggcagtttgctgtggatgccaccctcttccacctgcgtccttgtggtggcctttccctgggttcttggttctcacctctttctggctcacatgagccatttgtattgctgcctaagttgctgtgtgtcccatcaggagcagcatttagagactcatttccaatgtagaaggaaaacattgtgttaagggaaaggaaagtgtttacaagcagatggagagtcctgcagaagagtctttccccttaatccttgaaatctcactcatcctgtgttatggttgaccctgaacggataatataaaggccttccctttgataggcttttggggaattactgggactagacagcagtatccacagaggtaagaagaagactagtacttatgactacaacagcaaagtaaaaaatactcaaataagactaacagagtgtctttggatttcagagaacaaatccgtcaaggcctagaagaactccagaaagttctgccaggaggagacacttacatgcatgaaggatttgaaagggtaattttaaaacagtttgaaatccaaatataaagcatgatattgaaatatcaacatggggtgactgatgagataaggcacttatattaagagggctgactagcacccaatagcaagagagtacattttcttcccataagcttgtacactgaccactctagccaaaagaactaaagaaatggattcccttccttcttccctgaccctgatgaatggtttgttagctaatggttggctggcagtcacaaattcacgccacacacaagtcccgccactccaaaaatgtcctttgttggatgtcagcttcagtgattgaggcagaatttcagggacttcagctttaagggaaacaagaccataaggaataagacatcaatccgtgctgacaactacagtcatctgtcacttaacaagtactaggccataaggaataagacatcaatccatgttgacaactacagtcatctatcacttaacaacaaggatttcaacaaaatgccttgttagccaattttgtcattgtgacatcatagtgtgtacttacacaaacctagatagtatagcctattacacacctaggctatatggtgtagcctattgctcctaggctataaacctatacagcatgttactgtactatacattgtaggcaattgtaacactaatgatatttgtttctaaacatagaaatggtaatgcattgaactacagtgttaccacagctacgatgtcactaggtgattggactttttcagctccattataaccttaggggaccactgtcatatttgtagtctgtccttgaccaaaacattgctatgcagcacataactgtatactacttaaatgagaggtaactttacatggatatcagccactgataattgagcaaagcctgggtgaattacataaggaatcaagactgaattggctgcatattcaacaacagagcccattatccactatggtttttggagtgacaaacagtggttataagtctaagggctctttcatatgtttttcaggccagtgagcagatttattatgaaaacagacaaggtaagactatagtatgaactaccattatgaattatttaactttttccgtgtttgttgctgaaaaagtgcttcagtcatttcatgtttcaaaagacatgtatgatattatctgtaattcttagacacacatttcatcacaaacaaggaatgcatagaaaggtggcatgtattgggtcaaattccactgtcctgttgatgccaagaaaagttatataaaagtaattaagatcccattttggccacagtctaattcccatgaagagttttgcatgttgaattcactaaattagtaaatacttgcataggttagtaaagtcttggatttttatgtaaaatttaattttgttgttcttctctgagctccaagcctcttcattactgtgactgaacataacattaagatcaaaataccagtttgatttaaactttcctatatttaaatgaaaaaactgcataaaatatactcagtagagtgcctagcacatagaaatttttattattttagctattattactacagtgtctttcgtgagtagcatttctgtatctcagtcaaatctcttaaaaaagagattcaatattacagtagagactttcctcccaggcctatagaggtgtccatttcttgtttcatcctaaactgcaacaaacagaacagactcaatatcaacaccaaatcttgctaatgtaaatcaaccgtgaatgttgatatgagaagcctaaaaatcactgaaataattctagtaggttttgccaactgctataattcttccagtcaacttgtaaatcatgatgactattactttcaccaaactgtcttcaaggggtggtgtatgtggtccattacagcaggtgacaaggacgtctgaacagcccaggtgggagtttgctcacagcttgggcaacagttatgtgtctgctaatagaaaataatcacacttgattcaccggtgctactcccaaatgttggtttagtgaccatttcatcaggtttggccatttttcaagatgaggctgaaaaatgagaaagcaaaacctattccccctaaagtctgtccccatgggggatccttcttcatgctggagttgcttccaggcccaaaagaaaagttggtgattctcacaatattgactttgggtggttgaactcgtaagaggttgaatcctgggactgagagggtgtttccttgggtggagcagggtggactgagccagtctgtattgtgttaaacagggtacaggacagccagcgtcatcattgctttgactgatggagaactccatgaagatctctttttctattcagagagggaggtaagcaacggcctggctgtgtctaaacatatacatggaacggggcttctcctttctaaaatgggccacactctctctattcatgtgataggtgttctttgcaaatcccctgaatgaaatagagtttcataagtagaaataataataataattcgtgttctacaagtgaattttcatgttttacacatggtaaatgttttcccctttcaaaatttttacatattactctgctttgaaggattaaaaattctaccctgcctttattgatggcattatattgctctaacagtttttaaatactgtatatcacttgtaaacaaataaacattgatataatttttccttatattttctactaaaacaggaggaagggaaagaattacttgaaatatgtaagagccagtcttgtcagaatgtatcaatcactgagattttcactctaagaaccaaagttaaacagcagttggtagcaaagttaaattgtcatctctcttttaatagttcctttttttctttttctttgtgttctcaaaaattattcctcaaggcaagtggaaaaattctctcaatgaagattttaccttgtataaatagacttagaaaaataagtttgctgatgaattgaaaactaatgtttatacttacgaaattcttttctttcaagtttcacatttgagctatatgcataattagtataaaaggaaacaagttaaccatagaaatgtactgaaactatagccttattagtgacaaaggttcattcaggcccaaggtagaaagaaacaacatcccagagatgcaggctctagaagaggagttaatggtagcatcacactttcctcaagctcttaacaactatttactttaaattcagctctttccacaaacacaaaatatatattcattcatttattcattcagtgttaactgagagcttggcatatacttgaccatttgctagaaactagaggcacagaggtgagtgagatacagctgctgccctcgtgagtcaccatgaaataatggtcagccctttgaagcctacactggcagaggacttagagaaattatgtaggtaaactctcctcccactagtacaaaaagtaactctaatgaggaaatacacaaggtaatatgacagacactccctgagcatttggaaaataatacatctctatatttgaaagtagaaactcactatgtgatgggaatgcaagatggcttgattgggtgccaaataacagtcaaataaagtaaaaaccctaataaggaaagaattgaaactaaaataaatgatggggtgtcagaggcttaagatagggattagtgggaaggaattttaggtatggcacatacaaacttgggaaaatattcagagtgccagtagaaggagaccttctgaaaaagaaagataaagctcaagatataaagaaattgaacttttcccttcttgacaattctatataaagtccaactggaggagaagaatcacagagttgttgcaaataaagttgaggctacagtgagtctaaaagtttattttatcctaaaagcagcagggaaatttctaacatgaaggaaaaaaagacataagtttttgtcctttctagaattcagtgttaaacagaaatggatttgagtactaagaaagggaaaaaataacacaatcaaaatcaatatgcatatattgagcactcgctctatgtttgctatcagttattaagcacccactgtaagtgccaaggattttcaattttttttccattctgaaacacaggagaatctggaaatcagattatcagagactttaataaatcaaatattgaagttgagccaaaatctgggtattattcattatgttgccatcccaatgcttaattgtagagatcatggatttacctattcaaatatggaccacaatttccataccattaaaccactttattctgtaggaatgaaagggctttattcacaaaatatgctgacgtttatgagtatctacgtggttctagccttgtgtgaggagctctgtaaatgttctcatttaatccccaaaacacaatacagagtaaagccaggggtcaaactcaactatatcaagttccaaaggccccattcttttgtgatatcacgcccccattacaaagaaacgtatgtcagtaaaaatccatcaaaggaatggaaaaggtaatcatttccccagaatatttaacttagtctgcagttttcccttcctcccctcatctttaagcccttcatcaagactctacttcagtgtgtcttttcaagtccaccatgtgttatgttagaatgtgatgtccactgaagtctgagcttcctggggacagggattgccttctccagtatggcaccaggcacatggtaggtgctcattaaatacctcatcattgaagttagtcaggtagctccaagaggagttcatttgtcactgcttctctttctaatgtcctttctttccttttcccaggctaataggtctcgagatcttggtgcaattgtttactgtgttggtgtgaaagatttcaatgagacacaggtatggtaatggatttcctcaggtttggagcatactgagcttgtgaatcatgaagaacatgttcagtcagtgcagagggaagatcaatggaataaatgcccctgaaataggttatttttctagaaatgctaaacaggaaggaattactggttgtgtaaggaatatgaagtcatttgctgatgctcttgaggtcttcaacacagaccatcaaggcagcatctttcttggcaaacattaaattgccaggatgtcaaaagatatctgaattaacttggaaaacgggttttttctgtttgtttgtgttttgagacagagtctcactctgtcacccaggctggggtacagtgagctgtctcagcccactgcagcgtctgcctcccaggcttaagtgatcctcccgcctcagcctcctgattagcttggtatacaggtgcacatcctgaatagctgggactacagacacacaccatcacacttggctacttttttttaaatttttgtaaagataaagcctcactgtattgcccaggctggtctctaactcctgggctcaagtgatcctcccaacatggcctcctaaagtgttgagattataggcatgagccaccacacccgggccaaatttaatttgacaagtatgattttcttattcaaataacaaatgttccttttcacccatgaaaaacgcaaagtattttcaacacaaaaatatggaaataattggacaagtgggcaaaaaaatgtgtataggtgcatataataagcaagttgtaaaagcttactagcaatctaaatacatgtacctcaatgtagttcatcgtttctttttgttttaatggcataggaaaatgctcatgatatatcattaagtgaataaaacaaaattacaaagcagtgagaatagtatgtgctcacttctaaaatagacatttgtatgttcacatagaaaaagtatgaacagtgtctatcaaatggctaataaagatagatagatgatagatgaacagagaggattatgagtaacgtttgttttctttttgttttaactctcctggattttcctaagtttttacaatgagtaagtattacttttgcaatcagtaaaaacaataaaacatatttttttagaagccatacacaacagctgacactgactctgtggcagtcacagaaccacacagagatctgggggcagacaagccctacatcggcttctcctggccctcagtttcctgctacataaagcaggagcagccaaaccaactgcaagggccctttccttaatgggcagtttgggtgaaaggtgaaggtggcctcacccaacaccaaagcttgaatttaaatttgctctgaaagggaacttgaatctgcttgattcagataaagttgccaacaggaatttgggtgaaggggagaaaaatgagcccatggcctgtgcccaaatttataaacatatcaacccaggccaagcgttcatcaagctgggcgctcttacctctgctcccgaggagaaaagtattgaaacaaatgtaaaagctggagccaacccttggcctgctccagagaggccactggtgagcttgttattactgatggcttttcagggcagcccctgagcccagtgaaggcctcatattcccctgggttctgaatataactagagccccttagccccaacggctttcctaaattttccacatccaagcctaacagtctccccatgtgtttgtgtatttgctgtgttctcagctggcccggattgcggacagtaaggatcatgtgtttcccgtgaatgacggctttcaggctctgcaaggcatcatccactcagtaagtagagctcttcctctgagactagacattcaggcaccttccgtctctgatctgctattaataccccaattccatctctcaaagcctggtgtttttctgcttaagagaacatcatttcttcctatatctttgtgtctgccacgtcccatctctcccttctgccttttacacatcttttctcaattgtaccctgcagtggaaaattaacaattgaaaggggcgctactctggcagtgagccaggcttcaggaggccctctccgttctcctaactgggcagactgtggctggtggtttacgcttgaccacctcagctttcccattgtgactgaacacaagctgccttcagagcacttgtaggcttggacttatatcacttggccattggatgcactttagaccaggctgtccattgaagtcatctgcagagatttaaaaagcactgctgcctaggcatctggtctggggtgcagcctggacctcaagagtttctttaactctccccaggtgattttaatgttgagacccactgctttcgacctataatccccaaatacatgggctccagtgttgtccagggtttgcacggtcaccagtcctccttcacacataggtgattttcttcacaccttttcctgaatagtaaacaggacactggcttccagggcctctattctccacctcccatacacaggcaaggcccttggtccaaatagaatattggatgctactgtcttaaagcctcagccagcaggtcagtatgtgtgctgcacctgcaatgatgttcagatgctctgcagcctccaccattaggttttgtgatcaggcaggcatctgtgatcttcactggcagcttaccaggctacagacttggggtccaggatgcaaattcagagctcaggggatcactttcctcttaagacatcaagggggtcttgatccaggggttaccggccaagggctcagcatctgccagccctcccagaccaacccaggaaaattccagcatggctgtgcctccatgctgctctcccttcagggtttgctaggagctccagcagagtggaatgcagagtgggaagtaagaagctcagagcccggcaacccagagtttcattggcccacgtacttaacacttagagatccttggacatttcttgtttggaaacagggactgatgatgacttacatcataggcttgtttgaggattacaaggattactggtgaaaatgcctaatacttttccagacatacaataggcactcaaggcatatgaattattgcctcttccacttctcttccctatcatatgacggatattaatgtcagcttcctttgatcccctaaacattcttgaatatgcataaaaatcacttgagaattatgtttgtaatacctattcccaagagattctattgcattgagtttcagatggatccaagggatccatatatttcaaatctgcttttttttttaagtgccccaggtatgcttttagaacattgacatatctgaccttaagaatacagaattgcaaaaattcatcccacctcaggttgggaatttctgtcttaattatgttccaatgacagttgttttattcaagaagtgcttgtttgcaaagaatatatgcctcctcaagctaccttaaccagaaagtggaaattattgatagcatagagaattatcagacccagttgtcagtccacaggtgaaggactcctactctaaattatttctggggtcactgtggcatacttgacagtgtaagcaacaagaactacaataaccatgtaaaacaacaacccaagggatgcaaaacatgattaatagcaggactgggggccgatcatggatccttaagaagctcagaggtggattattctgggcaggagtcctcatgagaaggcagcgcagacccgaatcattgaaaaaccagggaaaggtgatgggtaccaccaaaggagagatattatgacctcaacctagaggctggaagacagaaaagcatactcaggggtcaataataataataatacctatctatctagtgggacagtttgggtaaaggagtcaggagtaatggaaaataagcctagacattgggttgaaaccagattaacatgagcctcgaaggggttttgcctctaacctataggcagtgggtgtagttactgaaacaagttaagaaaataatctgatggcagtgcttgcatacgtgggagggagactggggatacccagagactgtaggccaattaggaggcaatagtcctgccttaagatggctagattctgaaaagggacaactcttatctgttcagacgttcttatgagccgtgtgcctaactccaagtgttgtttcccacatagatgattggactctttttgtatgcataaatcagtgttgtccttgaatacatcagccttagcaactcacccaagctcaacatgagcccaaatgtttgtaaaacttcctccatccccaaatggaaataactgcaaagatctttaagaaattttagcgaaactatcgttcaaaatagaaagaaaactaatttgagactttagtctccaaacttttagctgaatgataacattcctgtgagcttttatctgtgagttatgctagtggttttgatccttccagtactcgaaacccatgtttatggcagttgttcattcgtttgcttggacagagaaacagggacaagtagagcgagctcatctttcttaaatcagacagaaataattacggcctaaaagttggctaactatttttaagaagtagattcatttccccttttggatactgaaaagaaaactctcaatttcccccccatctgaagcctctatcccagcttgttcccatgaatgttgttttgtggctggttattttctcataataaaataggactgggcttaattatccaaaataagattgcagagcagcttctgataagctcaaattcttcacaaagttttctgcccataatgctcatatttttaaaccttaaattaatatgcaggggctagtatttattcatacatcaaatacttattgaaaatcttttatggcaggctctgaccattcagtaacaactaaagcaggtagaggctctgtcctggtagagcttacaatccagtgggagagacacattaaaaacaagtaaataaataatcatgtggaattaaaattgtgataacaggaataaaagaaataacatggccatgagattaagagtaaaagggttgacaaagaacccaggttcctttgaagagatgaactgaaggacgtaatggagccatccattggaagggcatggatagaatgttcttggcagagcacggcccagtacagtgcataggagaatgaaagaccaatgcttaaagtgaagaaaggcagaagatgacatgaagaagcaggcagaagctaaatccaaggacaataggaaactatagctaggtacagagtctgacaatagagcaatcaggcttgaaatcaagactcaggaaatctagacatcatggcactcagaatcaatagcatttcggcctttgaagaagaaaactcactatgacttgaacacgttctctctattagcgcctctgccaggcacttaaccaccactctctgaagaaggatttattatccccattttatagatgaggaaactgaggtgcaagaaggttggagaaactgccctcaggtctgccctcttataatggtggagtggggaatttgaactcagctctggttccaaagattctgctcttttcatgacatttggccataaatgtctgaggaaatggaaaatcaccactggattaccagaagccagttgcccagggcttggattcatcaaatccccagatgctctgcttcctcaatctgatgctcatgttttgatctttccactgttcttcaatcctctctccttcaagaggaagtacttatgtgtcagattttttcaaaatgttcccacttgttttccattttagtttcttaactgagagggataggaaaagggcagaaggaaattaacagctgtagagaacttactttggaaccagacattatccctttttcccatataatattatttcatttaaaaatcataacaatgctgcaaaataaatattcctattccaatgttacagatgaagaaactgaagctcagataacctgcccaagaccacacagccctaagggggaaagcagggttagaacccactttttccttgactctagagcccatgatttttcctacctctattttcttaggaagctaaaaataatcaaaaccaccattcagtgagttcgtactatgtgccaggtactgtgcaaatcatttcacataatcatctccttgaatcctcacaggtgccatttgatgtagaaatcattaccccttttatagaagtagatactaaaagttcagagagattcaccaacttgtccaaggccacacagcacagtgagtagtgatcccgaatagactcaagtctttctaatgcccacgatgtgaatgcccactgtgttctactaaacaatgcaggcaggccaggaagtagctccatttcagagaggaagacactgaggactgaaaacgtgaactggcttgacagaggcaagaccagaatccatgtggcctgatctgaatacaccgtggatgggcaggggagcactttgcctcttactaccaggtagagaccacctccagaaatcattactgcccaacggatgaagtaccatcgtcctgagaagctggagaattgacacaggctgcaaggaacatctccccttccacacttgcacaggactctacctctgagcaccacgacagttttcccactcgcttctgcagaatatggtgataaaattacaagaagaagtctggatggctggaagattgtagcccttgaagccagtaacactgtaaaggaagaaactattcctgtgccttctcatattgtggcttcttcagggaatttccaccgaccacaactggtgaatttagcaccagccctcgagcaaaagtatgaagcaaaggtccagcaaggctcctgggtctttgcttgccttttcaaaagtgtttcaggcagtgaaacaggaacccgcataaaagctgggttcagataacaccgagatgggtcagcagctttgaatcccaacactcggcctggttaccgtgatgccagctcctcctcccagctatccccacttggtgtgcaactgagggtggtgcctgaaaccaaggacactgtctgaaaaggagagcccacagctgctggcaccaagccatctccatctaggagaatttccctcgaataaatatttaagccgacatcaggcttcctgttaaggagagtgagtcagcacatagagctttctgcatgtttgatcaacaataaacaacaagcattgagcaaacacaactatgtttgcaaggatttctcgcaagctgtggcatgaccatccttgttatcagggaaactgtgagatcaacggaaccgaggaatcaatctattccatggtatatataaatttattttatttatgaaaaccagatcctgtgctgatttgtcccttccactcatgggaagcaatgtaatcccctaatctggcccaggccctaacaaagctgtgataaaaggtgaaatctgtcttccaggcttgcctcccagctactcttccaagaccccaacaggaactgcaaagggttttcctgtgatcagaattcatgtcacattcccaaagtcctggaaagtgtctgccttattgaactaatcccttttccagggctagcagatggggaggcacatttcagcagcagcagctcttctcataaatcaggcttgttggtcactggaggcaacctccttcccttccttcgccccatctgaatcctgtccaaaggcacccttcagtcttcccatctctacaaagcctgccctgctctctcctcttccatgagctctccctgccttggactccagtggcaccaattttttgaagctcttgcttggcatgtggatctgttccatgcctctgccattcctcctggtcacatgctaagttgtgcaatcccaaagactgccctatgtgtcatatttcccatgatatgcagccctgtgctttgcatatttattaattataaagcaacccagagtaccatagagcttttgtgacccagggaagacctacactgcacaacaagagggcagtctgtggctccgtttcttgtaaaatcccctcagcctctcccctcccctctcttccaagattgcatctgtaaaacatggcattctgggcaccattcacattagcaggcttggatacgaaacataaatagaatcaattgtaatttctgtagtgggcagagaatcttttttcaaaaaaatcttttgcctcagcagtcattaattagactcagattttgcagacactcagaccaggcatttctcctacactattatttctattcagcttattaaaaagtccaaattgaacaagaattcccagagcttgaacaggctacaaagattgcagaggggcatgttcagttaatcctcagatcattcctattcttcctgcagcccctcctcctatattgaggaatctgctgagacccactataaaagcaacagcagaattttagaacgaaatcagctcccaagaaaggccactcacttttccagtctgctcatcttactaaataaaccacattttgaagttcccagctctctgagcttttctcctgcagacatgagaagaaagtggtttagtggggaaacaaatgaatttcctacttttagaaccttgtttatcctacactcctttggatcggattctcattgagtgtgaaactaacagagtagcatctatttaagtgagtggggtgccctccctcagacaaaaactttggcatgttttaagaataagctttattgtttaagatacacaaactgcttcaaaatgtgttttgttgcatgtaagcgtggtataatgtatttggtatagtgtattagtgtacataaaatcatatatgaatcccagaaatacgtgtgtataatattccatatttgtatttgtaaagttttttttttttttttttttttagagatggggtcttgctatgttgcccaggctggtctcaaactcctggccccaagcaattctctcaccttcacctcccaaaatgctggacttacaggcatgagccactgcacgtggccatattccatttttatttaaagtcagattctatagaactgacatggatctggggtaatgtccatggttaacaatatgtgtgcctattaaagtgtggagaatttagttagaaaaggcaacttttttttttttttttttttttgaggcagagtctcgctctgttgcccaggctggagtgcagtggcgctatctcggctcactgcaagctctgcctcccaggttcacaccattctcctgccccagcctcccgagtagctgggactacaggcgcctgccaccacacctggctaattttttgtatttttagtagagacggggcaactttttaaacattttattaattagagattaaatcatttcaaaattcatggggacaacattgacagtcctgaagatgtgtttgagccagttgtgtgtcccaagctgcctggctatccccaggcttatccaatgtgctttctgccatcagctgtaataatgtttgtggcgcttctgtgggaggctgggccccacctgccaactacagttctctatgtttttcccaagaaaaggggttgaggcctttacaaagcggccgacctaatacaggggattatgatatgcctacaacatttttttttaaggtaagcaattttttaaaaatgaggtgttgaaattggcctcttgggaaggcagcaagtccccaaagatggtggtacttaatcagacgaggggagtattacaagatgcagcatatggacttgtattcagaagaccctgaggttacacttatagggggaaagggagattaatacataatatgctacaatgccagtttattaagacgtgcaggaagtgtgtcatttattcatttatttatccaatatttatttaatgcctactatgtgccaggctagtcattgtgaatataataagtaaaaacaaacccagtccttctccttgtagagtttataatctaagaagacagtgaccaaacaataaaaaaaaaacactgtaaattataaactaggataagttatctaaaggatggcagtttacattaaaatgtgcatggatatagagatatttcattggtcaaatcaccagcacttaggtggcagaactcatattggatttggagagtgacagagagagcaaggctaacttaaacgttcaggtttttgtcttagacaactgaacagatgtaaatggtcggtagatacttaaccatccttgacaccagcatacttcaaaccccatacatctttaaaccagaatttgccctttacaacaaataagacaccaaggaacatgctctgaaagactttctgaaatatgtgtgaaagcaaaagacacctataccatcaagggataaaagagattggtccattataaacacacaaaaaagttctccaacaggaaatggccaagtaaataaagattggttgtttattaaagcaagaagcagagcaagtagaaaaaagaaatgccgtgcctatgataagggagggattccttataactctgtgcagatattcacagttctgtaaagattcttgagaaatctctgcataaactgagaacttcatgacaaaggacattagatttttagaatttgaaaaaataaactcttctatacaacccggactggtccacagtggatttcactttaaatatatcaaacagctcctgtaacttggcaaagttcttgtacatccgctgcctctcttactcgtcctcccaccaataatccaatgagatgtacaaaagtcaacttaccagaaacaacacatgacaattatttagctctttatggatttcaaacatacttttccatctattttctctttgaaatctgtccaaaagttggcaggaaaatagcattaaccttggttcagcttttgtcagcaaatatgattaagcagaaggccaggggtgggcgatggggcgtaagcacatgtgaaccacggtccacgcccaaaagtagcagcagtagcaatagtaatgacaaaggaagagctaacagccactgttgtttgaatacatgccagacattctcttaagtgctttactgccaaggtcattttgaccactcttcttggtgccttattttcataaggtgctcatgctggctggtgacccaagggttattaactttctgtggatcgatcacatctgtctagttctgtctataagacaaaaaccttgtcagttttccttgatctcatgctctccctcaccgtccaatccaatatgaattttattacctaaatctgattgattttccaaacaaaatatctctgcgttcatgactgttattttatttaaccatcatacagccccttgaagttggtgtttttcttatcccattttacagcagaggaaactgagatttggaggtttaataacttgtccgagtccacatggccagtaagtgatgggacttggatttgaatataaacccattcagagtccaagtctatcttctcagtctccagagcttaagttcttgatagtaatagctaccattagttgattacttatcaggttttaggcactgtgctatgggctctgcctgtgtgatctcatttaatcttcccacacaacaactttatgctcgtacttcaggtagatactattgttatcccacttttatagagaggaaacagggactcagagaggttatggaacctgcccaaggtcacactgctcatgagtgagttgacctcagctatttgattccagattccaagcaattactcaggatactgaactgctttccaaaattggggttcagaaaagttaagggatttgtaaaggagcataggtcaggtaaatacggaccagggccaagacccaactcttcacatgggattatacttgaggcatgcagttatcttatccctctctcctctgcagatcaatcataccctcaccttaaagcctcttacctctaacatcagccttaccctgtgtaagtctcttccactgcatctagtgatttcccatcagcgattccccagtgctgtgtctacacctctgccatggctaccactgcccgggcctccctacccccacacagtctccagtccctgagctgatctgctgtctgctacagttcagacaggctgattaccatacagtcttggctgctaagaaccacgagaacccttcaaatccaccaactgccattgtgacttcctaccttttgaaaccagacatttcaaatgagtaggagccccagtcccagacaaatcctgcccatccccctcactgataaattttactctattggctgtattgcatccttccagatgttttaagttaagattgggaaagctgtgtttttactggattgaatcacagtgcttggctggcattttttggccctccatacaccccttagatttatcagctaattgcagacactttgagagaataatacagcatgtgtttattatgacaacccctgttagtgtgcctttgtggttaaagatccacggatggttcctttaccaatccctggttaaggatcagagttggttcaaaaaggttggttgaaactcgggttgggtaaaaatttcatgtgtgtgtttggggaatgggaacaggactagtccaaaagctctttttaaattcttggactgttttgaagtctttagttttggatgataaaatgatttattaggagatgtcaaatgcctgaggaattttatttaaaacatcaaaaaacagctttgtgttgttctaatatcactgtttaataagtttctccctctgggctacctctatttctcaaatgtgggctgtctggagacttgtgcctgaggacaagtcaaagggggtggcttcctcccttggtcatggcaaccactggctgaagtaccccatcaaacaggaagagcccaagagcagcaagttcagggattggcaaatggacaatcttcacaattcaggcagggctgtctgggatgaatcactgtgcaccaggatgctagcaagtcccagtcctaatacggtgctatatgcgcaagagaccgaaaagactagatcaaccataaggcactggggaagccagcagggaaacacaggtgcccaggatatatccttggggtccttgttcccaagttagactgacaatgagtggaaaacaggagctcagtgttttccccaggtgcccagagcaggtgtgtgaggaccgctgactctaacagagatgggcaagggacatgggagtccggagcattcccttcatgctacagtcaggatagacttagggaccagggaggaactgaggctgcacctgtgtctggggtgggtggaggtggctaggtaagccagaggctgaggaaatgaggcagaagctgaaggaactaattacttccaactgcggagtcagaaggatgctgcaaacaaataggggaatcaaagtataaaaatgccatgaagttctacagagtgaaggaaaagtagtcagaaaatctgaattttagaattgtcaagaagaaatgttgcttttggtgacattcaggtacatagagttacctaaaatacatggttgggagataacctatttcaatgaatgcatcttaatattttcttaagcatgtttgttcattttctttcgcaatgcttctctataaggatgcccagatttctctctggaatgggtaaatattacctcttctgagaaactgatttgttttcattccacagattgagaaagctcataaatattggctgtccttttcgtttgctactagaaagcttggaactaagtccactctagcaaggaaataagctcctcagcatattttttctatgctattctcacttcttgcgtcatcttccctttattttccctttagtcagccccacattttcatttattctctttcatttgtgtcttgtgatatatcacttaagctgtaacaaagaagcatatgtaaagaaatacaacgatgcaaataaatgggcgtttcccaatgctaaaagatgctttcttctttcacagactttaaattttataatcatatcgtcagttgttttaacaaatgcccttttcaagaatagagaaagggtttccttcagccctctaaaccatctcaaattccaaattaagtaaagatactgcatttggttggtaaattaactcaatgtcttatacttgttaaaaatacttgattcaaattctagaatcaatattctcaaggtaggatttataaatggtggagagaaacttaggtgctaccagtgagaaaccccactctagccagcaaaagtcttcattattaactcctgtgaagtcacagtgctctgctgactctccactcaaccctataagactcatttgtggacaagtgtacatttccatttaactaagtctcaggaggtcttcctgaagagtgaggcacaaatgccccctttgaagctcacattttccagactttccaagcaaaaaaggaactcttggtcatctgactatgcagcttctgtggagagttgaccatttccgtcctatctctccagctctatctagtatcactctcttatttctgcttttcaagctgcctttgttccagttcaagaaatctatgtactttttccttctcacctttgctcataccattccctgcctggaccctaatcctcccctaacccactccctttcatttgagtcccaccctcagctcccagctcttccatgaagcctttcctagcatacctgccccagcatctcctccatgaactctgcagctcctactgtctactctttcacccttgcacctaccaataggagtggccattggcatttatcatttccagagttaagtcccatttccgcaaccctatgttaaacctctgcaaaaactaggactggcatagcataggctcagtaaatacctgccaaaagagcaaatgaatgaataattcttagggcttttaggatacccaacagcatctagcacaatctggcttaataaatgtttggtattggtactagtcaagatgttagactcctcgcacccccaccgcaaccaaatgtccttgaaccttcctatctctatctcagtagctaaaagcagaaccctgattctgtctttgaacaaaataagctgtgcattgactcttttatttccgctcctcctagattttgaagaagtcctgcatcgaaattctagcagctgaaccatccaccatatgtgcaggaggtaaattgaaatgaaatgctaattgctttcatacaattgatgatattttgagttcaagtcacgtatgtacttcattgttggtggggtgggaaagaggaacaggaaggggtagggtgaaaagaggagctgaaattgctaaccaaatttgctccaaggagaaaaggaaagaaagaagccacatgtcagttgtttggaagttaaaaaaaaaaaaaaaaaatctgtccaaattctcttctttcactgggcgcggcgccttatgcctgtaatccaagcactttgggaggccaaggcaggcagagcccttgaggtaaggagtttgagaccagcctggccaacatggttaaaccccatctctactaaaaatacaaaaaattagccaggtgtgatggcgcttgcctataatcccagctactcgggaggctgaggaaggagaatctcttgaacccgggaggcagaggttgggttgcagtgagccgagatcgcaccactgcactccagcctgggtgacagagcaagacaccatctcaaaaaaaaaaaaaaaaaaaaaaaaagttatcttctttcatgggacctaattagaagggaattgtagaaatactggattcttatactgaatactcagtgactaccaacaccctacctctggatagaaatggaatcacccctctttttcatgaggccctgcagataccagacaatcatagtggtcataggccatactggaaatactgctatactaaagtttttagttggatgctggccttttcacacagttaatatatttatcttaattgtttaatctgccagtcctcacacaatggtagtggacggctctggttgtccctgtagagggccatatagttttgtcattaataaggaagtctctatgtaaagaattagccttcttcgagtcacaagattttctctaactgatcaaaatcagggtcatgctcgtttcatatttaatggactgcttaaaacttcaaccacattggcgcttctcgtataattcttgacaggttccccatcactcttctttcattcatttgaaaagtattcttaagtgcctgctgcatgccaggcactgtgctaggtgctggagataaggaaggaaaaactgtgtgtgtgagttcctgtcccccagaaacttgcatctttcaccattgagagtttattgttgatatcaccttttcagcctgccaaaatacagtgccagttattaatttaccaacagaaaatatgtcatacaacctgataaggtaggaagcattaaaggaagaactttcaggcctcttcaaacactacacacatcaatgtttatggcatattttactggtataaatgagggaactccttaaggattttattccagtttctggcctatagtttagaacaactgaaagactttcagggagttaggtgcactaaaaaatcggtgccagcagcaaaacatcaagtatatatgtaaagatataaagttgttatcaatacttggtaactagttatgtacatacataaatatacagcatgcatacataaatacatatgtacatacataaatgcatacctacataaagttgttagcaaaatacttggtaactaactattcagaaatatgtgctaatttcccaaagaaaggcaatcccaaaagattacctactgacctttaaataaattgctacctgaccacacagatggcaggggtaaatgtgattgccacagaggtagatcggtgagaatctctttaagaattcagaaatcttacctaggcaaatttgacaaaaacatatgaccacatgaatgcagtgccagggcttcataaggggcctgtgcagtgaggagcctcagttaggcttcatgaatttaccttgaagataaattcacctctgggctttgtgtgcttcaggtagaggaattgagtaggatatttgattaattaaatctcatgtagtgtgtgtgaattgttttataaacacacattttatagttctgtaattttaaaacaattagaaaataagggagttccttgactgcaattattgctttcataaagaaaacccagactttgagtttagcagtctaattggctgtgttgtgcaaccttggaatgaatcagaaagtctaaagacaatgaacacaatttctgttaattcactagtataatgaattcccttcctgtaggctccttgaagacagagaaggaaacttatttctctctacttcccactgcctagcagggtacccagcactcactaggtggccaataaatgttgactaaatgtcttgattcatgtattcgttaaaaaaacaatgccactgatacttgcctatttgacccttattaattcctttcaccaaccataagaagttaatatacctttgaactgcaactaaaatgaagcaaaatctaaaattaatagacaaagatagagtaagaccaaagtaaaaggaaaaatctccaccacttagacaatggaaaattgcctttgtaagtaattttaacctcaaaaagtaaacaatatcccctatatgtcattaaggtgttcaagacaataaaaacaccacaaaaacaaaaatgacacagaaataccagtgtccacaggatctgatcatatcaaattcatagatttcaatgtttctcatcaagtgaaaaagaaaaataaatgaattaagaattaaaagataattttggaaaaggtaaggaaaatacaagaaacaaatacacaatccactaataaatttaaacaaattaaagcaattcaacagataaattattccaaggttatttggtagaaccaataaaatagacaaatctggtaaatccaatctaaggaatctttctttagattttcttaaaatctctggcttatgtgcaatattacatattttataagcaaacaacagttatctgtatcagagtaaactatccaatcatattatctttatttcttatagagaaaaaattaaaacaagacacaatgatgaaagctagaactaggttttgtaaaaggcaagctcccacctctcaaattcaagtcgtaagggtttaaacatgctgattacagaataacatttctaagaagagaatgaaactcccaaaagatatccttacatcaaaatttcttccatagatttccttgaagatttcttgttgaccattctctggagtaaacatagttttcaggaagcctgggagcccatttcattgtccggatgcctgtcagatagagcgaggcgtagcccctctgtgactttcattaagctagttcaaagatataagtatttacgtgaaagtgctttgaaaagtataaattgttatgcagaacaagatggcttgttatcagcatcatcttaataaggattaaaggccagtgttagaatcatgatgttgataatgtcatacctagatgagaaaagcattcctgtatgtttctccgctgaaagaaaattggggaagagtatctgcaaaatgattaattaactcaacatgtattgggggagagagtaaaaaggaaataactgattgttcacatttctaacatataatggtgggaccaatccctagacagatatgtaaagaaggtaaactttgccttcatcgaaaacctttcctcttagcctcttcccttcactctgtgaattccttcttttccttggcccctagaacagcccctgctgtggagccctacccaggtctgtcctgctcaagacactctatgctgatgattgcattcctctaagacagtgatctcagctggctttcaaccccagctcaacaccagcaatggttctgacagcaaactgagctctgggcgaggcagcgagataatgacaacaaagccaaaatctagcacaggcctttatatgttgggctgcacataacaaggtgtaatttaatgggacaaatataaagcgttgaacttgggttcaaatatccagtttcacatacaggcaggtttaggaaatcctgacttagtaacaattaacggtaagatagcagaaaagacaagaatgatcatagttgtcttgctccccaacaagaatgcctctgactaagaaaagctgacacaaccttagggtgcatcaataaccatccagtgtccaggtcaggagaactaacagtcctattccatgttcagaccatggtttcaagtcccaaattttaagaatggtattgacaaaggcatgtccataggcgaagaggtaatggatctggaaatcacattataattaattcatggattcattctttctttcatttccttctttccttgcttttttctttccttttctttcttctttccctctttttcttcctgttttcctttcttcctcctttcatcgattcttagtgtcttttatgcaccaacccacatgaaaatgtatcaacacaaaaatgcataagacttagtcccaaatccacccacacccctatgaaactcacagttcactctgggagatagtcatatgttcaaataaattacaaaaccacgcagtaagcactgtagcagaagtctgcttacagagtagtgagagcactactgagatgcctgtgcgatgaggaaatactgaagtcatcacagagactgaggccaggaattgagatactcacaagagcatctttagatatttggaggattcccatgcagaaagaaattattaggcttattatgtatagctccaggagaccaccatggaggggttggggaggaattcagtgaggcagattttggcttaccacatgcaacttgtacaactaaagctttccaacaatggagtggatggtctgagctctccccccatagaatcatgtgagcagtggcagaatggccatctgtaagcagatgctatcaggagaaaacctcctccgggtctcctttacagcttcagatttctaaagatttaattcagtttccactaagatattaatggatgattatttctcaataactgaggaaaccagtattcctggaactgtttcacatttttaactggaactcttactggggagagggaatggagagaatatgtaatctgctgccatcaaaaagaattccagccgggcacggtggctcacgcctgtaatcccagcactttgggaggccaaggcaggcagatcacgagatcaggagatcgagaccatcctggctaacacggtgaaaccccgtctctactaaaaatacaaaaaatgagccaggcgtggtggcgggctcctgtagtcccagctactcgggaggctgaggcaggagaatggcatgaacccgggaggcagagcttgcagtgagccgagatcatgtcactgcactccagcctgggcaacagagcgagactccgtcaaaaggaaggaaggaaggaaggaaggaaggaagggaggaagggaggaagggaggaagggaggaagggaggaagggaggaagggaggaagggaggaagggaggaagggaggaagggaggaaggagggaaggaaggaaggaaggaaggaaggaaatcaaaaagaattccaatcactgcattggtaaacagagtgacactccatcaggaaagaaagaaagagagagagaaagagggagggagggagggagggaggaagggagagaggaaggaaggaatccaatcactgcactggtgaacatatatagggagagagaaccttcccagaactcctccactctcagaggttataaactggcagcctacaagtcctatctgatctgcatatatattcttcttgattcatactgcattttttaacttaaatttattgctaacatttagaaaatcggatttcacctaaaaatacagattttcatcttgacttgaaaaatcagaactgacaacactgaacctgtatttattacaagttaatgattattgaggactgaataacttcctttaaaagaaacgtatacactttccagttcaccatactcctcaccactctccattgtcaccccagtacccaggccaagcatgtggctgccatttagcatggtgcttatgtcactgtatttacagtccctgttccaaaacatgcaggaagtcacctgctatgtggaaaccctttgtagcaactttgacattacttgtatttcagtaattctgctcccaatatagactcttttttaaagtttctaattaaatatttttgcagattagcctctgtttaattaagaatatggacccatttggccctgtctaatttagctcctctctggaaaatgcaccctgtgcctgagcacagtctttctgtggtcccactcagttggcctccaacttccacagttcacaatgtgctatgtaagcaaggatgccaggaaggaactaattggaatcaagtgtgcaacttgccaactgctctacacttgaagttcttgtactccagaactggaaggaagttataattagctcctcacactgtcatttcagcagcagttgtattcctactgtgtttcccactgtttctgataaaactgggtgagctggcacaaaaggaaggtcatttaaggtgtcatgtttaccatttggaaatttcgatgtttaaaacagacacattcaagcaacatcagatagtggtgtattcctctcacttttcattgtttttcgaagcattcatttctgacctttggccacctcttctaaatggattgcttcattctctgctcaatctttcctttcatttaaagacatttctatgtggaggaaggactctcatttacaaatacaaaacagcacaacactttggaagagttttggtagtttcttacaaaattaaatatacacctaccatatggcccagccattccactccgaggttttacctaagagaaaaggaaatctatgtccaaacaaagaaaggcttgtgtacaaatgttcatagcagctccatttttaatagccaaaaacaactaaaatgttcatccacaggtaggtggataaacaaattacagtttacctgtagaatgcactaattaatactcagcaataaaaagcaataaactatgtataaatctcaacataattgtgactgtgtcctaaaataattatgctgagtaaaagaagccagacaagaaaattacttactgcatgatcctatttacataaaattccagaaaatgcaaactaatatacagttccagagagcagaccagtggttgtgtgggagtggaggtagggagggctgggaggagagattacaaagcaacactagggaagttctgggggtgacagctacgctcactgtcttgactgtggtattatgattgtgtacatatgtcaaaatttatcaaatcatacactttatgtgcaagttattgtatatcaattatgcctcactcaagttgttataaattaaaagctataactgaaaaaagttctagaacaattcaggcctcagaaagcacccattatatgtcagtccctacattttatttttgatgttccataccacattaagcatctaagaggagagcaaattcaaactgactcacaagatgaaatatcactgacaataatttggcacaaaaatcttgggtgaccagaacaagtggagaatatacagatgtctcattttcagacacagtgaatgacatgcaatctttattgaggtcatctcaaagctatgtgttccacatttccaaaaagaaaaaaggaaaccaaagaaataaaaggagagaacagaatggaataaatctatcgaactacttactgaccttattttttctttttttaaattgagctatattttacatgctataaaaatcacccttttaaaaggtacaattcaggccaggcgtggtggctcacacctgtaatcccagcattttgggagtctgaggcaggtggatcacttgaggtcaggagtttgaaaccagcctggccaacagggtgaaaccccgtgtctactaaaaatacaaaaattagcccggtgtactggcacatgcctataatcccagctactccggaggctgaggcaggagaatagctttaacttaggaggcggaggttgcagtgagccaagatcacgtcactgcactccagcctaggtgatagagtgagactgcgtctaaataaataaagtacaattcagtggtttttaatgtatcacaaagttgtacaactataataactatctaattccagaatattttcatcactccaagaagaaaccctatacccattaagcagttattcccccatttctccctccctccagtcctggcagccaccaatctactttctgtctctgtagatctgcgaatctggacataccttataaagggagtcatgcaatatgtggcttttgtgtcttgcttcttttatttagcataatgttttcaaggttcatccatgtcatagcatgtatgagaatttgatttcttttgatggctcaataatattccattgtatagaaataccatacttatcagttgatgaacatttaggttatttccattttttggctgcttttaataatgccactgtgaccgttaatatgtaagtttttgtgtggatataactttcaattctcttgggtatatgtctaggaatggaatttgggggtcataaggtaactgtgtttaactttgtagaagaactgctaaactatttttcaaagaggccacagcattttacatttccaccagaaatgtatgtgggttataatttcttcaccagcagatgccattgtccatctctttctcttcagcaatcatagtgagtatgaagtgatatctccatatggttatggtttgtacttccatgtgactaatgatgttgaacatcttttcattcatggaccttattaagcctcagaaaataaacaggattagacctggttgggacctgaataaatgatcaccctatccttcccctttattctctttctatgccaagatatgttatttattcaatcactcaatgagctcatcctgagactgactcagtcctgggttaaggcacaacccagcattcagaagaaatagaaatcttggcctctgccatcaggaagctttcaatgtaattgggaataacagtgacaaaagaatatagatcttaaggaaaccttaaaggatagataacttaaaagattaaatcaaagaccattttcaggtggaaaattcctccctaaagccctgcaatcttgaggtacttcttataggagctgtaagccaacatacaagttgcctaaaaacacagctgtacatattttgaaaggtgggttcagggctttgtagattagtggagttaaatcactatgtcctggttctaatgtgtcctggttttcacttactggcagattcattcgaaagggttttgttacataacgtctatgtgtgaagagctgacattctagtcaggctgctgggccagatgtttgagctcttctggtaaccaaatgtgtgcactaacacagaaaccctatcaggcaggatgggagctcgcctctgccctggtgcactccccagagcatcatttcctccaccgtctccccctggcctagggggttaaattgtttggtttccaccattgccacatcatggattcctgctgtctttcttcctaaactccctgaggtggggccaagcagacatgcaggcagcctcttttatagaggatttagcaactcaactggtaatgttagaacatggtgttagagaatagagtttggcatgtggcctgcatttccacagtcttctcttcctctgctgatctttgaggaaacaagagaagtaggcacagaagtgaggcagaaaacatttggaatcagcaaaaacatcaaacaacagatgtctgtatgtctggcattcaaaatggacacagaaataggtttctataggcttaactgagcaaataagagaagataagattcttctacaagtgcttgacacgtactaaattgcttattgagccaaccaaggaatctgtcagatgcctgacagacatctagagaaaactactaagcccatctttctaaacgtagcaattgtgcatttgcatcaacgtgtatgtataaatccttcatagtcataggacttatgctcctgaaaaaaccataggcccgtcaccttagcttttggatatgagtcccagtttttctgctttactaatgacatgactctgagcaagtcattcaaaatgtcacagtctccatttccttattgtgaaggcctcttatacttctaaaaagcattcttttctaacttatactccttgtggcacatgtagtgtctctgtattcttttacttaaatttcagtttcttgcttcacatccaggcctgttccacttttctgcaaaatgagcaaacctgcctaaaattaaaataaaataagctttaaaaaaaatcacaacttcaactcctaaatgactcatctgtcagaaggcagtgagtcccccttttcgcatggtggttcagaagctaatggctgagttctaagggcatggcatttggtgcctaacagacctcgattccagttctgattctgacaagttaccagctgtgtgatcttggacacattacttaacttcactaagatcagttgtctcatctgtacctccccaggctgtggtgaggtttaaatgacatcagacatgtacaatatttcacagagggcctggctcacattgagggagcaattagcattagttattattgtcttggcaaacatggcctctaaattagtttcctgggactgaaggtggcatatactcatgacatttattaagcttcgagagtcccatatactaattctctaatttcattattcctccaacaacaagtctacatttagatggcaatgtactgtgtaagatccatattcacaaacattgcattttttcctctgaccttcagtctatttctcttgtgatatgccacatagcattatcccgagccccaatttttagatacaaaaggatgataaaagtgaaataaagtggaacactgaccattagataccaacaaacttaagcaaatattcccaaacatttagccaactaattattgggttttttccatggtaggagtatggtaaaggagagttgtttttacttaataacgattttattcatgtgcattaatcaaacatacattatgccaatgagaaattaatatgcaggccaggcaagatatatgatctcttctatgcagagacaaatgagtactacactgaggggctgatatcaattcaagtaggtagtgcttggcaactgaccactgctaagaaagactttgattcattcctaagtacaattattcctacctagcctatgtactgttactgtgtgcccagtagagataggaatgccatagtggtatcaaacaactcctgacctaaaggaatgtttctccagctggggaagaaaagacaagagaacaccaccagaccatacataatgacagtcctacattgttcaggactagctgtgaatgccctaaggcagtgactttctaaaatgtaggcaccgtgggctcttaagaaatcctttcaggggagtacaatgtgcaaaacagacacagaggaggtgagttgattaaagaggaagtggaggacccctcccctgtggctccctccggctactgagatcacagattttcaaactgcctggatttgaaaactggctaagatttgaatggacagagaggagggaggaaggtgttctgcgttaggaggaccagtaagcccaaaggtaaaagggtgggaattcaaataagaagtgataggcccttcttgggacacctagtgaggatgcactggtaagtagtgaaaggaacccacctggttgcttttggtgttcaacctaaattaatttttgaatattttaagcctggtgaaatagtgaacaaatgctctaaatcagggcagatgcgaagcttaaggttattggccaagtaacgagtctcgtcattattctttatttcagagtcatttcaagttgtcgtgagaggaaacggcttccgacatgcccgcaacgtggacagggtcctctgcagcttcaagatcaatgactcggtcacactcagtaagtccttgcagagtccatgggtttcttcgacaagtggcttcaaggaagggaattcccacccttgtcttccagcaaggccacacacatgaaaccagcagaaaagagtcttatttgctggaaagacccccagcaagggcatagtgagcccttacagtggttccagtcagaaaaggcaccacttgggtgggcacagccccatgggtgtccagcttggtaagcagagcaaggctggacttgagtccccgtcctccacaaaacacagagccacaagccccagccctgcagcagccctccggaagcagcggggcactggtttccttgtcccctgccatctaccgagtggctcactctcaggtgggagtgctggtgatggttaattaggactgcagaaacatgagcctccttaacaaagtattgggactcttaagggtaagtgtgaaaaaggaatggtctaaatgcattaatcttgaataaaccgaaaaccaaaccattaggcttgcacatgtagattctgcagcttttttcaatctggatgattcttgcgtggagtagccaagaaactctcatcgtggtgaatatcttacatgaaatacaggaatatggagtaaaactaagtgcatttcatgagaaaaaatgaattatcataacattggcttcttcacaagacatttgtagcagtcaagttcctaatttaaagatgtacgtgattcatgtggttgaccaggagagatggggaagatgattatatgagggacagatgccagaagcactggttatgatttgcatctggcatccgtcacacagataattatttattccacatctgcagtgataactgtcataatatactgcattttctgtaatgctatgtaccttctaaatgcttcacatctttttgctacaacagccctgagaggtaaagagagcaaggaggacaggaggacacacatttgttgactaatcactcacactagttttctcctcctgatagcctattttttttttttttttggagactgagttttgcttctgttgtccaggctggagtacaatggcacgatctcagctcactgcaacctccgcctcccaagttgaagcgattctcctgcctcagcctcctgagtagctaggattacaggtgtgcatcactacacccagctaattttttgtatttttagtagagatgggtttcatcatgttggccaggctggtctcgaactcctgacctcacatgatccacccgcctcggcttcccaaagtgctgggattacaggtgtgagccaccacacccagctcctcatagccttttgaaggaggttatcttgtttttaaagaagaagaattgaagggctatggatatttccttcttgacatcataaaacccactttagtagttaaacagacacatgctgtgtcttcctcacaaacatctggaattcctggccttggagtaattccaaacattagaaacattcggttagttttcttaatatttggaaatgctctcacagatccaaaaagtacgtgctatttgaaaacattctgaaatatccctgagtagtcacagtgtgaaagttggacgtgtgcccccagcagagttctttcttttttctccctgtcaattgtgatgtcacttaagtcccccttttctctttaaccaaaatcccaagtctaacatcagaaactcctgaaggtttaactcaaagacatcaataccttccaaagaagacttcccaaacaagcaggctttcaggcccaagctctctgaagatacatggaagtgggctggggagagagagaatctaccctatgtgccgttgctcaaaggttacacaagatgctgtattaaataagatgtggccaggcacggtggctcacgcctgtaatcccagcactttgggaggctgaggtgggtgtatggcctgagctcaggagttcgagaccagcctgggcaacatggtgaaaccttgtctctaccaaaaatacaaaaaattaactgggcgtggtggtgcacacctgtggtccccagctactctggagcctgaggctgaaggatcacttgaggccaggaggcagaggttgcagtgaactgagatcatgccactgcactccagcctgggtgacagagtgagaccccatccaaataataataggaagaagatgaaatgcaaactcactatggatttgtcaagtgagtactcgaaggcctattttccaacttctttgggaaattttatttctttcttgggaaaccagtccatccctctctctcctttcttcctttcctaatatatagttgcaaacatatgcacaggcttgtcacctcattcatattcaaaaagaaatggaggttgttggggtagggatttggcttaaatcacaaacccgtgcctttagcacaatactaagtttggagaagatgaaggcagtgatttgatcatattctatgctgcaagcaacaccccaaaactcaagcatacagctattaaaaatattctaaggggaaaaatagcgtttgaggaaaacacttggcctttagttagtaattcacctgttcatttccatggagaaaataatatgaacaagaacctgtggaggtagaaaagatgaacaaattctaaaatgcagcacgtttagatctacatttttctgtcaactttataaatgtcatagtttctactgattcctccctgtaaaataaaatacacttagattcctttacctttcccattttccttccccacctctataccccaagttttaaaatgttatctgtttttatttttatatcacatatttcttttttcaagattttttttcctaagtgctgcattggaatttgtgacaaaaagagaacataagtgccattattaatgagaaagacttaattgaaggcccaataatgaagctaaggctgtgtggctctagccacttcaaacatgaggcagacctcaggatcttcagcaaataatgcaatagcaagctatatgaagcaaaatctgtcaaaagaacaaattaaaaatgatatggatagtgggagatattaatatgatttttcaagtcttaaaacttaatttaaaagttagagatatagagcatatatctttatgctctaaagatataggtagggcatataatacttttttaaatgactgtgaacaactttgcaaattgatcatgctaagacatggataaaatgccaatatattaatgccaaaagtagaaattgtttagacacattcttagatgataagcataaccagaagataggttaatacatgcttctctcccaatttccttgcatttgcttaaaaaatcaaccacttagaaatccaagacagtttctagatttgtggtcaacaaaatagatccaaaaatctggatgaaatatgatttttaaaattacattgtgtggcctcactcaaaggaaagaagtgggaatctccaagtataggaaacaaaatgggaataaaaacctaagtaagaaacaaagtcacaggggctccaggccaggctgcgggctgtgaccccgatgctgatgcagatacaggacaccagatctcaggtctgtgccaaggcatcacacaaaaacagagccccctgcagaaatcaggctccagcaggatacaccaatcatttaattgggcaaggaagcaggcaggggatgaaaatccacaggtgtaatgatgttacaccacccatgtgatacagaagcaccaagtcaagaaactagccccaaaatgtgtccgtgatcttcctgatctctgtggccctacagaggccatgcaccttcaccctgtgggagtcttccacatagcccagccccacagcatgcctgcagcaaacaaccccctaaaggtgggctgatggcacaaaatgacaaaccatgtcaagatgaatgaaacaaacagaacaaacaagaagagaggatcagagagccaatctgaaagagaatggaaaataaatgtgtttaaaatgtgtgaagacatgaaacagatcataggggaaagaatactcatcaaaagcagatttgcagaagaactgagtataaattctagatttgaaaaagtttattcactgaaataaaacttcatggatggattaaacagtgtgattagacacagatgaacaggaaatatatgaacgagaagggaatttgaggaaatttcatcccccccccgaacgaaagcaccacatccagatttttttcacccaagttttatcaagttttaagggacaaatgacccatatcagatatgtactgttccagaggaaagatataaagaaaacgttttgttttgtgtggttttttttgagacagggtctggctctgtcacccagactggagtgcagtggcacaatctctgctcactgtaacctctgcctcccaggctcaagcgatcctcccaccttagcttcctgagtagctaggaccacagatgtgagccaccacacctggctaatttttgtattttttgtagagacaaggtttcaccatgttgcccaggctggtctcgaactcctgggctcaagctatctacccacctcagcctcccaaaatgctggaattacaggtgtgggccgccacacccagccaagaaaaagcatataaattcattctatgataataacataatcttggtttaaaaaaaaaaactggacaaaggcactaaaagtagacaatatttgagatcaagctcgctgatgacaaacatctaaatcaaatattggcaaacaaaatccagcaatgtatttaaaaaggaccaagatagctaagacaactttgaagacagagggggaatttgttcctcatatagcaaaagttactgatgccaagaagatattaaaattcattatctgttcctaattttaaaaatatatttctagtaaactaggaataggataagacttctttaacataaaaatgtatctacatatctgaattcaaaactcaacatcattctaataataaatcactatgtagaggaattcactttaaagttcagaagaaaaaaagcaggacaatccatttcaccactattatctaatattgatctgaaagttctagcagcactgtccaatagaactttctgtaatgatggaagtgttctaagatggtagccacaagccacatgtggctgctgggcatttgaaatgtggctagtgcaattgaggaactgaattagtaatttcatttaatttttattaacttaaatgtaaatagccacaatggctagtgactaccatattagacaatgccatgaacattataataacaccagaaatctgataatagatataaatacaggaaaagcagccaaacgtcattgctctaaaataatgcttgtgtcttcctggaaaactagagagtgaacagaactactaggctaccgagagggtaattaagttggatgacttcaaaataaataccttgcttataacaatcagtagctttgccagtgttcagcaacgaccattagaaaatatcacaagaaaaatatagcaacaacaaataaattcttttatttaactttcattttaagttcagcgggacaagtgcaggtttcttacataagtaaacttgtgtcatggggatttgttgtacaggttgtttcatcacccaggtattaagcctagtacccattagttatttttcctgatcttctctctcctctcaccctccaccctctagtaggccccagtgtgtgttattcccttctgtgtccatgtgttctcatcatttagctcccacttacaagtgagagcatgcagtatttggttttctcttcctgcattagtttgctaaggataatggcccctagctccaaccatgttcctgcaaaggacatgatctcgttcttttctatagctgcacagtattccacggtgtatatatacattttctttatccagtctatcactgacgggcagacaaataaaatgtaacaagaactaatttaatcaaatttgtaaagacatatatgatgaaagtcacaaaactttctgagggatataaagcaagtgtgaagagttagaaagccatagacttatggcatagttacaagctctggagccagaccaccagggaaaaagagttctggctctgtcgtatctagctgtgcgactgtgacgtcttatttaacatctccatgcctcagtttctctctctgtaaaatgagtatggcaataatagccatactatgtcttgggttgttatgaggtttaaatgtggcaggcagggcttaaaatggggcccgatgcacagttaagagtcagtcagtgttggctgctggtactaccatatcatcgtcactgttattaaatggagcagtaactgagtattgtaaagatatcaattgtcttcatcttaatatctacttttattacaatccaaatgaaaattccaaggggactttttaagttaacaaaataatctgaagtttatgtggaagaataaacacacaagaatagccaagaaaaatgtggaaactcgccctggccgattttaagatttataaaaacgctgcagtaattggaacaatgtatgatcacaccacagtaggcgaactgagctttggaacaaagcccataaacagaaccaaacacttaggtgaatttagtataaaataaggcagcctttcaaatctgtagggaaagagtgggttattcaaaaaatgatgttgagacaactggccaaccacttggaaaaacagttaagttcatttttaatctcacacctttcatccaaacaaattccagatgaaggaaaacttttaatgggacatgaagctgtaaaaattctagagggaaacaaaaaaatgtatataatcttccaggtgggaaggatgtgttaaacatgaaggagcataccatgaaagaaaaatttgaatgtttgagtgcatatttttaaattctcttgttaaaccctactacaataaaacaaacaagaaataaaactggaaaaataggatatataacaaacatagggtcaataaacttagtataaagacaattcctaaaatcggttaaaaaaaggtgaatatatcagtgagtaaaagatatgcaaaggaaatttttaagaaaataatgattaataagcatatagaaaatgtttcatataaccaagaaaatgcaaattgaaataatcaattgccatttttactttgtcagactgacaaagattaacaaaactacaacacgcagtcttggaaaacctgtaggaaaacaggtgttttcattcatcatcagtgagagaccattaaatcgttaggaaggaaattttttaaatgagtcaactgcttttatacattttgacccagaatttcaatttcagcttcatcaaaagaaggtgactgggaatgtttacaaagacttggccacaaggatattcatcacagtattgtttataatagcaaaagaaaaaatggaaagaacaaagggaatgagggagagagggaaaagaaaaacatctaaatggtaacaacctaaatgtctgacaataggtaatctgttagataagttatacttcacccctaaataattaaacaatgttgtagaagaataattactgatgtggggagtggggaatgttaataatatggcaaaaataaataaataaataagttacaaaacaggccgggcgcggtggctcacgcctgtaatcccagcactttgggaggcggaggcgggcggatcacaaggtctccggagatggagaccatcctggctaacacggtgaaaccccgtctccactaaaaatagaaaaaaattcagccaggcatggtggtgcgcacctgtagtcccagctactcgggaggctgaggcaggagaatggcgtgaacctgagaggcagagcttgcagtgagccaagattgggccactgcattccagcccgggcgacagagcaagactccgtctcaaaaaaaaagttacaaaacaatacactgacactatttttgttttttaaacacacatatttatatgcagacagagactggaaagatactcatcaaaatgttaacagccatcacctctgaatgaaaccactattaatttttgctttcttctttccatctatctgtgttttctaagttctctgggatcatatgtccctgacgtaatcagaaaagaacccacaaaattgatttaaaacttaatttttaaattcttgctaactattgaggtctagaatacatcttaagtttaacatttggttagttcctcagtcaccaggctgaactctgctggccaagaaaatatcttggaaatcttcacacaaactgtatttactctggccgcactttttcctcctttagtattcagtgtactgtgccaagaaaagatccactttcaactggagatccactttcagagagattcaaatgctaaaaaggagacactggagtatgagctgagaagtgatccattttatgcactgtaaattaaaaatggatgttttactaatgcaataatgaaaaacatgctagactatcctagtgttgcatggagatgcatgaggtatgactataaacaaaagaaactgatttttaacaaactcactaaaattgagtttataggccatgtgagaaatcagattcattatattataggcacactttattttttgatgcaaaattttatttctcaacttgattttcaatcctattcaccaggcatggctctggtttacttttgcacactctcaaaggataaagctttgtcccatttgaacatatttccccaaactgaacatcggtcaggaaggcagttctaggagttctgaggagggggctcaacttcctagggggaagagagacaacactcattcgaacgtagacgttccagagggtgttgttttcaaaaacatgcccaattttccagaaactaaacttcatcttagaaaacacctgggctccagggctgctgtgggcaccctaaggagatcattaaagtgcagatggggagggaggatcgagggcaggagaacataaacttcccaaaaaaaagcctattgtttcctttgttatgggttagagtcttgccatatgttggtcaaaggcacttaacgcaatctcgatacatccctagggattttatatcatgtgaaggtgatgaaatgccattttgtgtaactcagaatgaagagacgtaaaggagcgtacagtctcatgttcttcatggggatgcccatcagaatcaccagggagcttccgccaagtgatagcagctactgattgttgagtacctactctgcaccaggtgctgggccaagcaccctcctgtattatctcatttcatcatcaccgcagcccaaagagggaggagttatttgaatccccattttgctgatgaactcagagagatgaagtgcccaagttcgcgcagttggcaggggtggaaaggacttgaacctgggcagtcggactccaaaggctttagactgcttccctacattgcctccaagacacagatccccaaagatccctgggaccactgactccaaatgcccaggtgacagatgtgtgcctgattcagagatgctgatttcaatagatccccctcattttgcagaaagataatcgcagatcagagagatgtaactccttgccaaaggtcacaggacacattagtagagaagtcaagacttgaacctaagatcaagagaaaaagcccccgaccagggtaggaagaaccccaggcattagggtgtcagtgtctgcagctggctgtgtgaccacagttaaggcacctctcctcattccccgagtggccctttttcttgaacttcaggagcattttgtgtatctggtggtgtttcccctttggccctctttcagacagaactctggtctttgcccactgatttttgaagtggctcctgcagagactgtgttagtggatgttcccatctttcagttctagaaaaatacagatacgttgaaatttactgccataatctagaatggttgggggacaaaagggaagtcgccaccagaggtaactaggtggcaaggttttcagttgggagtaaaagagtttattctgggggtgagttgacacagtccaaagttagctgcaccagtccctggtggacagtcatccttgatgtttcccctgctctaccaagtttgaaattgactccacgtgaaaatcgtgagctccacgaggactccaggcatgtgctgcatttgttttatgcatgtctgggagagatttgcttgtgaacttctctgaaacccaccttccccctagtcctgctgtcctgcgggggtaagttggcatccccctctatttctgcaccccatggctcagttttcatgtaaggtgaccagcaggtggatgctgcccttccccatgcaatactgctcctctgccatttcagtaggatgatggaagagaaggtgattaactcagagacaggccatactcctggaaccccaggcaggctaatagtctgtgtcccttcaaactgacattctttaaatatttgttcaacatccattgagagaagttgggtactgctgagggaaaggaagaaagtgctcctggtggctctgtcccccatgccattcagctctggcagccagcaagcatcccacagcactttagtggcccaagtgtgtgcccaagttctccttcccacctctcctctgagtttctctgtaaatttgtgtcctttaagagcagtcagcatttgccataacccgtggccatgagtgtgtggaaggctttagccattttggtagacttgccactcagttccaattccaaaggtaaaattattccaaatttgtatactgccacaagggttcgtgtgtcaggagacacataccttgtgcatgaatcctgaattatcctctaccaagtgaaaacaaagctttgcaaatatttgtattcttagcaagttatagctgttttaagtgctgcagttattctgacctcaggattacaaaatcttaaaaagctgatgctttacttagaagataatttgtaagttctataaatgtcaacagtcaagaattgttttgggtgtggatttattgagaggagaaaatactttgcaagaacgctgaaccccattagcttcatttcatttccttgtactgcctaaaactaccctattaacttcagataaatgccaaatgccacagaattatatgtaatctcaattatgttaaaagtaatatgcatggaaaaattctgaaatagtatttcccaagacattaattttaccactggaagttgagattatcaaggattttaatttcttttttatatacttctctgtattccccaggcttttatactaatatgtattactttgtgattaatacaaataacaacacatatgggtagataataatttacatcctgagaaggcagaccagctgtgctgacaaacagttctcaatgctggtgtgcccagagctgtgaggtcacaaccttgtgcagaacttggggtgtgtagcccaacagacaatccagatatctgcagggctgctagaccctgggcctgcactcctctgggaatggactcatggtccctcaccttttacttcctctccatctggggctataatgtaatcttgatcctcatgaacacagtaacaataataacccacttcatttccttccaagactgcccacagctctgagtcctgtattggtatttgtatgtaaggtgttctgactctacagcacccccatccatgtcatgtcagagccttggcggcaatataaggcccattgctggagtgccccatttacattataaagctccaccaggcagagtggctcagatgcaattccatctacccctaagaaaacctggacccattcaagcctgcaaggagggctttatcaagagacattctcttactccaaccaggactggtctttcaatgcctctctagctgttacctcctcccttttctacccatcacctctaaacttttctgggcattacaccagtaccctgcaggcatgaactacagagttatatctgtaggcccctctacattgggctaaagaagcatataaagccatggtagacattacgccaggttttctaacctcaacactactgacattttgggctggataatttatagctggggagtggggaggggcctgtcctgtgcattggaggatgttcagcaccatccctggtctctacccactagatgccaatagcattcctcccccagttgcagtaaccaaaactgctcaggcattgctagttgccccttgaggggcaaaatcaacccccatttgagaacactgcactatattcatgtccaaagatcctatttagataagtaacttgcttcttatcacaccaatattgtaaagccctgatacaacctaacagacaggttgcaagactcactcagtttgtgcacacatccacaacttgtgttttgcaggtgcctcagtcgatgaccccaacagtgccccatcttagtaatgacagttatatgttgagtgcttattaagtgctaagcattaaatgatatcttctcaataaaatttacaaaagcctatgaagtattactcccatattatagatgacaattttgagttatgaatagagtgaaaaaccttgcccatggtgacatagccagttagtggcaaggctgtgttgggtctccagagtccaggctcttagtgttctccattctactccagccttcctcagagaacagaatgggaaatcaaaagacatgtcctgggtatctatagaatataggaactggtaaaatagctacagacccaggaaacttacctggaatgtgttggccaagcccatcccctgatctcatggcaactagccagggagggcttccaaggaaaccctgtaacaataccaggtcagggaaaaggtgagttgtgagcgagggtatgggccatgtctaaggaaaaggatggtggccagcttggttctgccactttaaaggcatccctctggctttagcccaagataagaggacattacagtgggtatactcattctgaggatgtttcccaacttggcccaaccaacctacatttcactgccatccattcccattcggctttgaatcttctcatttctccttgacttctcaaccactgttcagcctgtccaagtaaaagccattctctccactttcaaaatctctttttctagagtttaatgtcttctatcaaaagcttgttatctcactcatctctgaaaaccttctagcccagggcctgacacatagtacattcctttctactctcagcaatggctcccattttgctttgtaataagacccccctaacacacatttgtgaattatcaatgaggcagccccagttgggcaatcagtcatctccattctctttggagctccagaaagctcagcccggattctttgaatttcaccaacttggagtcctgctgaatataattttattacagatttttccacagtattttacaagtctaacttttttcaggctggttacttttggaggcagtgaggaggtagaaatattcagcctaactccggcctgtctgttgttccatcatttggagacacattcccaaaccagctgataatttggtgctgaacagttatatttggctctggaatgccctgaaaatgctccctagacccaagggacactaggagaaacagcaaggcgagctcatttcagtccctaacctccactgtttttcccactacctaatgtgaatgtcactatgggaatgtaagctctgcttcgggcttacatcagctttggagggttctaacacaccctcccgctgcctccataagactagggattatttttctcttcctatttgccagaaataaatatttataacaagaaaagattgccaagacttgaaaagtatttggattatttaatccacccttataaaaaggattttctctgattggtgtttgaattggctaatgaatttcaaccctggttttatcccagatccatgagccaccaaactgcagggaagaattctgggaactttcttctttgccagtctgaaaaggattacattgtcccaaggtctaaacctgtaaatatacacttatgagtgtatggttccagagcatggcttcattctagttggcatgaccagggcctctcaaaagacacctgaaccttttcttcaagctcttcatccctagacccctctcctggaaggcaagctcctgttggtatccagccttgcccattgaagatcttggccatgtgcctccagagctgtcaatatgaagagcctcagctcctggtgtgcttccagctacattataagactagctgggcttacactgggcaagctatttcaacaaaacttgggtttgaattccggctctgacactcacaagtggtgcagcactaactcaattaactaacccttctgactctcagtttctcaaaatgtaaataatctctctctcagagggttgtagaagcatcaaatgagatcgtgggtatatgatgttagaaaaaatcaacatgcatgcacctgtgtgtatagatatgcatatgtgtatatgtgtgtgtatctatacacacacacaaattcactaaagcttttcatttccctattaattcctgatgtctacaaagatgttaatttggtaaagtgatatcattaagcaatcaggcattttgaacattttaatgtttaatccctctgattttaaaccatacatccatgtagtctattttaaaggtgtggaggcccatgtaataaagaagaataacatctactgaatgctcaagtgctaagtatcatgctttgtacttgaatgcgatattattgactccccacacaatgtcatcaccactgtttatagatggagaatgtgtgtccctagtcacacactagtaagaaaagggctcagatttgagtcggtgtgatctgaaatatcctctgcccctctctgtcccctcggtatgcagcttgagggatgcctagctcccaagtctggggcgtttagcactctgagataatgatactcattggcccccaaatcctgataaatccccaaatccttatcaagcttgtcagactcctatagacagatgccttgggtaaacctatgtcataggtacacacagaattctaaaatatctttggtaatggacaaaagaaatttatatttcaagatcatctaagaattacatttggctaggcccagtggctcacacctgtaatcccagcattttgggaggctgaagcaggcagatagtttgagcccaggagttccagagctgcctgggcaacataggggaccttgtctctacaaaaaaaaaaaaaaaatttaattagccaggtgtggcactgcactcctgtgatgcagtgactagggtggggtgggtgagggggacaaggtagggggatcacttaaagcacagaagattgaggctgcagtgagccgtgattgcaccactgcacggcagcctgggcagcagagggagaccctgtctcaaaagaaaataacaaaaatttaaacataaaaataaaattttcattgaatgtctgatttcaaactcccacccctccctaattttctccccagttgcaaacaaaagccaagtgggccagtccgagctcctggccttcattttccctgcccacccggtgctagtgagcagcgaaatggccacctagagggtggaccagcaggggcctcggctgtcctaggagtggatcgcggccccacatatgtcacgacaccactggctttggcacacgctgcagcgaggctggcacggccctggggccaaacgtggcacggccgaggtgcagcaaggaaggctttgtgccctgcctcccaaatggagttccaggaaggagtcagatgacctgagttatggaaaccaaatggccctcctttgtttagagagagagagaaaaaagtcactcatttttgtggtaaaatgaaaacaggctccaaaccaaacaatcctctcggagcagaaaatgccagctccacagagcaggcccacagcctgggaggctgatacactcggatggaggaaggtcttccacagcctcagcgaagcctttgcaggcctcccagtgagattttcctctgttttgctccagaaatatttggtctcccaagcagaaaaggaaaaggaaaggagggggaaagtgagaaatgtctgcctggcctgggccacactcatcctctcactcctttccagttgggatggaggaaggagagaggagttgtccagaggcagccggaagtgaggccaggcgctaacccaggagcagggcatgccagcctggagtctccctggctgtggcgctgcagtgcgctgcctcggatgctctcctcggcgtgacccagctctccccacagaaggcagccagagtcacatggcctcctgtggctgctctgtggctgccccgtggctctgtgggctggctatgtggacaggaatctgtactcccaggtactgctggtgcatgtgcaacaggataagccatggccacgaggaaataaatataggttcgagtcagccacgcctgtccccagttcagtttattctctaatacaagcctttcctggaatggagaatctcttagtgagaaaagagtaatgcagagttcatttctagtcttggctttgcctctggcttgcggtgcaaccttagctcactgtcatcccgctcagcctccattttgcatctgaaatatgagcctaatgatccctgccctgccttaactcacgaggttgtcattacaaggaaacgaagcacagcttctatcaaggctggtgcttatagcctattagataatcatgcagactctgcagccaggctgcctgggtgcagatccaagctcccgtgtgtaaccttggacaagctacttaatctctctatgtctgttcctcacctttaaaatgaaaggaataatacaccatcctgatagctctgctagaagtttaaatttgactaagtgacatacaggaagtgcttagagattgcctgcatgcaacatgcgctggcaagtctggctgtcattgtagatgctccttgacttaagatggggttatgtcctgataaatccatcgtaagttgaaaataccataactcaaaaatgcatttaatacacctaacttcccaaacatcatcgcttagcctcgcctaccttaaacatgttcgaaacactgacattaccctatggttgggcaaaatcatctaacgcaaagcctattttataataaaatgtcgaatagctcatgtaatttatttaatattatactgaaagtgaaaaacagaatagttgtatgggtactcaccattaatatacacaactgaaagcacctttataaagtcacagtattgtttaagtcgaaccattgttaagttgaggactgcctgtattatcatcaccgatggaaggacatcttgaaaataataatgcttgggccgggtgcggtggctcacgcctgtaatcccagcactttgggaggccgaggcaggcggagcacaaggtcaggagtttgagaccagcctggccaatatggtgaaaccccatctgtactaaaaaaatatatagaaattaggtgggcctggtggcaggtgcctataatcccagctacttgggaggctaaggcaggacaatcacttgaacccgggaggcagaggttgcagtgagccaagattgtgccactgcactccagcctgggtgacagagtgagactctcagaaaaaaaagataataataataataataatgctcaatttaggtactacatgatcctacactgtcatcataagctttataattttactcaatacagcgtcaccattcctgcaacattccatcatctgccaacagctgattccaaatatgaggataacctccagtagttccctgttgcgcttagaaaaaatttcaaaagcttcatcatggcctatgtggccgtggtcatctggccctgctgccttttctagcctcatttggagccattgtctgtctcacttagattcaacagcctcactggccctcttttagctctcaaaagatctggggtccttcttgccccgggatctttgcagtgcctccccctctcccactccatcccatcacccaacctcaggtttcagcttaaatagcctttccttggggaagcatttcctgacctcccagatgagggccagccccctcctccttttgtgtgctcatcacaattataattacataacaatttgtgtaattactagcatgttggctccttggacaaggtactttatctgtttcgttcattgcaagccttagcacattgcttggcacatggtacacactcaaagaatttattttttaattatgttaaataactgtctctcctgcctcctataaaatccatgaaagcagagactgtgtttctcttctcaaagcctgcatctctagtatatagtaggtcttcaataaatatttgttgaatgaatgaataaacaaatgacctggaataacctccctaacttttcaccacttgaagattttcctgtacatcttcttcctcctcttgccaatggggacgttgtgcttagcactcagatgtgtcctctatctcccatcccaggcagcttcctaaccttcactcaggcaagagtttaatgtcagctatattctgcagtcatgacttgcagatatcataagcgacatcagtgtcacaacaaaagcagaatattatcctttaataatatatgtattcctttgtatcttctagttataggaacttgtagtcacagcctgattaatgacatagatcttattcatcttcatttcacctgtaggccctaccacagcctttttgtacagcacatgtacccaatcaaagctgaggcttgaagggatgactattatatacttagtataataacttctcaaccctgtctctggccccagaaactgggatacaatgaagttcttagtgagcttgaattgaagccactttaagctttttcctggtcatccattagaagaagcacaagaacttccctactccaagagtccccgactctgattcaccttctacagctacatctgctatgacctccaaaatcatcacttcagttttactcaaaaacccaccaaagttctttctataacttacagaactttgtgcaaatccctcaggctaactcaaagaacttgaccaaactttctatactgatcttttcaaattcttcttatatcctaccttggaacatgcctttagtatgccctgtctttgctcatgccattcctccaaccaagaatgtctcttccccatctctgcacaaaagcatagctcatgttttgtgctttccgaagacctgactatgacagccatgtacaggaagcttcctgtcttatgaagcccaatgatactttggtgaagtcatttgtcagcaaactttttccacaaatatggcttatctctccaactacccttagacgtggaactccttaggaccagtctaatattttcttgtttcccctcagtgattcctgctctatctaggagttcactcactattttctcaccagttgactcaactgcacataccacaggaagctatgattcaggcaggagcacttgagttcactgctaatgggttttacagctcaagagttttgtttttgtttttgtttttttattattattatacgttaagttctagggtacatgtgcacaacgtgcaggtttgttacatatgtatacatgtgccatattggtgtgctgcacccattaactcgtcatttacattaggtatatctcctaatgctatccctcccccctcctcccaccccacaacagtccccggtgtgtgatgttccccttcctgtgtccaggtgttctcattgttcagttcccacctgtgagtgagaacatgcggtgtttggttttctgtccttgcgatagtttgctgtacagcttaagtttttaagctcaaaaagatttttgtttttttggtatctccctggacttggttgatgttctctagaagtcattgaatttgaaattataaactcacctccctcttcttaatccagtgatttcctttttgcagatgagaagcccttttctgtggaagatacttatttactgtgtccagcgcctatcttaaaagaagttggcatgtaagttttcaccagcaactgaacctcccagccagggaagagagagaggaggtgtacggggacaggggaaaagaaagcatctagagaaagtggagcctttctctaggttcctccagcttatgacggagccagtgtttacagtgacccagacgccaggataagtgttttacaaagtatctcacttcattctcccaggttccccattaactaggtattcccactatcccagttttacagacatagagactgtggctgcaagactttaaatagcttgcctaaggtcacacagcagtgagtggaagagctgggctcaatccaaggtctgtctggcttaatcacacctacacttctagaaagttctcacacacttgacctcgctctgtcatcaccattgccccgctagataattgttatctcctccttagagaaagggaggctcagaaaggccaagtagggccatggctggttcatggcgagccaagaccccagactcacgccttctgatgtcccacacggtgctccttccttgactctgcgcagcatcggatgttcacccagaccggaaaaaattccctgaactaatttataggggaaaatctcatggtgatgcaattataataagcactagtgagatgagatcaaaaccatcaacagaagaaagagaatgggcaccctgagcaagaaaagaaatacatgggaaatgaggcaatgctggtgcagagaacaataacaacaaaaataacctctccaaaaccgtgtctataataggctagacaaagaatggaggctttaagggaaaaaagttgaacttgttcatctgaattttgccttcaatcgtgtgttcatattgtgaaacctccaactctggttgcccagcatcaatctgtgatgccactgatttcacaaattagctcagtgtccatgctgcgaaatgcaacaaaacaagaggtcagtttccagcgagtgtcttagagtgggaagagatggaagacaaatgcatcttctgctttacttctgtgagtctgttgaatggtaacaaagccacccccatcaaatcactgagagtccagataacagcagaatattgcatttatagttagcccagtctacccccattgacttggactatttttgaagaatactttgtccaactacaatgtgacaagcaagttaaatgaaagtaagctttgcccattcaatgccactcactgcaatgccggaacgtctgaatgcactgccttaatataccagccaagcatatcctgacacttctctaaactttaaaggaggatgggctatacagactacccccgacattttacaaaagaggaaactcagacccctcctcccctggagaagagactccagtctcaagggtatttaagagcagagcccaaaggagtcctgtgtgtctggctctcagcctgttgctcattgcacgccctgctgagagtctgcttcccttgttgtcattgcaggaaagctgcactccaggtcagcatgaacgatggcctctcttttatctccagttctgtcatcatcaccaccacacactgtgtaagtcataacctttccctttactaaagatctcattatcattgtcactatcaacgtttcttaagcagtaatcttctccaaaggtaccctggaaagttttttggttcttcgttctgcttgctgagctttgatcccagcactgctccaccagccccaggctggattggggtgtgctgtaccccagagtgtatcaggcatgtctgtgttaagttctccagcttccccatttctgctgaaggggagatctaaagtcactggcctgaccagacggtaagatgggctatgtctgtgcagtaatgagggtggagtcccagatagagtgggtttaggagagaatggacggaagggaattggacagcatatacagaaagaacgtcttagggagttcatctctaaagggatgcaggaaaatgggtatgagctgaaggaaaatgtggagtttggggaggtcattttatttaggatgggagaatttgcaacttgcttattattgtggaaataatccaggagaaaatggaaaactgatgaagcaggagagagagtggggaaggagcccttacaatagggattgtgaggcaagagcggggactgcattctctctcccagctcctcagatagcccttctctggagccttcgcatcaagtagttttcattcctggctatatataaaatcacctggagagctttttaaaaagattggtgccctgaccgcattcgagactgactgaacctaagcctctggcatgagccctagctttggtggttccacggcatccccaggaggttgtcatgtgcagctgtgactgagaacccgtcagcctctggagttggtcctgcccactgtcaatgtctcagagctcagcctgtcagggggcagtcagggcttagttagcttgtgtcaagacctcaaccttgtctgggcacagtggcacaggcctgtaatcccagcactttgggaggctgaggtgcatggatcacttgagcccaggagttcaagaccagcctgggcaacatggtgaaaccctatctctacaaaaaaaacaaaaattagctgggcatgatgtcgcacacctgtagtcctagctactcaggaggctgagatgggaggatggcttgagcccgagaggtggaggttgcagtgagctgagattgcaccactgcactccggcctgggtgacagtaagaccctgtctcaaaaaaaaaaattaaaaaaagacatcagcccctaacatgagcatttccaaaataacctttgtcggcgtattcagtttctttaactgaatacatttctccattagctcattctagaaactaatgtttggcctgatggtcagcttaggaagttattatactatagtcacttcctcgttggcctttggaagctgtgttgttagaacctctcagtaactggagttgtgtccttaataccatcacagttggataagaaagagcaggcatgcactgaatgtagataatatagaaatgggttatcataaaagaacaggaagccagtcctcatgatggacaacagtctccctcctaatgcccccaacaccaattttcatcttgtgttaggagcaaaccaattttcttgaaagcagggtaacccattgtaaaggtacagatgatgggaaagttttacttgaccaaagcaagaaactaggattgtgtcagagaagtgttaccactgagaaatgtccatgtctcagacatctggtcaaccctcagtctgtaggcctcagtaggacaccaccaaattttaaaaactgtatgcagaagtgttgaaatttcttcaagtgtatcctgcctgatcctgttgaaaattgacccttctgggacctgccaacctgcaggaaatgattaaaatactctaaatcaaataactccatttcagattcctgccagcttttgagtgatccaacagttggatctgtatttctcattatgtctgaccataccaccaagaaacagccactgcccttgagaccacagagcagaggaagtgggaagggaagacatctcaggactaaacttgtggtatggcaaatacagggctacaactttaaatcatgggcctctaattaagaagaaaaggtgtccttgccaatgcattgcaaaattagaagaattcccattgagtcccactacaccttcccaacccacggcagcctccagttacatcttacatctccctcatctgagcacatgccactaaatcttctcttcacttgacccttgatcaagaccacctcataatatattctgcattattccattttcatgtgagaatgctgtattcgtttacaacaaaattataaccactctaagatttgtgatccaagttctttcaatcatgtattcaacacatatttattgatcaccatgtgctaggtaccactctgggtgcctgggttatatcagagaatgcaacagataaaaatacctgtgtgatgggggaagggaagacaatgagttataaacatagtaaacaaactacatgctatggcaaaaggtaatagatgctataggataattagaggagagtgagaggatttcctactacctaagcgagtaggttccaattgtaaatagagtaatggatacattgaaaaggtggtatttgagtagcaacctggatagtgaggaagttaaccatgaggctatgggagtgtggggaagggtgggatatcccaaaccaagagccctcatgctaagaccctgtggccagcgatccttggtgttcacagaagagcaggcagggaggtgccatccccaggcatctccacgcctgctgctgtccttattccctctcaggatagcagcaggcagtgaggtgcctggggataggatgtgcagggttgtggaaggactttggcttttgagcagaggaaaacatggtctgacttatatttagaagattacttggctgaaggcagacagagacaaagatggaagcagtgtgacttgttaggagggttatggcaatatttcaggcaaaaggtgatgatgggttgaatcaggggagggcaatggaggtggagagaagttgtcagagttggatttattttgaaagcagagctaatgaattttccaaagcattgaatatagggtttagagagagagaagaatcaagaatgtcccaagggttttggcctaagaaactgaaaggatggagttgccatcagctgccagacaggaagaagacagagggagaagaagacttagggaggagggggaacaatcagggaatcagttttgctgtgtactggttatgtgaccttaataagttgtttagcccctagccaggtgccatggctcatgtctgttatcccaacactttaggagacataggcgggtggatcacttgagggccagtttaagaccagcctgcccaacatgacaaaactctgcctctactaaaatacaaaaattagcctggcatggtggcacatgcctgtagtcccagctactttggaggctgaggcaggagaatcagcctgaacatgggaggcggaggttgcagtgagctgagatcatgccactgcactccaacctgagtgacagagcgagactccatctctggaaaaaaaaaaaaaatttgtttagcccttttgtgctttaatttcccaatcgataaaactaagataataaaaaatttatatcagtattgtgaagattaaatgaaataatatttgtaaagtatttggcagaagacctagcaggtagtaagtgctcagtaattattagctgttttatagtggaagcttaatgaaaaaagttttaactaatttgagattcttcctagagagctggctctttaattcagagtctcattataaccaaggggctcctctgagacaacatgtatccgggggtacatgtttatcactagaccaagcccaggtgattgaaagggggaagaagagatggccaaattcatccagaaaaggggcctcatattcaaacataaaactccagtccccaaccaggtcctacacagcaactcaaattaaaggctgaaactatcattgggcaaaatagagatgcaggtggaacgtgtgggtatccaaaatatgaagtaaggtcttggactttcgtttgtttcttgggaagctggtttggaggacaaggtttttcaatcaaaagtgatcccctgggtctgagtaaacggatattgtcaatgccagtcacagcctgcccagttcatcacctggaaccaaaaatatttttaaaatatgtagttgagacttttcttttctcactttatttggtgcccatttggacacctgtgtcacaagttttcaaggtctgcaaatgaataactgttgcctgagccagaagcagaaattccatggagttttacaggaaagagatttttccgtccaagagctaaaacattcctatacaaatggtaaactttggtgagctccatgactatagaaaatggtcaaacatccagagtcctctctcaccagatatttaaatacacccatctctgtagtcttaactgcctcacttttcttcaccaaactccagccagaagttgagaaaattactaatatagtgctgctttcagtaaagtattgaaaagagatttgtccttttgaacaaagcaagcaaattttagaaacataaagaacttttcatgaagattgttttcttttaggtacttaaaaattctattatttcccacccaaagtgtccaaaaatcaagaaatcaatcaagtatgtcttgaactcctactgtgtctcctagtcactgtccttaaggagcctaaaatccagttggagaaagagtccaacaagcatataaaagagtgtataataggccgggcgtggtgtctcacgcctgtaatcccagcactttcagagattgaggcgggcagttcacaaggtcaagagatcgagaccatcctggccaacatggtgaaaccctgtctctactaaaaatacaaaaattagctggtgtggtggcgtgcacctgtaatcccagctactcaggaggctgaggcaggagaatcgcttgaacctgggaggcagaggttacagtgagccgagattgcaccactgcactccagcctggtaacagagcaagactccatctcaaaaaaaaaaaaagagtgtataaatgtataataaagaacaagattgtatgagtcaggtgtaaatgccataggatttcagagcagggaaggataagtgaaggcaagaagagtcaggagagcttcatggagagataacacctgagtgatttgaaacgtagtaattacaggtgaagaagtgggacgaggccatgccctaaagagacaccaacccgaaccagggatggatatatctctgagcatagtttgttcatgggctctcccagaccatgactttgttgttgtttttccttcttgttttgcatccatttctggggcctttcaatttggggacatttctcaagttggcaactatctttgtaggatgtacgctctacacccttgatcttgaacacccaagatgtggcagtgcggcccagttgatgctcatccctgttaaccctgatcaggatttgctttgtactggctgctgggttggaaagtcacaatctttgaagaaaagaaaatgacctaaagttagacacaaggttccaaattcaacattaaataaatgaagacccctgtttttttctcctgatttatatgaaaaacagcctgactgcagtagcaacaaggttcaataactttgagcggatccatgtcatatcactgtttagagaaatgccatttgaatgaaacctgaaattcaacaaactgagacctgaaacatcaaagcgaaaacaactgctctataactgcaggataatggaggaattaagaatacaggatattgagtcgaaaatctttatttcacatcccagccccttgactttccagggtgatcctggacaggtttacctggagtctgtttcagaacctgtctcgcatttttatagtaaagattaagtatataaggggcttgaggtacataatagtctgttcaaaaaatgacagctgtgtattaggttattgacctaactttccttgccaagtaaaagtctaatgccctgccccattagattcactgtacatgtcccgtggcttataaacaggctatctccccctgattaagaagcatgctccttttgagtctctacgataagactgtattttaggagcaggctggaaaaaatctttgaagatgttgcccacaagataactaggaagaaaaacaccagtaaatcagatgtggtgataagtcaaacaagactgggtggcaggctgactctttgctacttttgaagagttttcctcaataaatgaatcaagtaaatagtaacatagggaaatatttagacaaattaaacacatgaattaaagcaaataaagttgatacattattaccacatgcaaaatttctgttgccacaaaaaaaaatctatcatgcattcagaatcttgggattcttaaatgttcttttgttctattctatatgtactttctttggggcccctctttctgatataaagataggaatttgcctaaaaaaataattttagctcaagatgacaagcctagggaccttctcacttatatgttgccagacaaagactccaaaattttgtctccaaattcctcttttccatattccaagtcgtgccttcacttcctcctctcatgcaaaggcctggagagccacagacttgttcattatttcaggaagaaagaccctcttaacatccgggttattttcaacacttcatgactaccaatgtttcacaggaaggcgggcctccggctgccatatagaggtagtttatagctttggaaacaactagagagttgtcataaagcaaacgcagacattggaaagagcggttgtctctcaggcatagtatcgcccctatgtttcttgaggcaaaacagaccatcttgttcaccgtcacaacccagcacctggcacaatgtctgcacatactcattactcagcaaataatgatggttgagtgaataaatgaatgaacccaatcaagggtcatactggtaccatgatggcacctactggcaggaaagaaaaggagccagaaggaggtagaatcagaacagggggctctgagttggttgggaggtagacttcagaaaaggatggccagcaattctatcttcatatccaaggagcttgagcataatttaacaggggaaaaaatctgccaggtaagaaactataaccagcgttcccaggaagggcaatagtcaaagatatcatcataaaagcaccagctccagtaggagcagacccctgcctggggtgcagacttggtagaagggtgtagaaatagcccactaactggatcaagattctgggcaggcctctagtctgtgaggatctgcagcacaaggttggaagccaagcagaaccatagagactgatagactcaagatcactccagaaaagctgtgacccagggaacattggcatggcctgagctcaccctggaataccagaaacatagattacagcagttcagctaatctggatgctgccagctggggctgaggatgcacagtctgctttagtgagtactggctcagaagaggatgtgctggagcccagagatagaggccacagtgactgcaggtaaaagacagcagaggagggcagtgaccatcccccgcacagtctttggaggaaatttccaggtgtctgttttctaagtcagttcatttccattaccagttgctttaaagcgatgagagaatacaaatccagcctggttttgtagtcattatgactctttaggtaaacagacagctggcatggctgcccttgccaaaatctcttgaatttcaccagcccggtagggagtgaattcagtagcctgtgctgagtggcaatctcaccttccaacataataaaaaattattgcgtactcttcagagaaagtagaaatcagagacatttttgtcttctatttcttttccaaggtcagcaaacagtccatcaatcaagtgggtagctgtctttgggacagacaattcattccagtgctttatgcatgtgggcctctttactaaggaaagaaggatggggaggaggttgctggtagcaaatggagccaatgatatcataacaatcaggaccaacgtgttttaaatctatactctgggcaaagtgttagggactcgaagaatagccagtccttgccctccagaggcttacaatacagttgccaaggcaggatatattacttaaagaggtaaatattatacaatttggggtataaaagcaaatatcacacaggtaccctaaaattccccacctgttccaaagactcgtgaacctttagataagtcaatggacacaaacatggcacgctctgaggagtgtccacttcatgggcctggtgagttacttcccagttacctaagaaggattttcaccccttctgcaaagcgaagctggacagattattccagaaattcaggtataacaagtaggcagctcatgattagctcagtcccaaaactctatcccatgagtgtattttccccaacaaggatctccccaaactgtttctcaataccaggaaacaacctctgaagaaaagaagacccttccaaacaaccagttgcagagaacagaatcaggactcactaactgactttcccctgtaggttccttcgccccaacaatattattccacttcctgtccaactttcccacacccaccgcttcttactcattcagtgtcacataacctggaagaatgaggcaaaactgaactggaagggagattggagactcaccttgaagagggtttgaatgacagaatatggagtttgggcaacgggaagccatttgagggaagcacaatgcattattttaggaggcttaatttagcatgtgtatgctttaagtatattagtaacaaaatggcattaatttggatgccactgatttgtgaatttggtcatctggaaaaggagtaggctctagtttacttttccattatttgagctaaaggaacttagtaccaagagtgaccaatccacagcattggggctacaagtgaatcagagcctcatactcagcccttgaaaaagcatagccactgacgcactttgttattgctgtaattataggtgataggtcctttgaaatatgtggcttagcaaaacacagaggaaagacttgagaggaaaagtgggctttgggatcagatcaatgtggctaaaatcatggttctgctgcttacagggtgtatgactttagactgaaataatgtacttagaagagctgacatggggcctggcacacagtagatgcccaatcttagttttcttgtactgatgttgtggtctctatatgaatttgtgcagtgagatggtttccaaagcctctgacttctggttgaattagcagaagtatagtatctgaaactaaggaggtgatgggacctctcaacttggtgaagttaaaatctccgttcgaatattgtgttcagtaccaaggacactccaagggagaacatagagaaactgagtgtatgagaaatactaccaaatacggtatgttatgtagaatatagaattggggctctttagcctggggcatacttagcatagagacaatattcaaagggctgcgctgaaacacatgcagctatacctttagagccctaattctacagattatttgttgtatagatccaaggggtagaataggctcaaaggaacagtttctggcttcgtttttaaaaaggcctttttaattagctgcattgggtgggaatgagctcgctattatagttgcagtcaagcacaggcagcaggacaacttggcagaataatgtaatcaccattcatgcctcagagtggggattggaatagaaaagctttcagactccttatgctgctgagaggctgtgactgtagacctaaaagtatgttaggaaaggagtaaactaaatactaccagtcctatacagtatcacaaataagtttggttcttacatcttgaaaatgaatctaagagagctctgttggtgatactggagacaacttctcttagtgcagttcagattggccaacctccacctaatacaagtgggatcatatttcagaccagagtacttcaaactcctgagaataatctgttttcaagtaatctcaaaacacaccctgtaatttacaaacaacacattagtcccaaatcagtctcctctatttattagccagtctccatagagccatacataactcaaggtattttttttacaatgtcccagtatttttattattatgattactattattattattttaacaggatggcttgtggttttacatacaatcattagagacggtaaaagaccacaggaatatcagagtgcggaactcagatctcaaatattgtttatgaactgaaataaaagtagtttgccaacatctctattttgacaacccttgtaacccttatatgtataaaaatatcttttaaaagatgttttggatgatttgtgctgatttgtttttcttggatgtttgagcaattgactttcaatatgtttatatctaagtattttaaagaatgttttccctaagtttgacatttccttgttttgagagtaaattgagaaaaaaaatatttttctgaatctatactttagaaaacactgagataagccaatagtaagatggtagaactagaagttaaatcaaaataatccacaagcaaaataaatataatggaccaaactcagcagtttaaaaactcagattgacagattgtgtttttaaaatatccagctatgtgtgatttacaataaaacatatattcaataaaacataaggacacagaaagattgaaaataaaagcatgtgaaaagttttatcaggcaaataccaaaagaaagttagtatagctatattaatatttgataacaaacttattggcaaaaaattatcggtctaaagaggaccattacataatgttaaaaggaacagttaacctggaagttataataattctgatctgcacttaatgacatatcctcagcatatataaagcaaaaattgatagaattgcaaagagaaattgataaatccaccatcacaggaggtttctatacaattctctcagtaattaatagatcaagcagccaaaagaattaataaaatataaatgaagaatttaattaaatataatctagtggacacatgataaagcctcagcgtaacattcaaaatagggtccaaagttttttggttgcgtacaatgaagacttatgcaactataagactaatgacaaaaatatcatacttcatcaaatctaagacacacttttctttccacattttaacatctctaaaattgatatgtttcagatcataataatatatcatgatataatgggcagtgttttccctaatagctcataaaatagtgagacatcctaccacagatacatctgaaatgcaatgaaatattctctgtcagtctgtactgtaccaaaagtaaagataatgaaatatatcctgaatgaaactgatcagtcacttattttccactgcccacccccattcacagtggaaaataagaactctagcctttcccctttggggaatggcttactgtatataggaaatctgcatccaacagagaatatctattcttttttaagtacactttcacactttaaaaaaagcagtcatgtactgtaagccaagactcaacaaatttataaaaatgacatatagatcatattctggtgccaaataaaaaacaattgaaatcaatagccaatcaagttaccaatcaattttgaaaatctcatgttttgaaatttcaaacacacacccaaagcatttgtgagtcaaagtaatatcataatgtaaattagaaaatacttagaactgaccaattatgaagatgccaaaaccaaaacttggaatgcagctaagtggtccttacagggaaatttgtcatcttgagggtttatgttagaaaagaataaaagtttaagacaattagccaagcatagaacacaggagattagagaagaatgacagagtaaaccctttcaaaaaagagaaggccaagaccaagaaagaacagaatagaaaacaagataaatggagaggtaacaaagaaaactattagttgggcatagaagaggtgaaaagagaaatagacatgtatagaaagaactgtgtacttgcttgtcaatctggatgggaagataagctgaagtcaatgctgtcatgggttctgggtagtactggagagaaatcattgatcaagagaaccaagaaagcacacgcaaactgagttcatcccccacctacccctttccttcctagaaagcctttgtacacaaaatggttgctataaaatattgtaaaatgtgtacattttattctcccccatttttatcaccaactaaaatttggcggattactatgaaactctcaatttgcaaagctgtttgtccctacagcagtctttgatcactatgttgtgttttttttaagtttatggttctactttttctggtctctcgcttcttgatatcatacctgtgttttctaatctagatactcccctctgcacttctaatttgacagtctaagcttctgggtacctgaatatcagaaaaccaagcttacataaattgcatatgaaataaggattcctagtctctaagaacttgagagaaggcatatggcctaagaacccaagctttagtgaatgaccaatgtgtccatttatgccacctcctgggttattgaggctattccagatagtcttttgggttgagcaccctggttcagtgaatccatttgagagaagcacaattataggaagaagtgcaaaattgaaaaaggatctgaaaagtcattgggagcctgggcaacaggctctacaacagggtcttttgtagagaccctatctctacaaaaaatagaaaaattagccaggcatggtggcttgtgtgcatgtagtctcagctactcaggaggctgtggtgggaggatcacttgaatccaggaatccaagtctgcagtaggtcatgattgcaccaccctatgctgtgcaagagagcaagaccctgtctcaaaaaaaaaaaaaaaaaaacagtgggcgcggtggctccgcctataatcccagcactttgggaggccaaggcatgtggatcacctggggtcaggagttcgagatcagcctggcaaacatggtgaaaccccaaatctactaaaaatacaaaaattagccaggtgtggtagcggacacctgtaatctcagctactcaagaggctgaggcaggagaattgctagaacccgggaggcggagattgcaatgagccaagattgcaccattgcactccagccgaggcgacaacagcaagactccatctcaaaaaaaaaagaaaaaaaaaaaaagaaagaaaaaagaaaaaaaaattggtagaggggggaaggagttgtcagtgggaaagagaaatgggaggaggaggaagaggagagatttaatagtttggggaaaaggaccaaaaagcagagaaaatctgagaggatctcctttctaccaatgctaaaataattgtcaactctttaaatagtccaacattggcaaaatcagtgagctaagttatctgagaatgggagatgacccaccaggatcatattgtcctagttggcagcttacagtcatactgcactaaattacaagtcaccccagagtcattacgtgtattttctaatcaggatagtatttgggactgacaggatttatattgtttgcattcccagaaggcagtcaaactcctccctctgttccctacagaatgacaaggtcccatgagggtatataaacaccttcccttttgcaaagcagccatcttctcacctatacattaaggcaccaaggaaatgcgaaaggcagggagttaatttatttctcctcgaaagaagagtcagccacaaacgatacataactaacattcctttgccattactgtggctactggaacagacgttagtttagtcagtgcccaaagcagtgggcttcatgttttgtttcattttttaaaaaaataaaaagcacttgaataagtgacaactgaaatattactgagtttcttttcaacacaacccagcatcaggaaaactgtttcatttgcaggctgaggaaatatgaaagagcaattttattttacctgcattgcccaaatttatggacttagaatactttataggtatctataaagctcaagattcttgagattgtatataaaaggtgcaaactcagccaaagtaaatatctacaaaatgctccttatgatggagcttgacctggcagccccagttagctcctacctactggccttaaaatttgtgaatgtactgatccctaacagataaaaatgttgaatggcaattttgtatttcatacatcctcactctaaataaaattatgtccatttctactctgtgcctttgatcacatttcattttccttctggaatgccctctcttctttcacctatccaatttcactgtggccttaaggcctagcccagtgctttctggacctgccccaggatgactcagtggcctctgcaagcctcctaactccctctgctctgagctcaggcactgcacattgcagcacctttgagagtttaactgcatttcaccagtacggctctccaggcaagccctgagaatcagtcctgactttgtaattggactctgacaacctctttcagggttagaagttgatgtctatctttctatgcctcctactgttgagcatgcattagaaactcaatgggaaataagttcttggtttattgacaccctattacacagtttaatgacattgctttaaggaattgatcatcatggttacctctggttgatcatggatgatagattcatggttgatcatagatgatagatgctcgggtagagcatctatctttttgaggcaccacccaaattcacctttccaagttcgtaatctaaagcaacagcccatggtatattgtaggtggtgtttacttaccaataataggtaacggtgatgccaactaatacatgagggatgatcaatcagaccaattgagcatatacattaaataaatggctacattaacggtaagtaaacgaatcactatatttagtaaaacaaaaaatgaaaatgagacaccagcctttctcttccagtgtcataatatttgagcactactaagtaccttctctgtaatcctatttcaacaccccacttccaagaactaaagtactccaagtactaacaagctacatcttgtctggattattctctgaaaactggttttgattaacaagctccatgcattttatggagagaaagggaagtgctgaatgaatccaaaatttactttaatcaccttcaccatcgtaagtaacatgaaatgtcatgactgggtcagggtgacaagagtaccacaagagtacttatcaccttctgtgataagagcctcaaagcttgagtttgtgggagtatgtcatcaatcttccccttaactgcatattaatgatggcttatctcagtccttctggtattattcatataaggcataaagtaataagatttatagcaaactaggatttatacatccatatgatttctgctccttcaacggatttgctttggaaaaccatatgctttctccaacaacgctgtcactattccaaatatattctgcactcttgctttgaaatggtcataactttaaagccacaatatttgaacatcctcagtaggggattaggggaatatcatcatcatttgatttctaaaaccccaaaagctgtaggaaccagttctggtgaatgatggattatcaagctcagaactttcatgaatgctttcatgaaaagcaaagcatgactaagagattataagattttcttttgggggcctataaactgactttagaaagagtcccaagggaggtgtttcagaattgctttgggcaatggctgtatcactggaggtagtctccaatctccaaagccactagtttggagataattagattcatttggatgtgggaattcagttatgttcactacatgaacagcctcattgctttatagccatgctttttagaaagagttccacaaaggtttaggtacctaatactttttctatactgccccactttgggttaaggaatctactatcttcagtgtcttatcaatttaattgccatctctagcccaaattacctctcaggtggccagaatgaatcacagtgtttcattatgttaccctcatttatggttgatcagctttgatcaaggatattaaatttaccattggaaactccacttgggtttcccttttcttgacacatggatggcaatcttaagggcctgaatttctcaaatgtgtaatctgggaccacccactaacaccatagctctagtcagagtttgtacagggttgttcaagaaatcaacttcatttactttggccaagcatgggcacatcaccaggaacttggcttggacgtagaaggaaagggaggatggaaagggaagtgccattttttgaaggctggccatgtgccaggatctctgcatgccttgtctcatgtcatcacagaaccaatctgggaagcaggaattatctcaatttcacatacataaagaaaaagaagtcttacattcacctgtccatcattggaaagatttacaatgattctgaaggacaggcagtggagttttaggtttcaggggcaagagcagttttcaaaagtctttgagtccagtgtgcgcaagtcaacaagcagtacctggtgtgcaggagcactcgtgagtgagtctgtctcgggtctcgacaattagcaattgtgtgacagtcattctgtttccttctgcctgaccctgggagacataccagtaatggatgtgcaaaagcaggtctgttttatgtcttaatataatttaagattaactgtattgaaaaaatgctgaagaatgaatgtgtcaaaatgggttaactgtgtacattgactttcatgtcatcatccatctgtcatgaatgagtgatactttgcaatgggctggtgtatgacagtgaggaccttagggcatgaaggctttttgcctggtcccagcagcatctgccccatgaagtttgttttctctcactgcctccaggccccactgatacccccaaatagatgctgggttatgagaaccagtgaagtcccccatgtcgtcagtcttaaaaataattttacaagtccacatatttgtcccattcttggagtagttttagtgtatgtctttaaattaactactaacagtataaataacttgacatcataaaaagaaaaggaaggcttaaagaggttgtgcaacttactcaaagcccacatattagtaagtagaagtttaggatttggatcatcttttcctgcctccaaagcccaagctctttgccatgaggttgatgcagccattaacaggaatgagaccatggaggggaattgagcagccacaggaaacgtaggctccaacgccattcctgctacccactaactataggcggcatcagcctgctaaatccttattcccctcattctattaaacacttgaagggcatttagtggcaatttgtgtttgaaacactgtactatgtctcacaggtacaaatatgagtaaagcagatatgtgtcttctaggggcttctaattcagtggcagagacaagaacataataatataatttctataaaataaagtagataagacagagctatgattatgataaaataagagcacaaatgcagagttcagtggtggtatttactggtctctgtttcccactcaatgacaagggccatgattggcaaaaccgtgtccattttatgctcttgttctccagtacttggagagggcctagcacatggtaggtgttcaataaatatgttaggtatgaataaatcaggtggtacctgagcaaagacttgaaagatgaaaaacagctagccacgcaatgatagttagaaagagtgtctcagggagaagaagaccgtgacagaagagcgaggtatgtatggggagctaatgccatttagttctgtcaaagcacaaagtgtgaggagggagggggaggtgctggagagataagagagggcttgtatgggctaaagactcaaagccttgtacctagcagtccacgaatagattccagggatttcatggaccccctgaaatggtaataaaaaacgtgtgagcctgtgcataaatgtgaatgtatactttcattaggaaagggatgtatcacttccataaaattctcaaatgttaagaactctgtgggcaatgaagagctattaaaaagttcatgggcaggcaaatctatcagaatatcattttagggtttagagccataagtggctccaactgcagtgtagaagatggaattcctggcagtaatactggtggtggagaaaccaataaagagatcattgcaataatccaggaaagaaagaatgagatcctaagtctgttcaatggtattagagatgaagtagacaggggcagatttgagaagtatttagatcagaggatcaggatatactgatggcacgtgtcatattggggaaggaagagagggaggaaaaggcacctgaggttgacttccaagttttcaacttgggctgataagtagtgccatcaaatgagaggagaaaatcacgcagctttgaaaaggaaaacagtgagttcagtgtgaacggttgagtttgacatatcaataggacctactggacaattgaatggtcctgaatacaaccctgaagaatggggagagatctaggctagagatgaagacttaactcatccatatctagatgagagtttaaactatgggaggaaatgagacaacccatcgagagttttagaaagaaaactggccatggacaagaatggatccatcagtcgcacaatatcataaatgtacttaatgccactgaattgtacatttaaaaataacaaaatggtgtatatatctccacaatttttaaagaggaggaaaaagatgacctcctagggcatgctgacctttaaaggtcaggtacaagaagaagcccatgaggaaagtggaaaggaacggtcagagataagagggagattgggagagtcacagatgccagaggaatagaatttcaaaaacatgcagggcagagtgggcggatgagttagatcatccctaaggtgcctaccagaaataacagaatatataaactctgggagagagagaatttagatctctaggcttgcccatctagaactgctcagcagtaataaaatggcttaaatttcatctttcaaaataaaaattgcccatgctttgccagttttgtctgggcaggaaacagctcagaccagctgcttgggatggttctaaattccactcagagccctggaatgtgatgcctccaaggcgccagtcctgtgaatcccttcctggtgctcacagagggacagcggcaggtgtgcagaggcctccagcctccctctgcccagtggctgatgtgcctctccctctgccctcagggtctctccttggagcagagtgaagtggacatagttccttgatctctgctgtttctctctcaccaggattgagtctttgtaattagaacaagcagattgctactgaagtcaccaggttagtggaacagagctgcccccgctaaaggtctctttcccttgaaggcactccaaagtgcttcataggcaccctcactctgtaccagagaaagggggagagagagtggatggcgggcctctggggagcctcacatcatcagctgcatccccaggtgccccgtggaggggagaatccagagaaagacctttgccagctctcaagaagctctaatggatcctcagcaattttcctgtcctatttctggcagagaaagctaatatctcttcattgtggcagaatcaacctactaattcattctttcatgttaaatgcttacaagatagtctaaccgtgtgaaagcatccaagtatcttcagtggcctcagtgattcagtgttgctactcagaatctgcacaacctagcaaagactgtagaactacagcaaacccaccagccaccagagaggcttctgataacctcttccttcagaaattgaccatactgttgttgtagaaatataattgttgtagttactcggacctatcctggggttagttaaaatagagatattggggtcactgtcgtgggggcaataaagcatgcctctttcctgccttgattgtgaataaactgaaaaatgaggccaaaaaatgatacatgaaaacctcagcattgcctttattactgtgagttggagattttggctgagtgtggcagcaaacaggctggaaacggaagcccagagttaaatagatttaccagtctgatggcaggcagggggcctgtccagggaagatgcacagccagaggcagagttacggggggctgattcgcttaaactttagggaccctcacttgcatgggtccctgctaggcccttctaaggccaggggagtagcccttataattttgcatttgtatttttatgttctctttcttaaagagcctccacaaaattgcatcaggccccacaacagctgcttgcatggaatagcagagaataccgcctgctccctccggacagcacactcctgaaaacggggagagaggagccaaacatgctcggtttacactttccttatttactgaatgagtggagggcagagacaggcctggagttacgcacactgagtgccccaacatggaaagaaacatcaggagggacaggaaacgttccctccttaaccaacagttttcaagaccttactggaggcactttattggctacataatcactccatgcggtgggcatcaggcagaatcctggtgcagacccaactttgaggtggaggatttcacagtttctttattttgaacttcccccaggctcccactaattcctctccattctatcctcctccctttcccacaaaagaaaacagaaaggagcagcagtgtttgataccgtatcatccagaggcctggttctctcccattatagggcaaacaagccctggcaagatatttcactcccgccccatgccatgcattaaaaatccaaaattgcctatattccacctgccaagcaagagatgctttcattattgaagttccaaatgtatacctttgagaacagtgccttctcgtcttaaaagagaggtcctcattttgtgagttgggagcagagggaattaaagaaagccatgatgcagggatttggccattcaagccgggcagccttcagagaatgtcatccctaatgacacatgcccgaatgaaggagcggggctgagcttgtcctgccttcgtattgaatgttgcctgtctgcctccttaatagcgggcctctgtgtgagcatttgacaagacttaaaactattcattgaagaaaatggatgatcccccaacaggaagatgcaaccccatgggctgcctgcttgaccacagaagtgcttccagctccagttgctcatctgagaactccccccaccacttgctgttaaaattgttaaaattaaaggccatgttgattgattttttaaactttatttccattttttttaataaaataagaattggacttgggttgatacttaggctattgagaaaataacattggtaagactccacgtgtggctgtttgctgtttctccccctctggaatctttttcaaaggtttgtggtgaactacatgcaggggctacctggtaagggcaggtggcactgccaagggcagcaaacactgagagtctgctgggctggacaggtcagcttccgctgtcatctgcgtcataaagtcaggtccatgcaggtccccactccagattccccctgcccaatgtggactctcagaaggatcatggagaatgagtctgaacttgtgagtcagggagcacccattctcagaagctaccttgcaccctgccagctctcatctgagatgaggcctgggcaggcacaactccgcgagggggacctctggcccagatggtcccacttagttccagagtggtatctatgtggccctatggtctcacctgtcctggccaccctttcccctggtgaagagggaggacagaggccaagctcacacaccagtcccgagttaggctgtgagcagcagtcccgaccctcctggggtgcaatccgggaaggagatcttggaagcaggtggcagttagcacggagtatgccaacagacagtgaatcaggggcacaggagggcagcatggaggccagaggccaaggagtcgaggcagtctgccccagagcaaaacagtgcagagcggagccaggctctatgggggtcaggctatgccatgtgagccctgctgcattctacatgcctcccagccactggcaaagcctgttccttagcacctgagtgtcttcatcttggaacgtggtaaagatggaaaaggactgatttagcataaccgaactattttgtgaatgaagcaaatactatttactaaataatgcagatgtgcatctacttctattctaatattgatatacattcaacaggtaactagagcctttctcacattagctgttaatcccccttcacaaggtagttgattaagactccaagccaagaatctaaagggaagacagcctctgccatggtccccctccctctctgactttcctctgaagtccatgttcacccatgctatgtgcacatccacactgggccatgtaagtgaactgcttctgtcagagtggaaggagcaactgcaaacatggtctcaacttctgttgcatctgcttagtctttaaagtatagatatttcttaactaaattgttataaatctgaagttatagtgtaatggttaagtgtgcatgttgggggtcaaggttctaaaattagaccacatggattcaaatcccagttttgtaacattaacattgtgaacatataaaaataaatatgtctgtgggtggtatgtggaggtcttgagtgagttacatatcttcactgagtctcagttttccttacctgcaaaagggggtaacagttcctacaaggctgttttaccgaggctcactgaattaaatgagagaatgcatagatagcactgagcacggtggttagctgttgttaagtaagttagcattggacacagccgtaaaaatgcaggcgtttcaagagtgacctcgggaaatgacactgcccagaagaattgggcagaattgcagctgtcctccacctgggtcttctattctgaatctttccctcctccagtccatactctccagtgtcaacagcatttgctttccaagaagcaaatctgatcacgatgccccagtgtcactgggttaaagccactaagggttcccctgggctcaggatagaagccacactcctcagcctggcttgtgtgtcctcccacagtggggaccccacctcctttccacccgcactcatgctgtgctcccagcatgtggacctccactgcccctgccctaccccagggacttgtgcttgcctttttgtgcgggaatgctgacacctccttggccctgctctgcagagtgtcacctcctcggtgaagtgctagttcccagacactcggctcttcagcacttggctacttgctgagaacaatagcccgctggtctgctgggagctatggaaccaaactgcccacgtttaaattctggcttctccacgtggctgtcagcaagtttgtccatctctccttgccttggtatttttagtgagatgagaaagagaatattattgaattcacaagattgttaatgagaattaaatgagttagcgtaaggaaagcatgttagtacatagaacactgcttggcacacagtaaatgctcagtgaatgtccgctgtgctaacaacaatgttattaccatcattgtcattattcttattccaccaaaatgtaagctctttaagaataaagactgcctattttgttcactacctgacacaaaaggtacaggatatacagctgttgagtaacacgttgaccactgcatgtggttaattgtttatacgaatgcccaagccccatcagccagcagaacacaagcatcttgactagccaatcaatcctgtatttcctggttctgctcaatggggaaataatagaccctcaataaacgtttgctgaatgaataaatgaatgaacctctgaggttgcacgtacacgttatctccttctaaaacatcagctttagctctaagtttatcaaaaactcatgcccttcattcttttaaactggatatccaggggcttctggaagatctcaaaaaacagacagtgcattcgggggctttatcccagagcagtcttcagaggaggataaagttcctcaagaagtgtctgcccctgtgcatttccacccaccaggaccccctttcctgcacctctccccttcctgagccccccggctgtcctccaccacagccagagggaactgggcctcattagggggacagtttgttcctcattaggggcaccaagcttggctggagaaaagccagctatcactttatccaaagccaggaaatctcccagtatggaagccccctctctcccattctgcaccaagtccttcattctcgctacttcacggaaaaccttcctctagaaggaagtaaaaaaattcccccaaaatatatcagcccttctgctttagttcatctacctaaagtgaaaaaataaaaccagggagaggggaaattgtgtataatgtgaataaacgtagtctgtagactttattgaagtactgctgttttgtaagcctcttactgaccagaaccacttattattccaaatgcacatagatttatgatctgaaatgctcaccatgttttttaccctggagaactagagggagagcgagttccagctcagtgtttgacaagatagcttacatcattttatccccacgtcaatgcagtgaggcaagtgaggtttattatcttcctgttatgaatgtgggctgtagagactgagagattaagagggttgtccttggccagccctaagtttggagaaaacatgtaatttcattctgtcactactgagcccatcgctctctgccatcacccatgtataaatgttgcagcccagagcatcccgtcggccatggcatgtccatcgtctggcccctgtgctctcttccctcccccaactacccctgggctgcccagccctgcaccggcacttgtgaggctgcagctcccctgggggcagtctggcattcccaagctctggctagggaccagaggtgtttagttccctggctttttggtcagagacattccagggagtttcagcaagtaagagctgcctttaaacagcttccagcagcccctgctgagcactcagagtgggagtgagccacatcccagctctgctattcacctgctgtgttaccctgaacagaccacccagcctcccttccctgtaatggagaagagggagcagctttgagaatctgatagtgctgtgaacagtctcccctgaagacacttgcactaaacatcacaggtgtcatttcaggagggtcacagtgtccatccattgagcccacctgggtaccccatagatcccctgcccctggataagaatccctgggcccagtgagctctaacaccaaagtgggaagcccccagatacagatttttttaaaggaaacttcagtagtttattttctcactatgaaagaaagaaaatagattttaaaaggaaaattactataaaaccactaccagtaaaattactattaataatttagtaaatataaatttaaaaatttagtaaatatcagacagtctttatgtctctctcactcttgacatacatatacataaatccattataccaggagtgttttgtcatcttatttaaatatcatttaaatattatttgacaatatggctgggcagaatggctcacacctatagtcccagcagagtgggaggccaaggcagaagaatcacatgagcccaggagttcaagacaagcctggacaacaaagtgagactccatctctacaaaaaacaaaaaaaaataattagccaggcatggtcacatgcacctgcagtctcagctacccaggaggctgagatgggtggatgccttgagcccaggagttcaaggctgcagtgagctatgatcacaccactacactccaacccaagtgacagagtgagaccctgtcacaaaaaatatgaataaataaaattatttgacaatgtaatgtctacatagtaaccgattgcgtagtaattctgtaatgcattatttaactttccccaattgttaaccatttatgttttcattattattattattattatctgtacaaacatatctgattattttctttttttttttttttttttttttgagacggagtctcgctctgtcgcccaggctggagtgcagtggtgattattttcttagactaaaagtggaatagccagttctatgcagaaggaagcttttgatacctatcacaatttgccccctctctcctagaaagatttgctgatttgcactcccagtagctgtagggaggcagggtggaggggacttagacccgtgttcctaagcagcttccttgaaccagcaactcagaatgttgacaccaagtggggtctctgtttgctaaaagttagacatcgcagtccacagaaactgtgtctaggactggcctcgccacatttttaggtgggtaaaactggtcttcagtgccttcctccctccctcattcccatgtagccacttgatctgactgtagcccctcgcctcccaggttcagcagccgttgctctgcccccaccccctggattcacagaccctacaaggcatcccatcagcaggctctagactttccatccacagctttatgaatctgttacatgcacctgtgtgaatgggttcaggggagcaggctgaattcagagtacaatggtcctgagtcagcccaggcagagactgggacatcagacccagtgaggaggctgtcaccaggcaggggatggtgttccagggggccagatgagcagtggaagtccatgttcatgcctgctctgtctcttatgcagttggtctttcaaaatgttcctcaaagggaagaacagggcctctctgaaaagataaattcatttcccttgaaaattggctaaacagagtgtgttgcagggccatgagccccagaatgatgggcagagtttcaaccatttgcttggcaaactgtgctgctctctgagccttaaatctgcatatcagtgatgggagtttggggagggaagatcacacatggtcccatcccgctgctgaccgcctctctcttggccctgcagtctgacggttccatcctggccatcgccctgctgatcctgttcctgctcctagccctggctctcctctggtggttctggcccctctgctgcactgtggtaagtgccccaaacctcaggccatgcaaggtgaagggtgacataaagttcacagaccatgagtagagagaaagggatttttaaaaaactaaagatgggagacaaatcttgcattttttatacaatttatacaaaattgatgtgaactgacattgatcaatggaaccatgagtcaccagcagtcagtatgagttagggtgtgagattgccaatggccgtgccccttgggtggggcaactggggtggccgctttagttctggtgcttagggaagatccacaggacaacacaaatgatgagtgttattcgacatgtaatgaacatatatgcctctgtgtacggtacacacacatacacacatacacatttgttgagttgcccaacctatactcttctaaggccaccctggtcttagtaactagtctacctatctgagaaagtgtctctggcctgacctctttattttcaacaatgaagaatggcatttacctttattcattgattttggcaacttttataggacacacctactgtgtgaccagcactgggctaagcactttggctacaagatcaataaaaacctgcctcctccccatcagtgtcatatggagtcatcacatgacaatgtctccccagaatagcttagggcctggaataatccaccctgacgataatcccaaatggtaaatgtctggctgtcaatttctgttccctggcccttagactgggagaagtccaaacaaagtaatagccaaataaagaaaaaaaaacattccctgtgacatgtctatttctagcctgtgccctgcctttcaacaaatcagtgtgtgctgtgaagcccatgaatgtgaagtggccactgctccactgccatggcatcttcatttcctgtattttagttcttccatggaagggccggcaaggcacaatagacagtgagcctctccaggacagggactcatcttcattttccctctgaaacttcagcatttagcacacagtgtgagggagttcacatctgtgtgtacagctcaactgaaccaagaccacagagagacagagcactggacttgaaaagcaaggggaaatggcttcggatgacatgttaaagaggtggcaaatgagtgagatgggaagctcaaccaggatgtggaccatatggcagggacttctggaaagggttgacttgcagcagacaagtatggaaggagagacccaggacaggcacaagtcttgggttaattaggaccctgcaggctgggctggacttcaccaagattttaaacagattcttaccagagcagctccaagagttaaatgttgttttaaacatttaaggctgcaaaaccattttattttgagggtaaaaaatcctcatgagtcagcccaagtgctttctatggagattcaaaaacaagcacattttcaagtctagaaaaagaaaagaaaaaccttacagtgggttcttaaagaagagtcggcaggcctggtagcagcaggcagtgaacactattatagttcctttgattatttacagttacctctgggtgaggacagctaggaacattagaacagccaagcagtgctccaccaaatactggctgtgtgaccttgggcaagtttcttcacctctctctcagtttcctcattggtataatgaggacaataagagctcccacctcatcgttagatggtgaagactataaaggagtgtatatatatgtgcttagaaagcacctaacacatagtaactgctgtatattattattatttaaaagtattttactgtaataggaatctattatgatactggatggcattcagtttatattctttggaaatgtttctcaaaataaaccttttgttattggaagcaatgtcacccaaggccaaattgagttttgcaatattcaaaatatttttcaatgaatttatctggttaagtccctgttgctttggaaggcagccaaaatgtcttaatgtggtctgactttgtaagtcgtgaaggatttctttatgagggttgatcttcgggattcattttcctgtttatgatgtctatttaagctgcctcctctcactctttctgaaagctggcttgggctccagtgcttggtctgccccctaaaactacttgctgatcacttgcttccttgatgaggggtgatgctccagagcagggcagattaaggtcatatgtttcctaaacagtatactcaggaatgaaggcaaacatgggcctcccatcagagtttcattcagaggacacagggaagtttctctcccgagatacagcacccctcaccacagtccccagattaatagagggcattcttgtaaacaatggtcctcaaaccttcctctgtcactcttcctgcatctaccccaagggtggggaatgcccctcaacctactagcagagccgcatctccgtgctggaggaaaagccagaaagcagaaaagacctaaaaaacgtggggtacgtgtctgccgtgtgccttctccttcctgctgcaatcttttctttaggagtgatactcaaaatatttaacaacctgcaaggcccccacccccgctgagccacacattaacccacagtggctgggtatgtgaaggggtgggggatgaagtcctgcagggtggctgggtaggagagcaggcccagttactagctacaaaggccagttttagatgtactggccaggatgagcagaccaggcacaggggctgctatcaggcctgcctctgctcagcatcctcctgcttcctgctggtcctgtctggaagaagaaacctgatgggtgagggtgacagatgatgcctacccactgcacttggcctttccctaaggaccccactcccccatttgggctcttaacttccagccaaatggaacctgaattaacttgttgccagcctgccagatgtaatctaccagtaatgactgatggggagagagaaaactgaccatatcctgaatcaaacctttagtgtttcccagcttgttcctcagtatcgccaggtggacctctggcttttaagattcctatacctattcattggcacaaaacacccaccttgaaggggagagaggtattggactatgcacactgggcttattcgcattttcaaataggtaattcaaggggttaatattttcccaaataataataataataaagtcctgcctcagttccacaagggacatttccagaacccttcaagtcacgccatgcccactccagctactcataagtttggtccgatattattgaaatctcaaaattgaactttaaaaagaggaagactaggaaatctaaaacagaaaaggatcatttttttaaaaaaagttgcaatgtattagacgagtaaatgttatgaatggcttgaatgtgtaggggggaaagtcatcaatgaatcagtgacattagggcactaaaaagttgtagaaaatgcaggtatccctgagagtctcccctcaccccagccaagagccaatgccctgatgggagcctgcagcccaggtagggggtggctttatgtatacagagaaaggccatcgtatcctgcctaaatttcagcaggtagcaagacactggaggattccgattagcaatggggactggctgccccaaatgagaaatctggagtatcgaagaaatccctgttggggctctcagtttcatgactccatgttgacactctgataaacaccccaattcccgatctcccctctgtccctatacctacaccttcccggtggtgtgtgttctcccctcccgctcccaagatatcagtcacctcagaagagagcagcccagcttgctgatggggccactgcacatttatgagggcttcagcactcatactttagcaaactgctaacttacctctatggataagaactcctcccaaactgcaaccgtttctctgaagttccctgtactacctctggctgtctcatattcagcagacaacctgctgttctatctccgtgagaaaacagaagctgtgctgtcagaaatccttgcactccagcaccctcatatgtgcatcctcctccagcatccctctccctccctttccacagaagttcttcgtttcttcctttctcacccagcatcttcctcctttcctttccactggcttcctccctctgcctacaaacatacgccagccaccttcatcctttaaaaaatgtgtctatgttaatctgtcctcacactactacaaagacatatacctgagactgggtaatttataaagaaaagaggttcaattggctcacagttctgcaggctgtacaggaagcatactagcttctgcctctggggaggcctcaggaaggttccagtcatggctgatggcagagggggagcgaggcatctcacatggtgggagcaggaggaagagaagaacgaggtgggaggtgccacacacttttcaacaaccggatctcaggaaaactcactatcacaagaacagcaccaaagggatgatgctaagccattcacgagaaaccccaccgccatgatccaatcacttgatggatcaggtgatgactgatggctgcaatcagccaatcacctcccactaggcccctcctccaacattggggatcacaactcgacgtgagatttgcgtgggaacacggatccaacccatgttaatctcatgccttatttctccttcatgctactctcttctccttaccttcctttcacccacacactcctttgcggagcatccactgtccacaattcctctccttccctcttcctcccactgcaccctgagcaccattgccattatttctccaatccttcgcttgcaaaactgaatttcccagccagtggtctccattcacttctcattcttctttacctctttcagcagtaggcactgtcgacctctctctcctttaaactgtctcctccactggtgtctgctggctcttctcctacgtctctgtgcagtttctccctgtctccctcatgggctctctttcctctgcttgccaattgttctccagggttgccttccaccctcttctctaacacattgttcctggtcagtgtcaccagctcccacaacttcaactacttaatgtgtttacccatcactggccttggctccagaggaccagcccacattaaagggaccaatggacatctcaaatgcaggcatctcaccctcaacataccccccactgaactcttcacgttaccccctaaacctgctcttcatcaatggatgtgccattgttctccaggctgcccagactagggactgcagagcaaccgctgatgtcttcttctgtccctccttgtcttatctcactttggagctgcctacagcacatcctttcccacacctcatcttatctcacatctgttcacaccttctactccagcacagtcacagtgtctgtcactcagtagttgcttaagaaatatttgtggaatgaatgaatggataccattgtcttactctaggattccgcatctcccacctgaattatttcagcaatttcctaactgctcttttagtctttctcaccttcattaaagagacttttcatttttaaaaaaggcagccaggtgatgagcctactcactaccctgcctagaattctcttgagtgttcagcggccgtaaaacagagttcccgtcccttgagatggcatgagtagggcttttccatcctggccccacttctccagcctcacctcttaccttcccctcctgtgcagggtctcccttagcacctgtgcctgcttctttcatagcactgatcatgctgtgaaaattgcctgtttgcttgtctgtcttcctctgttaagctgaagctgttggaagccaaggctgtaggtccccagagcataatacagtgcctggctcaaagctgctgctcagtgtatctcaaagttcattagcagccaagtggatggaggaccaactgtgggcacactctactctttggggctcattaaacatatcaggtacttccttatcatgatctttttgctcatattatttcctcttgctgaaatagtttcaccttctttatgttctctatacaattcttccttcaaagtccagcttgttgttcagtccatttcagtagcatcctgcacaccttttcctcacctggggaggatcagctgctatctcacttggtttccatggcgtttttctcacacctgttttagagcatttgctcattctatcacaagtatttatgtatatatctctcactgtacagacagtccccaacttatggtggttcaacttagaatttttcgactttgtaatggtatgaaagctgtgtgcattcaatagaaagcatacttcaagtacccatacaaccattctgtttttcactttcagtatagtattcaataaattacatgagatagtcaatacttgattataaaataggctttgtgttatctattttgccgaagtttagactgatgtcagtgttctgtgagcacatttaaggttggctaggctaagccatgacgttcactaggttagctatattaaatgcatgttcaacttatgacatgttcagcttacaatgggtttaatctggacatagtcccatcatacatcgaggagaatctgtaccatgaactcctccatggcgaggagaaactagtcacagaaactaatcccaaaatatggtacagtgcctagtacatattataatttgtgtattttccaaatcaaactaaaaacctaagtcttcctaggggaagagtgttcgatgcagaaggagcccacagacctatggaactgtaatgagtggttgtgtcatgggggtttgtattatcctatttcatgacttacatgtatgttatatgcaatattttatatgtatctaatattatataacaaggacattcaaatcagtttcttaaataaaatcctagaaataggcccattttattgagaggttaatggtatatgagaaaccccaagtgaaaagatcttagcatattttgcaaaatgaaaaagttctgagcagggcacagtgactcgcacctataatcccaacactttggaagagccgaggcaggaggatcacttgagccctagagtctgagactagcctaggcaacatggtgagacagcatcactatttaaaaaaataaagttccggaaattagttgcataattatgtgaatatatgtaacactactaaactgtacacttaaaaataattaagataataagttttatattaagttcttttaaccacaattaaaaagaaaaaaaaaatcctgcttttaaagctgcaatttttctgcaatccaactagttaaaacaccacactatttaggtcaaatcaaatcactgtatttctgttcatataacaacaattttttttcagtattttgggagaggctcatgtccatgcattcagaattttttcctatataaacaaaattgttctccctgtcttgttttcagtggccttataggtatcttatgaacagcttttaaagaattacgtaacagatcacttttaattcatttaattgaatttcaaggatagttcaacaaataagcccactggacatctccaatgacaaattgcaaagggcaaaaattaatcaaaaacttgatataccttaagtggaaataaaaataaagcattaaaataatgttcttcgcaccgttaagaataacatttaatttgtagggccagacaacccaagcctaacatcaccaaaaggatttactgacagtttaataaaaacacaactgggacaggcaacttctgatgcaggcatcttgggcctaatactgattgtgccttcttgatcctgttccagcctccacccattcccatatggacacgcctcaggctacagctgacaagattatttctcgttagcacacagagctctgccatgacctgccctcacctctggagggcaggtacaccacacacctcacacacccatttttttctcatctctggcttccctcatcctttgtgggctgcctgataacccccaacccccatgcttatgcctgccggtgaaatggaaagaggcgagttgttgtcaaagtcgactgggtttcaatgccgcatcttcctcttctggttaaaggattagtccaatcctttaaccttaatttcccccgtgtgaaaaactagaaaattggaaccatattgtctctaaggctgcttcctcatattcgtaccttctttgagtgaatctgcttctccctttcaagattccctggtctgtggttttcaaacctggttgcatactgaaaccatctgaggagtttttatatgatacaagtactcaggggcagcatttccaaactatgtcagggcaatcataccctgcaagtatgaataggggcacttcagaacaagaggtatttagacagtgagttttaaagacatccttaaactaagttgaatcactgcctttactgcaggacttctcagagtcattaataggataatttgcatgtgactcttcaaatttattttgaccctagaactcttccttggcctgtcactacctgtactctcccaaacacttattaacatactgacatctggaaggacaccagtattctgccaaatactatttgggaaacacagtcctagagaacgctgaagcagctaaaagagcaggttcctggatcctaagatgcagcctcttttgtgccctccctggaggctgtatcaatatcaacaagcttgaacatcttgtgaacatcatcaactcacccttgttccttctgtgccctgctcagatcccactgacactactagtgtctaaaaatcggctttcccgtaacccaggcagaggccagaggctgctccttcaagcctcagggaatctgaaatcatggatttattttgctgtttcacttcacagacttttgcagtgacactggcataccatctgatggagaccatgcacagccattctctcacattaccatgtgagtcccttaggccctgtggactaatggtaaagctcctgctgcaactctcactttagacagtgatgaattgggccttttaaatagtctcagtcttaagggagatgagatgagagaccaaaaatcatttgaaatctgagttccaaattggagggaaaaaaagttgacctcatttctttgaaaatttctggtaccacattccaaattaacacccttggtaccatcctttgctaaacttttacagtgtaaaattactggattcaggcagtccttggccagcattaacccaccccaatcagtcatgaggtctctattcaattgatgctgtctatacagtggaaagattcctttatcctccatcaactagcatctcatctctcctggatgttttccatatcaagttgcctactttcccttgatttcttgacttcaattaaaagaatacttacaaggtttgggagccagaatggaaggctagaatgtaaaaagggtcagagcaagcatctccttctagctgtgacattaaagcccttattagatggcttttcagatctggattggcatttcttctatacataactctgttctggtggcttctcatgcagaatttaaaaggccaggggggcagcagttgagccggctttaagagatcaacccagaagtcccccaggacatacagtgctttaaatcaaaggcttcaaaaaagacctttgtcatctaaatacaggcacatttatttgagctaacctctgagcgtgcaggaagtcatcatttgtggaaaaaaaaaaatccattactattgactgacaatgcagcagactccacagcaaaagaaaaacaaaaattcctggaaaaaatagaatagaagttgccttaaatgcatagccaggctcatgagaaaataggagatgtttccagggcccaaataaagcaggatctggaaatcagatggtcatctgaccctaaagcagtggcttcctgcctgagattttcttatctcagtaacctagatgtttggcttaatagcctttcatgggcccataaaagtttgggagttgaaattgagtcttctgcctaaagctgcctaaagccttgagtgaaagatgggctatgggtttgatgtgggtgtgtatgtttgtgtccctaagaattcataacctctgagaggtctagagttcaaacttacactacttgaggttttgtaaattggaagctgagaaaaagtttggaaatgcttagggatctgcaagaggaaacctgaaacctctggcaggttcgtccctcaacccaggcctcatagaatttccataggtaaatgcctactacacatgagctcacaatcccaaattaccaaaaacccaaggaatattatttattacttgggcccttgggattttatgatacacatggaaagcacaaaagaccagagaaaggatgaggaagtcagtccctgtcagcactattccctttgctctgtccaaagttaacaataattgttaaatagcagatacactgaaaattctctgtgtatcaccatttctcctgtaacatgaaatgtgttcctgaagatatgactgcattatggaattttggcccatgaaaataataggactaatgggggaaatgggttcagagcagaacattcaaaactgtgcgatcttacaaaataatatattaggttggcgcaaaagtaattgcggtttttgccattgaaaggaatgacaaaactgcaattacttttgtgccaacctaacgctaaaaaataataaactcaataaaaatgccaccgttttaaacaccttaaattcttaataaaacatacttcagtaaatatggctctttaccttgattttttttaaataaacaggtgaagtttcttagttgacgtgagtctgatgcagcaccgtggctttgagctacagaaacaagacggaaggaaggacattcttagggcaaagtgtcacaacacaaggggagatggctatgactcagcgtcttgttattccttctgcactggcttaaaatagaatttcagcttttgttgtgttgccaggttcctcttttcatgtaaaaaaaaaagcaatttgcgtggttccaaataagactgaaaaccatgaaagtactattctgctgctctcggcattacctccttttcttcactccatcacacatgcctctaatcccctctaaggcaactggtggctcctgtgagttccattctcctttctttggtttttcagcatggtctctgaggaagctcatttgggtttctttatgcccattgctctcacagtatctcatcttctcttatatctttacaaacatctcctgcacaggctgaaggctttcctccctcattcaacccctgcatttttcgaaccaggacacacgctcctattgacagtgctatgtaaaaggtttttaatgaggaaaagaacacgcattcaggagcgccatacatgctggacttgcacaaggacacacctaagtgagaaagcaaatgaggtatgcctggtttctgcatattcctccccaggtcactactggtggctgggcagcattttcacattcacctgatgttactcagtggcgccgaatactgtcacctcacacttttaaatgtgtaatggttaatgttatatgaagttgactatgaagaacaaaagacgaaaaatgtacattaccttctcctttaccttgcaaaaatcatattttgagctggcacagttttgcagtttagtgattttaatgccctgtttaactaccacatatgaacagtcacaagttacatatctgtgttggaacaaaacagactgtgcgtgtagttttcaaattttcagaaagtcttcttagaaatgaatttcggatacaaaactggaaaatggagtctataatcacagggcaagtgaatttacatggaagcctgggttaggggatgaaagggggtataggtggtatctaataagatggcacaattaaccgtaaggccaacccgtgactctgattagattcccatgacgcaatgcatccaagcatcacagcccactcttggcagttgggactttcagcatcttaactactgaagaaacatttatatggagggttaagagaccagaattgaatcttgtaacatgtattaagtgcttatttgagaggcaaggaagtttattataatcagaaatgcttcctttatccctcccttttcaggaacacacactcatttattccagaaatagtggccgagtaacaaacactaagctgtgtgtcaggagataagtatgcccatgtcttcaagagcttacagtccagtgcggaagacagaggaataaacacagttcagtgagtttgttgctaacagtgcagacagagagagataagatccatgtccctaattcccagggagccatctggctgggattgtttcagggctggatctagaaatccaggccgtgccagccttgtatgcagatgaccacaaattcacatcagtggaagccaaggagtacctgcatgcagagctgaaaatttactccagaaatagttctatgtcttccccaacacaggacgggaggcagtggagagcccagagttcctgacaatggagcggggacaccaaaatttttagaatgaaacagcttcaaagctggtctttctaatcagctataagcaagtctcaacagaacactcatgggaatgtctgacttgaagctaaacatagcccctgcatatctgacagaggtatggggctccaggaaataagctaattcacagttctcaaagtgtggtccctagaccagcaggtactttgtcagaaatgcaagtgcccctccccaaacccactaatgaggaactcaggggtgtaccccagaaagctgtgttttaagaagccctccaggtgattctgatactcaataaagtttgaaaccactgagctaattaaaattagaggacaaatgcttcatttcgttaataaaggagttatctgaagcagctctcttggactttgtctaaacagcagagatgcctgtgtgtcaaggaagtgtctcctttgcagcaagagaccagcccttcggcagagaggacttgcaggaagtgccctgcattcagctcatgcaaaaaggacacggagacacaaaaatacaacttaagaagaaaggggccaaaaacgagtcccctgttttgttccatttctcatgccatgagatgagcatttgtcaacaatgagcctgtctatacagcttatcctattaaccagtcccagtcacagagtgaggagacaagaaagatgaggaggggagatgtgaagttgtggtggaggatttctcaacaaggtgacagaggcaaaacaggggaccacaaggaatcactaggcctggcattcttttgctgctaaagcagcatgtgggcctgactcgcggcttcaaacggaacgtctagtgagcctgtgcagccgtcatctggtaggtgggaaaggtgcccatgttgagaactagaatgacagcatcctttcttccactgcacaagactgtaacagtagagttagcaagtgacaaacacaacggcaaggatcaaagcctacacattaagaatcaaacttcaatactgctagagaaaaaagaaaagcaaaataaactcatcaggtgctttatctcactttaacaatttctaaaatcaatttataaagccatttataaaaaaataaaatgaattattagagagcgctttacagagacccaaatggttgaacttaattcataaaaccaaaatagttcaacttcccaggcatgaaacaggccctgagaacacgcaatctttctactctattcgtactatgctgactgcatctccacatcttccatcattactatttccaacagccaaactcaggagtgcacataaaaactggaatttgtttgactcaatgagaatttgtcagtaacatttcaatttgatcagattctacctggtcttttctgactttcctttatctatgcaatgatcgtcatcaaatctgaccctacctcatgtcagcctgaacagagacggataaagtcagaattaaagtcactggtaagagaggagaggagatgcatctcccaacacacagcagtttcaagaaattctcaggtatcagagaaataccaatagaattcaggagttccatattccatctcatttttcccgtcccctttacctcaccagcccatctcttagtgcaaaagggactctagggcagctatcccaaggaggcaaatggtcactttctgcttctctaaaatacccagtctaaaggtggtagtaagtggggaagtggtactagcctgcagagtagaaatgtgaaaaatgttctcagatttactcccatactaccatccagttcttccatgttatgcttatgtttattattttccattaaaatattttattaacgacccttcaaccctatccatcttctttgtccctcctaatgaggaaggcgccaaagagcccacccataaccaggaggatgctcacataacctgagaaaaaggagagtgggccaaaccaagcctgagcttggaagctgattctagcttgcattctagttggaaacagaggatttctagtcatgctggttggaaacaaataattatgcaatttgcctttcaattacaattcaaagtgctacagaaaacaaacatgatgggagcccacaaagagaaccttgtcctttctgtgagattcccaggggaggtgcatttactggagatctgtttgataagtaggtgttcactggggaatgtgcagggctgtggactgagcgtggaggaggtagcgagcatttgggcagaagatactgcacttgagaagcagcagagcatgtggaaggaacaagaaggtgcccaggagactggagtgcagaaagtgaaggagagagacacagtgggagggaagtaaggccacatcatgtggaacctgtgggacatgggggcagtttgcattatatcctataagccatgggaagccattagcaggggtgcactggttttaagtactgaagcaaccacggagatatctatttttaaggctactctgtgtgtggccgtgttgccatggtgccgcaggctacagagcaatgcaggcttttgcccaagctgctcctccaggcaacacagactctggccctgaggggagtggggtgggctgagaaagctgacatgtctctgtgctcagagcactcctttgggtggcccatgtgctggtcttggcacaaggatttggcccactcacggacagcctatccaactttactgcttggaattctcatccctgactccaagcttagcctgtctagatcatacttttaaaagctgtcctgccatcctgtggtgagctgcaccctgctccccaggggcaagctttcggtgcatgggcttgaagcaatgagaagacttcctgcccattcctgctgaacataaccagaagccgaaccagtgagaccaggttggaggtgcttaattcctgtttacctgaacagagtggcattttttccagaagctcaggtgcccaacttacagtgcgtcaatgtgaaatctggatcataaaccagcccctctttatcaatatttaataaatcatggattttagcattgtgttttgggttccttagggtctggcacattgcaggatgtagaatagatattcaattaatacttaatacattaaattaaatagcaaccgcattgatgggttggtctgagtgttgggccacctagaactgcattccccagccagtgtcatatgctgacacacatgtggccaggcatactgctactgactcccccaaaacccttggccactgtcagaacaccagcctcctgtctcactcagttcatgaaatgctggccccttggcatctctgtctggaagccaccatgcaaaggcatttagtatatgcagggggggtatgaaagatgtaatcaaggtaagagacaaatacaacaagaaagggaaaggagagtattaatagcatgcagcatctattgagcacctactcactaccagatgcttaacacacatgatcgctcatgatgactcagtttctgcaaggttcatgttattacttcatttaacaaatgaggacagtggagatcagacaggttaagggactcatcaaatcctgacagtcaggagaaggcaggtctggaattcacatataacatctatgctgtgcttagctcatagcaccgtggagacaaaagccctctgctcagcaccaaacctcttcacacccaggggccttgccacatatgctgccctctcaacatctgtctcttcccaaacatcctgttccccctctcactcccttccctacccctgccccaggagaacagatgcattccagatcttggtccccagatcctcacccctccctccagtttccagacatttcctgctgtaaagtaatttactgcttctgggatgatgggaaatcagtcctggacaggagcgatcctccccagagatttccttaaggaactctgagccagggttgagtgggtgagcacaatcatggctttgcattttccagagactttcaccaggcgtctcacagcagccaggaagtggaggcagatgaaatgagagtttgaaacccctggaggccttcacttctgcctcttcaattaatggaataccatactttcagaggactggagtcttgggccattggctaaggttaacagaacctgcagtgggaagcctgcctcctcatgcagagatgacgttatcaataatggtagggtgggtaacagcgtggggattggagccctaacaaggtcccagaataatcatcaaaccagaggagacatgtgctgagtagggagagctgaagaggtgcttgctgccagctaagcagcctggcctgcagccagagcccggctccccgactggaggaagaaaaaatgggtcctgtgggctgtgcccgagcacccaactacaaaggcagcacctgatgttaaggcatcaagagatagggaatgagctttggatttgccagaagtcctctaagtaaaagaactgagtaggggacccaaaattctgataataagtttggggtgagaggaggaagccctccaaggcacagagtggaattatagtagataattgccaaatgccatgtaagagactctaaatccatttaacggtgagggctttccttttatgacagaggggtacaagttggggtcaagagggaggagggactgctcactggccccagctgtccctgctctgtccttatcccatgtgtcatcattctctcatgggttagactgtctcccaattacttgcccatccagagtttccacatgtctctcttcagccccaaagatgggacagtcagaatcttataacactgttagttaaagctttgtgcccctaagtgtcagtgccctgaaagaaatccctggacactcctttgctgcctctgttgggactcggtctgcctgggcagcacatccaccctgcaaagacacccgtggggaccagtgacagctgaaggactgccagcagcccgcgtggggtccacgcttgacacatccctaaagcaccatgttaacttccattgtgtgacaattctttgttaaatgtgtagacgattggatagatggatgaataaataatctgatatgtgaatgactcggtgaataaatgagtgaataaatttgcatgatagttatctggggtaggaaatgaaactgtgacctgtggaacatttatttctctatacaaaaccagaagagacgcaaatgagactggaaccctcagcctgagtcatatgctaactagcagagctactctgtccagcaaagacacctctcatggcagtgattaagcccgacttgctggggccattgccatggtaattatggcagcaccaccacggtacctcctgacagcaagcctcttaggaggcaggtagccagagatttttcactgacctgttctctgttttcttttcagattatcaaggaggtccctccaccccctgccgaggagagtgaggtaagtgaccacagcaggatggcagtgggtgggcagggtggcagagtagggtggagagctggctgggcagctggacacttagccccctgcagagcagagctaagtcaagctcaaaggatttaatgtacctgcctgtgaagcagaagggaggaaactgtctggcctttcctaaccagggatgaacaagaaactgaactaaactgccagaaaagacaatgagttttggaggtttttctccctgcagagataaaatgtgagatggaaataaatgtttttatcagtacagttatttggagctttgagatactgacttttcctctcaaacaaaccctaagattctcttctcctgcagagacttaatgctttatgtgtgtagatcaggcacagtttgctacattctccaatcattggttctaggaataacctgatgcccaattcttcatttttctttcatttaaaaacaatattacctaaagatgggccaggcagtaatgaaaatacgctggagagggatatgttaatatcctggccttcctctcaaattctcgtcatctaaagaaaaaaattcttggactctaccactgaatcggccagtaaactgttctgatgcaagggtggcctggagtagaatacagtggaggcattaaaggctaatcatgagaaaggcaagagtgcctagcaagtggctttgctaatctgatcactcttagtacagctggagtctctagaagtaacatccacccattcagaagccagggttacatatctaaacactcaatgagaccaaaagatagattgataaggtttcaagttcttgtcctcaatccctaacgtctgttgtgtgcaaatcaagtgccagttcctcacccttccccttccaatgcatttgtcaagtttcctacatacagaaagagtaatgattaaattaaaaattccatgtggctcttatatcctgaaccatacgcatgtaagccaagggatttaatagctgcaatcaattaaagtgcatcttgttggaatgctaactttctgcccagaaatcaagggaggaaattacattgctgtgcaaagaagaagaaaaaaccttctttacatacattaaaacctttccttaatccttcaagagaaagtaccgtggctagttccacgactgcaattggctttgcttctgttatgtgcagctatctcttagacttccaaaacataaaaaataaaatagagcaaggagctcccttattaggactttgtttgcctggaggcaaataacattccctcccttgttgtgttcagttagaagggttgtggctttttcttttggctcttgctctgtatttgcctttagaaggtgacgtggcagccatagtggccaaagtgcacctggggatgtaggttaagactgggctctgacttaccccagatccaacatctagcctagggttgcacacacagtacaagctcagcagggacttttaggatgaaggacccagcaacacaattttggagccaagtaaaaaagcccaaactagaaaaccatctaggaaggatagctaaaagcaaggaagagaagtagttgagttttttctgtttcataaaagttgtagttacacccaaagaaagctgacttcatttcccaaacagaatgacaacctcagaatgcttgaatctaaagggttatgttaggcttaaaggagtttttgggctgaagcttcctcacctgtcccctgtcactctatcaaagggataactcacgtgaacacctgcagttgattatacttggtcagacgtgagctggacagatgactagtacatttcattggctgatgaaaaacaaaacattcccttcctggagtctagatcccctcccctccatttccctttgaaaccctctgacttaatcaattaaatatgacgtcagaaataaatcaagaaactacccaaactggagacctaggcaataaaaatttaaacattgtactttttagcatcaggcgctttttggcatgtgctgattgccttagcgtgtgtgttggccctgtgagttaggccacctaatctccttcctaatgtattttggcaggaaaataaaataaaataacaagaagaagaaagaaagaaatcccacagaaacagataacctaacacagcccgtgcaacgtattttatacaatgctctgaaaatcatagtctcaatctagacagtcttttcctctagttccctgtattcaaatcccagtgtctaacattcaataaatagctatatgaaatcaaacactctctgccgtatatatgaagaccttcagtattatttatcccaactttcatcagctctatcaacatcatattctgagagaggcatgtctactatttaaataactaaacttagagaatgaagataactttataataagctctcagtgacctttttaatagaaaatataaaaattcagaatggaaaaaggaactatatgctgagattctatgtaaccaacggtgacacacttgtatgaagagggtacaaagagaaattacttgaaacttgaagagctcaatagaagcaaggaagctcagttttaacaactaagagggacatttcctgggttaagaatcttctcaagtggcaccagtggggatccctccctaactctccagttactccaaataactggcagttcgtgggagaatgcagtaatggagcacttcatgtgacggttttgttctgcatgtaatcaccttccatggattttatgaccatatttgagtttttatcagcctcattcgcctgcaaaaaacagagaccagttcaagctagtccaagatgaaagaactcaggtagactgtggctggggaaagaactgaggcagctctagacaccaccctcatgggctttcgatttcactgctagcagctctgcttctctctgggaatttattcccttctgccttctcttactggccgcctctctgcccttgtaactctggtttgtacagagccctctctcctgactccatctgatatttctagtcttcatttcaccatctgcccccagtgcttatagctgagtctctcagtttccatctttcagttcccaataggggaaaatacttggtccagctcatcttttcactccagaccatagatcatcagtcacagctcacagccaaccaacagactggtgctcttgggtcacatctggccaaagagaagcttcctagtaagccccgtggccatggtgagaatagctcccctcagaaggaggaatggacctggtgcaggccctgtggcctctctgaaatagtattgtttcagaaactaaacttcggtctcattaaatactatcaaaataaaagctacacccaggaatccataccatattcttccaacatctgccacttttacaggctctcaaagatcctatcgttcccaatatcaagcatatttgaaaggcaatagatagcaggaagccccatgactgaatggaaagtgggttatggcttagccccaagcagctccatgtctcagacacacacagacctacatatgaagtaaatgtactggaaagagaagatgcttcctttcccatgtcctgtctcactctatcaaaggcatagctctggaaacacctgccattttcttccttaatcacactgccttggccagacctgggctggacagatgactagtacattttatttgcaatgaaaaacaaaacattcctttcctggagcctagagcgcctccccttgttcatttccctttgaaaccctctggcttaatcaactaaatattatgtcagaaataaatcaagaaactacccaaactggagacataggcaataatagttaaaacattgtactttttagcatcaagcaaatcaaggtcttagaatctgacttgagggacattagagaagtcaaatagggtagaggtaaaaggtatgtaagtagccccaatgttttttgatatttaaaaatcttatttattcaacaactctagaatgagtgctcctgtgcgctgatagcaagtgtgagattctctgccagagttgccttaagagagtgtgtaactgggccaggtacagtggctcatgcctgtaattccagcactttgggaggccgaggcgggcagagtacttgagaccagcctggccaacatggcaaaacactgtctctactaaaaatacaaaaaattacccgggcatggtggcacattcctgtaatcctagctgatcaggaggctaaggcagaagaattgcttaaacctgggaggtggaagttgcagtgagccaagatcacaccactgcattccagactgggcgacagagcaagactctatctcaaaaaaaaaaagagagagagagagagtgtaactggacatttataaagttggtgacctaatcagtcctaatcaggaagaaaggcagagattcctggtggatattgcatgtgaatgtatgaaaattaataataatagtggttaattactgaagatgacatttattgagcatttataactatccaggcaattatgtgaagcactttttgtggtacatttcattttatcattcagcagccctgaaacaaaagtgtgctattatgaacccctaccttatagatgcaaaactgaggtataatgagattaaaataccagtggccccaatatttcagttattaagtgatgggactgggattcaaacttgtacctgaaaaagaagcatagagcagtctttcctcactggtccctgaagacaatgtagctcctgcaaccaagagcaagtcttcctgatgctcattgttgggagcatcaggtgctcctttcttgagtggcagtgtcacctgtctctgacccgtgtcactcacacagggcacacagccccttttaagactgacgtaaagatggttacttattttctgtgctctgtccatggccctagtgtgtagctattctcattagctctcttatccctatgtttcccgcctgtcttctctttcatgctcccatgtcaccatgtctcatcatgaagctttagaatatatctgggagcttggtatggtgactcactcctgtaaccccagcaccttgggaggctgaagcaggattgcttggggccaggagttcgagaccagcctgggtaacatagggagaccgccccccgcccccgccgccgatatctacaaaaataaaaattagcttggcatggtggctgtcacacatgtggtcccagctactggggaggctgaggctggagggtcacttaagcccagaagctggaaactgcagtgaaccatgttcatgccactgcactctagcctgggcaacagagcaagaccccaactcttccaaaaaaagaagaatgtgtcttcttgttttaatcatgggttagtatatatgcactggggggcgggtgagagtgggaaaggatgtgaatatgtggacatctataggttggtattttgtatctgaagggagaggggtgcctattgaaagcattgatgcccatccagtgaacaataggcacctggctttgaaggatgagcttattttcagatttattattatgctcactgatcctaaaaatttctctgtggcaagaaatgtttagataggaaaactgagctatggaaaattatacagggccagataagttgaactcctaatagcaacaggtctggcatccttccagccatgtctacacagacacccagagtagcctccaccctggagggatgaagggccaagctactgtcaggcatcttcttgccagtgaccattaaatacacatacacagacacccccccacacacacatacacacacacacacatacactccaaacagaagtcctagagaaggcccaaaattccgtattctatgttttaatactttaaaaaaaaaaaaaaagaacattgctgctaggaaaataaacaccttattctttactgaagaatacaggacaatccttgtgttgtctttaatcactttgtttacgtaaacagatataatggtgccatgacatgtgaaatgcggctcagaatggtgaaatcttaaatcctctggagtgttgtatttacaaacagaagtattgctggatctttctgacttgccaattcactcctaggagtttacctccaagactgacattgaggggatctccctgacttctccccaaagaccaaatgagacagtcctgccagttctactttaagttctgcccttcgaagcctcccagacctgggagtttctgtagccttagtcctttaattcatgtcgtcattctcacgaaactcactcctctataaatgtaaacaatattgtcgacagctgagttctctttattttctcaaaatataacactgtgctggcaggtgatggggactcaatgatagttgcttgagttagtgaaataattgacaaataaaaatctcttgttgagcttatgcatttaagatgtgctccagttcaatgacatttaaaattaatttaaaagctgatttaaagctactgccttgggtttgattctctttcagttatgtgctccttttcattgatagttcctattgaaacctgcagtgaactgggagttgtaagccttcttgagtcaaaccggccatgtggctcttctagtaaatggataccagagaagcaggaaagttaaagaacttatcaattgagtctgagagggccaccctttgcacaactccaggggacgctattcacatcaagtctgtggagttgtcccatgcacagtatacatgcaggagtgaggcagtcccagaatctggaaaattcatcctttctaccctctggtttgcttaataactaacagttaaacgtgttgagtgagtggaaggtggagttgtggaaactcatgaggcgagagcattgcattctctggggaacccgggagttcttggcagaataggttacgcttaaacaacattaagggatgggtagaagcaatgggagaagggctttccaggcatgtggagccctgcatgttgaagcgtggagctgcacaaaagcctggcatgattgggaaagatgggaaaagttcagggtctgaggacagcacagggctaatccaattacaggctaaccaagtgagttcacagacttcatcctctacagctgtttcttcctcgaacagcactgtgcctgcaggcacacccaggtctgcctgaggacacgcaggtcagaaggggcctctaccatctgaggaatgtgctgccatttgtgttacccaagctccagccagctggacgtctggagccaccacatcctttcagatttaaacacaacttcccttgatgggaaaccggcctccctccccaatccctgcggtttctcccaggcaccactgactcctactcctcgcttcttccgcgttatctcatcttctcggtttgctagacacgatctagcagctctggcacaaatccaactgcgcagcaaattttactgaaggtttaaaagtatagtgcagcccacaacccctgacggaatattaaagggactcttatttaccaccggccacccccaccactcggggggattgggggtcgtagctgttcactggtagctctgccccactctgttctgctcatcttctcattccccacaagcccctgatttctcattcacagcaattgggctcatccagccccatcctccaataaccatagaggacagcaaggtttttgttttgttttgtttactaaaggaaagccagctcacactgaggatttctatactggtgttttctccctccctgctaccatccttgaagggcagtgtaggaggaagatctcaagagcctttatgatttaatgagatgtaaaaatccaccctccagtgctgccgagtttcttagtggccttgctgaggggctgggattctactccgtccatttttggccaaatggaaagacacatcaaagattcccttctcttcctggggattgcaaaacccttctgtctccagaatgtgtaaacagacccatgctaactgcaggggaaactctgactctcccgtccgtcagcccctgggcctttgtgctgcctggtgctgttgtctgagcttggcaggccagctccggtcaggggattaagcgacgggctcggtggcgcggcagcgtgtggagattgcccaagccctaggcatttcctgttgcgagaaggccaggccctgcccttgagcacgagggcggcgcctccttccccaggccagggacaagagggaggagccagggactagagggaggggccagcggcaagagggaggggccaggggcaagagggaggggccagggactagagggagaactgcccccgtgtgcaagtggaacctggaaagcggggaaaccggcttcatgcatcttactatatcctgagcactcagcggggttgcgaattagagaaagccagttgtaaatccttctttaagttcttttcgtaaaatatagggggagaaaaacccctggacaaggcatcagaaaaccacaccagaacttcacctttaggggtcacttcatttctctagatctgactcctcttctgtgcagtgaaaagacttaattagatgagctcctaaaaaattaagaggctcatgaacctagttgagtcccctgtggaataaagcggctttattcttggagtttcttaacgttcgtggtgctgctgtgttcagctttaggggatagaatttctgttatctcctttggaaaactgccccagactgggaatgcccaggctttcagagccatattttgtatatctgtgttcacagccacttacacagaaacatacatccacctccaatgtaaagtttaaccacatataggacatataagattcctgctttcacatcataaggtgaaagaaacctcggaaattctaaggtaaagtaatatgaactataatattttattgtgttggggactttattttgttatattttgcagttataaattatcaaaattaagtccatgtgcggtggctcacacctgtaatcccagcacattgggaggctgaggtgagaggatcacttgagcccaggagtttgtgaccggcctgggcaatatggcaaaaccccatctttacaaaaaatagaaaaattagctgggtgcattgatatgtgtctgtagtcccagctactcaggcaggctgaggtgagagaattgcttgagctgtggtagttgaggctgcactccagcctgggtgacagagtgagaccctgtctccaaaaaaaaaaaaaaattatcaaaattagcaggtacaaggagaagtcaaaaatgagcgtgtatttgttgccatcaaatgattggaaaagcaaaccacaaaagaacaaaatccagactggccaatgctgagaaacaatcaaaggagaatgaggttgcatgagttcaaatccagctctgtcacatacaagctgggtgacctaagtcatttaacgtctctattctcgttctctaaaataggaataataacaccatgtaccttcctgggtggttgcaagattaaaggattaataatacatttaaagtgctcaaaagagtgactggcacataacatgggaaaggctgcataaattcaatggtgtgttatcatgaatgcaatatgtgtttatcgagcacctactttgcacttagaatacaagggtcagcagaatctgagagcgagcaaccaagtaagagagagagagacacccaagtgtcagctgtcagaatgttgtacgtcctagtctgctgtgacctctctgtcctttaagatgtattaaattttttgaaaatcattttaaagaagactgcccatcccaagcacaacatgtaactcagggagtcttaatgtgccaacatgtttctgctttgctttgtcaccttttgtcctgacctctcctgcctttgcttttttgcaccttgcctcctgcatggggtgccccatcccacgcagtggtgccctgcataggacttcacccaaatgccaccaaaacaaggctgtgagaagcaggcttcagcattgtgagcaatttctccctcttttgttcattcctctgctttatcaaccccttttccagcttcctttctctacccaggagagaaatcatgccacttccttataatccatccatgactataaatggtgatatttttctccccacaacaagaataattacagtgccaagatgaagagcagttgctacatctcctccctttttccatccacagttacaagttcctcatcttctttcttcatcttaaaaaatataaacactaacttcttgtcactgagctaagttgcagacacttaattaactgctttatttgagtcatcttatttaacttatttgtaaattcaacagataattcttgggcacccaccacatacaacatagtgctattctaaagactgggaatacaattgtaagcatgacaaacaaaagcctctgtggaacgtacgttctagtgtggagagacagatattaagtaaatatcaagccatgatgagatccttaactaaaaataaaacagattgatggaatgaagagaccgcggctactttagaagaaatttccaggggaggtttctctgaggagtaatatgaaaatccatccatcagaagatggggtgggggaagtgctttcctagacaaggggacaaggggacactgtgcacaggccccaagacaggaatttgcccagagtatttgagagagggcaggcaggctggagctcaggaggaggggggcacatgataaggaagaaggccagaaaggtgagcaaaggccagaacacacagggcagagctggcgtttgcacttactctgctgctttgtggagaacagatcataggtgagtcttagggcagcaggaggccagttgggaagctaccacagtgtccatgagcaagtgcatgggggcttgggcccaggatagtggtggtggggatggagaagtcaacagattttagatctttaagtagtagcaacagaactagctggcaagttgggacaagttggggagaggcagtaaagaagagagaggcagtggggaagactacaggaggagcatgtttagggtagggaaatcaggacatctctgctgtggtgttgttgagatgttttttagcccccaaataatgtgaatgtcaagtgagcagttggagttcagaagcatcagggctgaagatgtaaagtcacaagtcattagcatgtaggtggggttagatgcgattcccacaaaggagtagagctgtagaagagaacaagagaacaggactgtaccacaaacttaccaggtagcactgcttacattcccactctacagataaggaaaacaagcttaggtggtttcagtgattggcccaaggttctaggaaacagtagcactgggattgcacccaggcagtctgactctataagctctactcctaatcacttggctgtagtaggcaggtccacacagcagtgctgttttgcttccttcatgtgccacaatttctctgcaggaagaagatgatgatggtctgcctaagaaaaagtggccaacggtagacgcctcttattatggtgggagaggcgttggaggcattaaaagaatggaggtaagaggacagcttcatatacacttatctatgtgctgactactcccatcgaggtaccagccgggcctgaccctgcttagcctctagatatcaggcatgcccagggcagtatggccgtagaccacactgatgactcaatgtcagaaacccaaagcaaattgctgaaaacctccttgaggtctggtggggatatggattgtaaggcagacggatggagagataggagggacagcctttcactgtgcgtttccatgtcttgcccaccgtgagtcagagcaggtcacacatcagctcaaacgtcctcgtgatttcttttctcactggaataaaatccaaagttcgtacctgaacctgcaaggtctttgcatgtgctgtccccgctgcctggacaattcctccctaaatatccacccatgtggctcagctctctgctcctttggtcctccccttttctctttttccacagtttccctcttccctggccctcaaaacccaaaggaatccagggttgggtagcattcacattgcaactcatgcatgtatttgtcattctcattctcgaggggcagcatattttgtcatttcatttcattgtattttgtttattttaggttcgttggggagaaaagggctccacagaagaaggtgctaagttggaaaaggcaaagaatgcaagagtcaagatgccggagcaggaatatgaattccctgagccgcgaaatctcaacaacaatatgcgtcggccttcttccccccggaagtggtactctccaatcaaggtgtgtctctttactcaaaaaatctatcatcagtcctgataaaacacttacatagtgaagaatcaaaatctttccacatgataaaatcccaacctaaaacccagcttatcacaggggaacaattatctaaaattatggacttgaaagtactagtaattactttgtcaatttccacataatctgggttgaaaactaggctttttaaaaatcaccgtggtgctcacttctgcagcacatatagtaaaactggaacaatatagagaagattagcatgacccctgggcaaggatgacatgcaaattcgtgaagtgttccatattaaaaaaaaaaaaaaaatcaccatggcaaggtactggaaaaagcatggactgtgagtcaagtaacttgggtagtaaccccagagagtgactataaatttccatagcatctcataacttcacttagcagacaatctactatctaagaaaaatggcagccttctccttaatgctaatctctactccttttgccataatataagcccattcccttttatttgcgcctcctgccagtgtatcagggcccaccagcaaatctcactggtcatggatctaggactcactctttctggttgtaagcaaatcttttttctccaccatctgtctttcccccacacctccagatcttaaaatcctctttggtttattgggaagtgtaaaccgttggaggcagttaatgtttcctaaaggcctcttttttattttctatttatttattttttgagacaggttctcactctgtcacccaggctggagtgcagttgtgtgatctctgctcactgcaacctcgacctcccaggctcaagccatcctcccacctcaacccccaagtagctgggactacgggcacgcaccaccacacccagctaatttttgtttttttttttttttttttttttttgagggacggatttcactatgttgcccaggcctgtcttgcactcctgataaagcagtctgcccacctcggcctcccaaagtgctaagattacaggcatgggccaccatgcccagcctgaaggcctcttttctattcttcttggtccaaatggctttgaattcacatgattcagttaacaccttcaatctttagccatgcccataaacatctgcactatgccacttgtcagagagcactggaaaattatagctgaaaagactctagacataatctgtccccactctctgatttcatactgagataggcaaagtccttgttctgctgaggtctggaaaacaaggcccccaactcagggctacagactccagtttcaagctgcaaacagaaccgaaccaactccaaagcctcaagtcaaagactcaatagagccagctcccatcaccatccatacacatacacacactcacacacacacacacacacagccttaccccccttccaatagcaacaaagattattttcatcattcgctgagttaatttgctaattttggatcagggcttctccaacaaatcaaaagaagtaccatttcaggcagtgtagcgaaacgttattggtggttacctttcctcagctgagctagctcaagctcacctgaattgccacgcatttctattttggtttgccatgtttgaagcagtgagattctttttttaggataagcctgccctctggggtaatggattgaactctggaaagatgtgggcaaaatgcagcttgcttgaataacagctgtttgcttctaattattttctaatgaagaacatgcagtggcgtgcatgcatgtgcagacaggaaggagccaagcagattctcagccatgaagaagaaaggggattttctgttatgccgttctcaggaatctgtaccttgtgactaacgccacatctttggttacagccaggtttttgtttctgtaatcttggacactgagagaacattaattctgtttgaaaactccggtttctacttgagagcatagtcctctattgactggcggtttaggactgaatttgatgagataaataagtatatgggccaatacgtttagaaatctaaaaacattcccaacacccacttggaattagtatcaattcagtgagtattcattgtgcagctactgtgtgccaggcactgtaggatgttgaatatacagaggctttcaaacccggctgagtgtcagaatcacctgagagtgatttaaaaaatacagattcccaggcccagtgacccagaatctcacaaaagtcctccaaaagcacactggctctcagcattcgcccatcttttcctatcaagtgaaactccttttgttcacaatgcctcccttctctaatttcacttccagactccctgagtgataggcctctgttgccccaattatcacttcatcagtcctgactcttgagcttctttttagtctctgtagtaaagcactggctctcaaaggtggtccctggaacagcagcatcagcatcacccaagaacttgttagaaatggacattcttcggccccacctaagatctactaaatcaaaaacgctggaagtggggcccagccatctgggttttaacaagctgagttaagaagttgtcaccagctgggcgcagtggctcatgcctgtaatcccagcattttgggaggccgaggagggtggatcacaaggtcaggagtttgagaccagccccggccaacatggtgaaaccctgtctctactaaaaatacaaaaattagctgggcgtggttgtgggtgcctgtaatcccagctactcaggaggctgaggcaggagaatcatttgaacccaggaggcagaggttgcagtgagctgagactgtgccattgcactccagcctgggcaacagggcaagactctatctcaaataaaaaaagaaaaaaaaaaaaaaaagaagaagagttgtcaccaaaggtcccagccagcattccataggaagtccttggagggcaggaactgtggtgcctggattgttaaaataggcaaagaggccatgattgcactgcggtgatttttcaggcatctcagcaaggagagccacattaatgttcacactgggtccatttttaccacaaacacaactgctgaattaatgttaagtggttgggaatctgagtgtcttaggagtcaactaaaaggccagatggaaatgacctaggatgccggtggacttgaagagctcctcggcaggactccctcgttaggacgtgcagagcatgaatcctccttttgcctggtggaacagccaatgccaatgcttactcagctccttctactgtagaggaaatgcatacatagccgttggtgtgattactcatgtttatgagccttctctccactagatttgaccccccgcaggcaccagctatgctttgaatccccagtaaacagtgttgtacctggctcatcccttattaaagagctgaggcatgaacggtaattatgaaaccactccccagagcatcctgccagtcaaaccacacagaccattttggcatactctatccagaaaactgacattcttcatgccatctctctgaggagagaagagaaaaagagattgttttagatgcaacaagaaggatagaagcacaggaagaaattcaaaagtaatcatgtgtgctctccgtccagaagtaaggcaggcttgcttccagaatctcagggttcatcctattttacatgatgttcgatccacaatgagtcccgtgctagccacaatgcctaaggacatttgctcagccttggacaaaacatttagccttatgtggtaccataaactctgcttccctttcccgaactcaccgtggtcctaataggaaacagaaagcacactgaaaagagttgaactaacagagatgtgggcaaagcgaagggaatccccagggatgatggggcaaccaggggctggcaacagcgagagctgttacacctgaagagcatgtggggaaatggtgttactgggttccagaaagagctgtagccctgcaaagagactactcgacaggaactgtttctttagttgacaatctaaatccacctgtttttatatgatctgcaaacaaagaatggtttttacatttttaaaaggttatataagtacctatataatgttgcctcttgccctgcaaatccttggctctttacagaccaagaccaaagggcagctaggtgatccagaggcaggcttccaaggcatggagaaggcaggcagagaatggatgggggccggcaggtcagggagagtgacccatccactcgctgcctgccttgtacctctgctataagcaaggagaacaacagctctacctcacacaaaactgtcagcaggtattggaaagactcatggctccccagtgaaaggagccagaatcgtgtacttactgaattgcattgcattagacccattgctttacatgaaatggggtttttgagaagcaggtgagcacatttgccaagcaaacccagagagaacacacggagggaagaagtccacagtgggctcttctccacccaccatctccccgtctaatttaaggcaccaaccacaccaaccacacttccccccttcctcattccagactcatgatcgggaaattttccctgatatttagcctgcattttcctttgcttggttttcacccccggatttacaataccccgtgcttctcattaaattggagctgaccatttcagacaagtgaagtcatgcccagctatatgggcaaattttcttaaaaaccaaaagaagaaaaaaaaaagcgcaacaaaatctatcctatgcatggcatgcacacactcatgagtgcatgtgtgtctgtgtgtagggaaagtttctgacgttatccgttaaatccattaatttatttcctttgggggaaagctgggtcacactatttatcatgtatttctttttttttttttttttttttgagacagagtctcactctgtcaccaggctggagtgcagtggcgcaatctcagctcactacaacctccacctcccaggttcaagtgattctcctgcctcagcctcccgagtagctgggactacaggcgggtgccaccacatccagctaatttttgtattttttttggtacagactgggtttcatcatgttggccaggatgatctcaatctcttgacctcttgatctgaccgcctcggccgcccatagtgctaggattacaggcataagccaccgcacctggcctaccatgtatttcaaagtgtaaaaagtcaggtgtcagtttatagtggccttataagttgaactactctcagaattctcaatctctgactgtcttccagctggctaaggcagacaaaccagaagaaaagatacaactgctgcctggcaaaaaaaaaaaaaaaaaaaaaaaaaaagaggaaaccccaccacaaaagctgatgacccagggtgctttgggttttttgtttgtttgatttaaaaatagggtcttgttctgtcgcccaggctgtagtgcagtggtgcgatcatatagctcactgtagcatcaacctaggttcaagggattctcctacctcagtctcccaagtagctgggactacagatataagccatcacacccagctaatttttttaattttttgtaaacatggggatctcactgtgttgtccaagctgctctcaagtgatcctcccacctcagcctctcagagtgttgggattataggcatgtgccaccgtgcccggctccctacctccagaatgctatgaatgctggctgcataatcattcccagcacagtcttattgcttagaaagaaaccaaagctagagtttacatagaacttccactttgcctttgtgaattggcaggtattttctgtggctaagatacagtttgggagcatggaattggtaaatttctcattttatagtcaaaatttgtcaacttcaaatgaaagaaagctatttataaatgtcagctaatacaatctgccagagggcttgaggcttgtggataaatctttgtcctagcttcacagaagcagttgggcattttgccagggagtgaggaccagtgtcttaagtgcatgctgtggagaggtttgtgcatgacagacatccaagtctgagatagataaagcggaggcaactcagaaggatcctctaagactttaggtgaagcccagagactgtttagaagactcttctatggcacatctagccccaaagggttgttattaacgagcccactactactgtctttaaatgacagacttctgcctacattcagaaaaatcaaggttccaagagcctttgtcatgcagtgctcattgaattttgagagttattttttattctgattttggttgtaaacactgttttttctaaagcttacttcttggttgcaaacactgtttttctaaagctcttgcataaaaactacctgttgtaggagtagaaagaggttataggttgtattgattgcctggattgttttctatgccacagactggagagtttaggttcatttgtgggacaatcagaactcagaatgctaaggatacacctggaactagctaatctcgccttggccagaagagcccaatgacagcagctcacccggatcaagcatgccctgcaagtcgggcagcgctttctatgcactaatgcctttattattgataacagcccttgaaagtagaaagtacttatccatcggtaaatagacacccagatcagtagaaactacaaatgcaaaaccagagcacagaggggttaggtaacttacccaaattcacactggccagtaagatgtttcatggttcattttattgactgcagtgcatccatttgggctcacagtaaaattctttattaatcaataggagagaggacaggaaccctggagatgaaaggccaatcaggaaactattcccagaatgagtgacagatgatgagggcctgggcccaggcaggagctgtggaggtggtgggtcaggggtggatgggaagaggcggcagcagagctgctacagagagaacattaacgagacacggttgatgttggacatgagcaggtggcagagagaagggaggttagaatgattcctggtacccagtgtgcccatctggagagattggtggtgccatgaatcaaggcagggtgtgcaaaaggaggagcaggtttggggagaagagttagttcagtttataatgtttgactttttgatagctgtgatgtgatatgatacatccacattacaattaagatttaataggtaaatagatacccagatctggagctcaagagaggactgggctgagtatagaatttttgagttgccggcagataggtggaagttggacccatgagactagatgagagcactcagctgagagatgagaatagaggtgccaaatgaaggccaccatgtcaggtgtaggcagagggggaggagcagaagaagctgaaaaggacttggcagagaggtcggagggagcaggtagaagctcgtggcacagagactgagggagagtgtgcaggggagaggcccagcacagcggatctccccaaagaaccaagcaaaatgagtgtcaaggcatttggcagtcgggatgccgtgggtggccttagcaagagcaatttgggtggagtgattggggcagaaggaataaaaactgtggcttgggggtaagaggaaaatagtcttggagaagcacagaatagaagatggacagatgcatgcttacaaagttcaaattgctggattcctacactctgtattacattcttttccatctctctacagagcctcccaaatgatcattttaatgactttactatgatcataggtaacatttaatgaataccttttatgaggcaagtacctaacttcaatatttaattttaagtcttatagcaagtctgtagagtagacagtattatcatctccactttaaatatgagaaaagtaaggcttagggagatgaaactactcatctaacccatagagctggtgaaaaggagacccacagtacaaactggggcaggctggcttcagtcactttgtgcttaaacactacactgtagggtgatctgttgccacaaagaaacatcattttctactcattctcctggtattatacatctaggtggtttctggtcttttgctatgcatgtaactttaaatttctgctgagttaattaatgtgttccttcaacagcccagtgttcttctttctgccccatctcattgcccatttgtcacagagttgggtgattagcacacacagctctgtgggtgggctgatttacaaacccaaatgctgggagtcctctccttctgaaaacgaaggggaaagaaaaaagaggcattcatccaggaaacccacctggttacatcctgaaatataaatgcttatccaaaagaaccttaaaggaaaacatttagctggtgattggaacggcttaatacagaaaaccatgcagcacacagcagcagttctatccagcattctaaaatcatttcaaaatatttttcaaggcgtttgtaaattccttgccaaaatagatgagaaacactacacttggcaagacaaagtttaacccacaagacaaagttaaacccacaagaactcaaacaacagtttataaagattaaagaacacaattttatatgtgtatataatccaccagaaaatcatttcagaacatgaaatatttgagatgcttcttaacactgcccctatataaatgctttgtgtccaggaacttaaactctttagactcctccagccttcccagcactgtcattcaaagacccctgcaagatcaggattttcaaacgttcctaaggcttgggtaggaaatacattttacattttggcccagtttgtgcacacacagtcatacacacacccatacacacttaactgagataaatttttcacaaaataatgcttatcctcaccatgtgcaattactattttctcttctattctatttcttaaaagttctggtcccatacaaaattgatttcataagggcttaaagggttgcaacccacagctgagaaaccctatgttctaaaggatctaaattaaagcgctttcaccagaagatctgcatgaggaagaatctgcaattggtgtaatagaaagcatatgtgatttggaattagacagacatggattccaatctcaactctggtttataaaccatctgcctttgggcaagttacttgatctctctttgaccctccatttcctctccacagccctctgggactgctgggacaattcaattagagaacactcatggaagcacctaccacttagttacattcattcctccaacaaatatatattgagcaccagatgttgtcctaagggataggcagacagaagtgaacaaaaccatcaatacccctgctttcatggagctggcattccagggggcacagacaatcagcaaattaacatagaatatatcagggagtgagaaggactgtattaatttcctcttgtcgctgtaatgaattaccagaaacttaaaggtttaatcaacacgaatctattatcttacagttccagatgtcataagccccaaacgggtctcactagactaaaatcaaggtgttggcagagctgttttccttttggagactctagaggagaatttatttccttgtcttttatagatgctagaggctgcccacacccactggtttatggccgccctccatttccaaagtcggcaacattgggttgagtccgtctcacacctaatcactgtgactctgcttctatccgcacatctccttctctggatttgaccctcctgccaaaagccaccatgggtcttctaggaaggacccatgcagttagactgagcccaccggatagtccaggatactctccccatctcaacattcttaccttaatcacatttgcaaagtcctttctgccatgtaaggtaacatattcacaggttcccgggaatacaaataaaagtcacctgtaggggcgttcttggtcatcagttgtgaaagcctttgtgctgacatagtcactcttctccgtttcagccaattacatacaacctcaaaggggttgtggtttttggtcatctgtaatgcttggtaatttgtctctcaagcccaggcttcagagcaagttatagctgctgagcaagcctagaagacagccagggatgtgcattccaggggcctttaattggtcttgccctgtcaacacttaacgtttagtaattttccagaatttatcattagtgtctttactaatgagctctgggcaccaagtgggaagaaaaaactttagtgaaatttggaaagattgacttgtggtctgaggatatgcccagaaatgtgataaagacaaaagcccaaagcttgaatcaagttatgtttgcaaacttggggggcactcaaacctcagggtgcgtccttcacaagcatcagagtctcctgtgtgtctcttcttctcctccattcatgaagctccagttttgaattaagggactgcagagtcactaatcccatcatgaccatattgacagtgttgtgttgttcacatgactgaagaagcacggaaagttctgtgagcctacggcggctagccacaggtctggtttcatatgtaatcttggtgcatttgttttatttcagggaaaactcgatgccttgtgggtcctactgaggaaaggatatgatcgtgtgtctgtgatgcgtccacagccaggagacacggtaggactcgttaattcattaatggtgtctctctctctctctctcacatacacacacacacacacacacacacacatattctttttctctctccatctttgtagagctaaaataactttggattctaaaacagagctagaataactccagatttacaaatccagctattatttcatgttgcaacaaatcagacattgattttcaaaatgttggttattacaagatcttgagttttgatttgcttttctgaaaaggattttgacagtaatatgttgggtttaacttcctagaatttgagcttctcaatgtataggcacagtgagagaataaagcaggactggcccctacttggggcagtttcaggagggagctctgctggccactggccacacaagccagtggtgcatcacagagtaccagcactgcaaggatggggtgagggcaaggaaggggccacagaaaacacctaccatcttcccagcaggtgtggggcccagctagcccaggaccagagggatctttcaccccaggtgaggatttgtcttggcattgtcaaggctaagcttggaatatctctagtcaagagcagtcctgaaagatagagccaggggagaccttagaaaccatccagcccatggcttcattttgtaaatgaagaaagaaaaacaaacaaaaacaaaaatcacctaattgcattctccaaaaaacaagagaagttgaatagcttgttctgtttcaaatagtaacaagtaacttacactggaaacaacctcagttctgccgaaacaacactatcactatttcttcatgtaagagctagtctctcttcctcaagttttacagatcaaaactcaggaccaagttttccctcaactaccagcaacctgcatcttccatccatttctttgggaatcaggcacattaatccaaaaacaaaataaaagtatctcatttagaactcctttcaaatcaagcagacttgggtttgaaccgcctttccttcctggctggaaagctccaggcaaatcacctgacctctctgaacttcatccttataaagtagatggcacggacttcttcctactgtggctggttggagaagtaatgtttgtaaagcatttggcccactgttgaacacacggaaatgctcaatcaggatgggcaccgtggctcatacctgtaatcccagcactttgggaggcaaaggcaggtagatcacttgaggtcaggagttcaagaccagcctggccaatatggttaaaccccatctctactaaaaatacaaaaattagctaggtatggtggcacatgcctgtaatcccagctactcaggagactgaagcaggagaattgcttgaacccaggaggtggaggttgcagtgagccgagatcgcaccactgctccagcctgggcgacagaatgagactctgtctcaaaaaataaaaattttttgttaagaaagaaatgctcgggccgggcgtggtgtctcacactggtaatcccagcactttgggaggccaaggcgggtggatcacaagggcaagagatcgagaccatcctggccaacatagtgaaatcctgtctctactaaaaatacaaaaattagctgggtgtggtggtgggcacctgtaatcccagctacttgggaggttgaggcaggagaatcacttgaacccaggaggcggaggttgcagtgagtggaaattgcaccactgcactccagcctggcaacagagcaagactctgtctcaaaaaaaaagaaaaaagaaaaagaaaaaaaaaaatgctcaatcaatgacagatatccttatggtcatttactctgtgctgttctgctgtctggggatggttgatacagaacttcaagccatattgcagttggtgtgtatggtctcctgactgtccagcatgacacagctaacactagagaacactagagcagagcccaatagacaggccctgctaccccctccccttgcacctggtgacagtgggtggtttgtagctgagaagatttggtctaaagtttcatagtttatgtgagccactgcccaattagctgttcttgctgtgactaggatggcaggcaagtaaaaacgtgaaaccagctcatataaatgctgggttgacttggccctcatcacatatggaatttgagcttttgtctgtgacagtcaacaagaccaaatttctatatgaaattttaaatacaaactctacagttaggagaaacaagcataggccatagttagtactctgggaggtgtttggtcttataaagtatacatttgctttctatgggaaatgaagaaatttttttagcatgcatgagactcctctgacagattgagaaaaaaataataataagatccctaaactaaggttcagtagtactatttttttgtgacaagatgctgatacagtgtatgaccccatttttttttcacagcaattgaaaaacatctccactaaaatatgttaacattccattttccactgaccagtttggcagaaaccaattcataaactgggtcaacctaagaagtgggagggttataggaaagaggctggatagaaagaaatattatcattaataagacagaagaatcaatgctgtttgggagcaaaatgctggttatataaatccaagaacaatggaatgaaaataaatggaacttcctctaatgaatcacacttaaattgaatctcttatttaccaattctgaatgaaagtttgtattaacagctgaagatgttccatctgtttttgagagacataataccaccttgaacttttattctccagccatgcaaaataatagatttgagatataagaagcttaagaatttggatacatttgaacacactctcaacactgttacaaattatgattatccagtttacttttaagtgccctttctttatggaagtcttgctaaaataagatacatgagagaaatcgatacagaaaattgtgtccttgttgccgtggcaacagccacacgatgtacacatggagttacacaagaaaggtcacagatgaggtaagaaccagaattcatagctgcctatggctactcaggaaagaattccaggcgaggcagggggggcaatattgtagctctgtctatatgcttcttctgttttgttttgcataaccttaggagactcactagagaggcctgccttgcttgcatggtggtgagtctgtaagaattcttcagcactgatttatggagctgaccacattttccataaactcaaaatgactccatccaggcatgtgctcatgaacaagagtcacaggttctgaattttttctttaaaacaaaacaaaaacaaaaatcacctaattgcattctcggttacattctaagttgcttcagacacatgttgacctcacagaaacctggcaaattttcctccttagttcctgtctccttcatcctccccccagctactccaccccagccctccagatgcagacacaagcccaccaacagagcctctgaggctgctgaaaggcctccagctcagcacagagcaggggctcagggagccagagcctagagccaccgcccttccctgggattggcacccacctcctcagaaccatccaagccccaggtcaggggtggcagcagggaacacgagtgttttccatctgccatcacccgtctccctctttttgcctgcggtgggctcatggtcccattgttccttggagcccaccaggaaatgcttgggccaacttaaaagggaaagtgccaaaggaaaccacctaaatagcaaaccagtagcacatctgattctaagattgttaaaatttactaagcacatggtgtcccctgctcccagtaggtagccaccacagtgctccttgtaaaaccaaacctcaacacaccatgcctccacttcagacttgcaaaaactgtgggaaaacccagaatccttagcttgatttagaaaggcaagcctttccatttcatacgctacttaccccagattccttcatcacctccaaatgggctctgagcacgtggaattaattgctggtcatgccctgaacatgccaggacattttgtgtctctgtacctttgctaggtttctctgcttggaatgcctttcccatcctctctaccgagtgaacctagcttggtaatattgttcattgttcccacagtttcctgtaaatacaaaaagttgctggccagactcatgcttgaaagggggcattgcccaagcagaacacatttgacagagcctaggtgagaaggtttggaagttagaacctctgtcccaggatggtccaggatggtccccaaggcttcctgcacagcttggccactctttgagttcagaaaatttgctcatctttcaagggcaaatggttgaaggaatttagaatgttctgagaaagaacgcttcaaggggtcatgagagctttttaacttacttggtccatgatgatatggcgtgtcattccactttgcaagctgtttcttatcacgtcaccattgtcaaggaataatctttccatgtcactacatatccttgaataatatcattttaatgaccatgtcatattacattgcatatcttccctttttggagattgattttcaagtatctattattataaatgaagctgcagtcagtatccttattgccaaatcattgtgcacattcacaaatgtttccttagaataaaaggtccagctttctactggatcaaatagtgtgcaaatttttaaagctttgatacaaatggccaaataattgcccttcaaaagattatacaaattaaccctcacattagccccctatgaaacgcccatctccccagatgctcctcaatattattaacgtacctatttgattgataggtgctaatttgtattttttattattactgaggtagaacgatttttttaatgtttattttctcgtttgtcaattggtttgacttggctcatttttccactggatattttagtgttggtttcctgtgatcattttcttaacccatcttcattcatatattaatcaaatgttttgaaagcctactatgtatcagatcctgtgcttgcattaagtatgtggtacttaatccttatgacatttaaagtctaaccatgtaatatatgtccaaagttttttctagtttgccatttaccttttaactttttagaaatatattcaagttttctacaattttacagtcaaatctataaatatttatgattcctgccttttgtttcaaatttagagaagcctcccctacttcaagagaacatacattttcacaaaaattttcttccacacttccaccccctcggtctgtttttgatggtaatgcgaattgtcaccttttctgcatcttcctgagtattttagtgtagatttgggaaaggctcctttggaagctatgggccatatgttatattaaatgagaagtcctagaaaattatcttgaatgccttgaagtggatgtattaatagaaagtgacttggatttactctgggccatcccattgaacagagctagccccataggtagaaacaatggggaaacaaatttcatcagaaagaattgaaggatgcaagtttcaacaacacaacgggctgccccagagactaatgctccaggtaactaatgttaccaaacacggataagacaaattaaccactaggccaggacacaggggattcctgtagcagatcaatggttctcaaacttgagcatcagaatcacctagaaggtttgttaaagcacagcttgctgaacccatgctcggagtttctgattcagaagttctggggtggagcctgggaattagcatttctaacaaactcccatgtgatgctgatgctgctggtctggggattacactttgaaaaccagtaagataaggaaccaaacaaacttcagagtacctctcaccctgagagtctggggtcctaggcaatatttctatactgctttggccaccaagccgccccttttctatatttctccatagagcacctattgacacaactggagaataactagtctaccttaaatctaaatattaagcctcagtgagttgtgaagaaatctcccatcttcacatattctgttcctagattactaatttcaaacacagaaacataagggaattcagagatcagagcgtggactccagtggttttcaatgtgtttgcacattgttatcacctagagagctttcaaggtccccccctaaaggttctgtttaattgttctgtgatgaggtctgggcacttataggatcacctgggaatcacaaagcctccccaggtgattctaatgggcatctaaggttgagaagcagtgaggtggtccaattccctctttttcactcagggcagcatcttctctttcctttttgaaacaatttaaaggcaactccccatgttccttcagaaaccccaagagtaagataggctgatcacactcttcatgggcttttaacagtccctttcctatcaggaagatggttaatctagactgaggctgccatgtcattgctactgcttgagtaaagaagatggaaaagagaaaatagaactcagcctcatatgtcttttctggatggaattcaatcatctaccaaccagcctgagccctccccagtcacttttactccaaatcgaactccatcccacttcacgtgctcccagagaacccactgggtttggatgtcatctgttttcagatctggcatcaggaggccggtacattccattactatctgcaagaacaaaatactaaagctcactcagggcttgttttgcaagcctggatctccttgcaaccagaagagacccagggaaacacacacgtaaatgtacataaacaatgtttgaaactcatctgaagcctcagaggttgtgaaatcctccccagctgtttccaataagggcgtgaggccagtcacatgggcaccatgtctccctactgtcgcagaggcgagaatagcctgggcaggttatcctccaggagagaggttatcctctgcccagtccttctaaagcagataagcctcctgtagcaggcctcagagaaagtgtctgcactcttgcattctctctcctctcttctctctccttcacatttcctgcattccctctttcttctaacccctttcctttttttcttttccctgttcactgccaatttctaaggcctgccatggctgctttccctcaacaaaaaccaattgcactcccactaagaatccatttctgggctgagcactagggatatccattagcagaggactaaactctggcttccaggagttcatgtatgtatgtatgtatgtatggtgtgcaagagaagagagtgtcatgcactgtatgaactgcaaatgtttacagaagcataaacccattcacagtaacttggggtaatgatgatctccattttaaagaacagaaattgaggctcagggaaaattactaacttttccaaggacacacagctggtaaggaggtctggggcttgaatttaggactttcagacttgaaagtcaacactagggattcctgaactccttcatgcattcaacccatagttgttagatgtcttctaagagccaatgagcactgtattagtgcttgatattcaagattaatgaatgagccctgtccctgccctcgaggaacagggacaaacaggaagctcccaaacactgcctggtgtgaaaggctctgtgatggagctgagcacatgaggtgtgggagctatacccaggaaaggcatctcaccagccttggagtccaaatgccttcttgaatggacatttaagctaagacaagaagggggaatggagttggggaggtagaatattctagtgacagggaagcttgcatacagatctgcaggtgagactgtggctccttcagggagacacaaggagcagggtacagaggaggacagagtgggaggcactgagaggagggactgtggtgaagaggaacctgagttgccggccgtgggagcctgctctgccagcctgacgaggctgtactccaccctgaggacagtagagacttactgcaagagttttaagcagaggcgcaatcggatgtgcattttagaaaggtcgcactggctgcagtgtggacatagcggcagtgagagaggctggcaccctgaagtgcagagtggtgggcaaggaagacagcttggattcacaagatattgagcaaataatcacagatttggtaactgcctgggtgtagaggatgagagggtagaaagtgtgaaggaggacctccaggatttggcccaagcgacattgctgactgtgctgcctgccattcaccaggatgaggacagctttgcgagggaagatgaggacgtcactttttaacttgtggagttcacagtgcctgtgggacatccaaacaaaaaggacctgcagcaggtcaggaccagggggaagcatgaaggcatctagggcaggaactctctgggttgctcactgtcagggttgtgtgaaagtagggacctgcgagtacatgcctccttaaattttgtgccctagacacctcgcatgcctcaccctagtcagggggcagttttgctccagtgagagttttgggctgcaggcaaagatctgagagtcattggccatggcagttgagaccaatgtgactagaggggaaaccagggagaggggtagagagaagaagttaagcactgaaccctgagggtcacatcctttaagtcagggtggagaaaagaaatagagcaagaagacgactaagaaggaccagccaagagaaagagaagttgtaagaggaaagtctggggtcatggaagccaagggaaaataatacattatggaggagggtggagtgtcaagtgatgggaaattaagatgcaaactgagagcaatcatctaataagattagcagtaaggaggttatggtgcccttagtgacccgagctctgtgggatgatggggttgggagcaaagcttaacaaacaatgggagggagagccaaggcagtagctggaggagatctagaattggaaagagttctttgtcttagtaagacttgagcgtgattaagtgcgtgtggcagagatccagtagaggaaggggttgaagacaagaactcactgttagactgcaggaactcttaggagaaggggttggagggcttaggaggaagtgccagtcctccttagtgacatgggttgtagatcccaggtatgagtgagagggcaggaagtgaggacatccctgtgggaagtgatgggctctgttctccctgtgatgtggctggaggagtggaggagctggaactggagctcctggaaacagccacaccttgggaaccccattgctcctatgctggcagcacttctccacattccagagtgaatgtctcaggattaaataaaatggtaggtataaataatttgaaaagatgggagcttattttcttcccttccttctccctgaaaactgccattgatttcagagaattttaattacctcttaacctgtaggaaaaactttttctcagaattattttatgttcaaaccagcaatgaccaaaagaaccaagttatctacatattgaagtcttacatgaaagtcgtttttcttgcacaataaacaattaagtttacattagctctttatgttgtgtaaatggacatcttcagaattcctatctgacaccaggtataaggtcccaacagatctggagggaaagtctcctgaccttttataaatttttgtaagaaacggatcattttaagaaaaaggaagaaaaaagagcaaattataggaaatgttcctagagggtgtgatttattctggcacagccatcttccctggatgtttgaattctctgtagtattcattcagttctcacccttggaagcctctcctttgctgtctcattggagggggacatgagtacttagaatttttggctgagttagctgaatttaaggaataaaaagttcaaaacactctctgtccacagcaaaaaccaactgtacccaaaacctgcaaagttaacttttttcagagatgttaaacccaaagttgatgctgcaaaatataccatcttgggattttttttgcaccaacttctttctcccatggtaggaactgtctctgagtaaatacgtatgaaagcaattgctatggttgagcaatcttcctctccctctctctttccccctccctctccctctcttccaatcctcacaatctgatccccctttttccacaagcattacacactcacattcacacacattcctcctcctccttattatcaccatcatcatcatcatcatcatcattttgtagcttctttcaatttcaacttgtaggactttcaacttcagattgtctcatctcccaaacagctgcaacaacagaaggtcgagtcctggaatcaggttgcaaatagcaaacagagaagtaaatgctaaggctgaaccagacagggatgggaataaagcaaccctgttcaaattctccgacctcattttttcccttccaaacaaaatcaggattgagggaggtagggattagctctagggtcagaattttacccaagtgtgtaatattttaggaggtttgctactttgtctaagcatgatgatcatgtctagccacttggcttctgcgggcctgctcctccagctgatggcaccaaaaaagatcatctcgagggacattcagcatctccgtgatgggcctcaattaagaatcatcagaatccatgctggtgggaagttctgttctggccagaaagtattgggttagattatagatggcaaaatctgacctaggaaataggcttttgaacagtgtggggaagagccagcctgctataaaacatccacacacacccatcttcgttcagcatctccatgaccaccccaactcaacctgaccctcagtctcggagttggactggcagttcctcataatcccagacccttcattttagaggcaccaaagctgaggtctggaaaggtggtctggagagattcccgagccctcccaggtccattatcttatctgttccccatcaccttcttactttatcctctttttaatataggaaagatgaggctcagataagatctctgctcttttcaaggtcacaaagagtgttggtggaaatggcaagactggaaacccaccagctcgacactgcctggctctccttgagtcctcaccccaggccatgagaggaggataagcatccagactcagccttatctcttgaggagaaggcagagttagtccttgccgcccaatcccttcccttcctgtcctcctacctcttcccacctcccagtacctttccatttttatatcctgcccaagatgacatacccattgatatcctcccacatggggctgctctcctgcacaggatgctgtgctcccagatcacctcatgctctccctgattccacctctcgctgcctcccactttaccaccaacactgtgtctaggacagaaattccattcatccagttaatacatcctgagctcccactctccagcaggcaccaagctaggcagtggggatttagcatgaacaaggcgagatccctgcccttgtggagtgtacactggagtggtcagaaaagatcactaaattacagctccacatggtagatagtatgagggggagtttggagttctctgggagcatagagccagaagatttaacccaggctagggcatcagggcatacttccaaagagaagagaccatttggctgagatccgaaggacaaactctcccagtgcagggagagaagggccgccttctagttggaggaacagcatgtgtaaaaggccagaagggagaagaactgagagaggacacacaggcctgcaaccagggagggtagggagtgcagcagcccccacctgcaagctccaccttctccagtctttgtccacccaaatccttcaggcactcagtactcagccaaagcccaagaccttctcccagtcaaggctcattgtctggcccttccttcctcctccgcttacagccacaaagtttagcaccaagttaattttaaccaatactgacttttcactccctgaataagttgtaagcaatttgagggaatgaaccatggcttttttttttttttttaactttccctcacagcactgaggacctagctcaatttgtttccttgtcccagggagtatggtttttttctgcaacctccaggccacagctgtttgcaaacttcataggaaactgcatttgagtcacaggcaaggggacatctgaatgaatcctccgtctcttaataaggagagagaattcacaaggtcttctagggacatgtccagataaaatgaggctgattaaaactttaaaacactaaacttttattataattgctattcatactttgtcattgccatttattaataacttttctttaagtttgtttgaaaatagaaaattcatttttaaaaaactctccaaggctttaccagtctcactttacaaattcgttcctataacatttgtttaatattagtgtttttccattttttttctttttggctgataccattgagagcagtgtcacgttgagaatccacagtgatgacagagctagttgtgagggtgctcattccattcctctagcattcagcacctctgtccatttctgtgtttgcccccagcgtctgaatttggttgcttcactgaatggtgtggccccaccagctgacacccaggcattgactggcctcaattactgcaacacctatgtttcaaggactctgtggccctgacttaagtacaagctttaaatgggaataaatcttttataagcctttccatttactttcctgcttattaaaggtgaattgtaatggaaaaccctaaatgtcacagagtctggaaaattgaaataataaggggcagcattctccttagtggtataactagtaaaagtgggcctaatggaaagtccaccgtggaatcatctgtgtttctatgcaacaaaattattttccttctttctctaacaagggaagtagttctgaccaacaaggttggctgtcttaggcatggtggtggagagcaatggaaagatgagtgtgtagtgggagcaagcttagcagagttcctgaagccattgctttagtgtcccaccacatctgtaggcctaggggatgccatgcagtcctccagagatagccaaggaagctgcagagctgaggccaccctctgtgcttgtaaacaataagcacaccccccaaaatcaggaataagcccatgagaactgcccatatcccatggtcccacagcacctcatcagctgcactagtgtgttctgcagtagatccactgctggtgggcctcaagttgcaaatatatttagtaatggatcaaaatagaatctcttagcaaaaactggaccttacaagcaatttgcatcaagtcagaaacccatacatctgtgtcccacagcaggccacccttaagcaacatgaaggcttccaaaaaggttaccctgcccatatgaaaatgccaattttatccagcaacattgctgtgttttcaaatttctgtagacgccaatgctgtaatgaatgttctgaccctcagggtgtcatccacagccaggctttgtgcctgtcttttgcaaaacttacccaatttctgtccaaaaaaaaagtccaagactaggtcgatagtagatttatgtgtcaaaggagaacacatagactttggataactttactccaaaagaattctcttgctctctcaagcctattctgttaataacatgtttagttctattcctaagtttgatttttttatggcaacagtttgactattgaaattctttagctttgtaaaaccatggcacaaactgttcccccatgaaaaaacgcagctttccataaggcttccccagaaataccaacattagaatgggggatgtgatttgactttttgtgagtaatcttcctagcactgcccgaagagagagaaaaagagagagatgcagtttcacgtacagttttacatgtagtaaagcatctgtggagatcagaggataaaaatatttccatgacaggaacttaaaattttaagagaattttcttttaagctcttcactggccagtggaagagttgaccatggctttttccttcatgtgtagaaaaacactaggcaacttggtagtgaagcaggatttttctcggccaatttgccaactgggacctccgctggcaacaccccccacaccccaccctgtgttatagcttgtacccacattcagcggttcccaagctcttgtcccacatccaagaagaataaagatatgctgacaatttgaaggtggagaagaattttattgagcgacggaacagatcttagtggagacatagtcaggtggtttctctctcccccagtgtggctgagtctggggctttttatgaactcagaatgggaagtgcatgctgattggtttgtgagtatgcaaaaatggttaaagcaaagacattcaaaggtaggcacaacagtgtagaaaaccaattaggaaagggtaggtatatgtaaaatagataaagggtgggatccatcagaggaaattgtgtcaaaaaggaagaggggttctcaatccggtctgtggatttgacttgtagcttggctttcaggctttaaattcttttcaacttggaggtggggttttgctggggacccacccctgtttgcctaggcatttgtctgccccctgctgctgtcagtgggattacaaactgactcacatttttaaaaattgtggcctcccttcttacccccacaagtagcaaaagatgtttttagatcctgaacatctcaaaagtaaaatctagagctgactatccaaaaaggcagccactagtcacatgtggctattgagcacctgaatgtggctagtgagaaatgacatgtgctataaatgcaaaatatactctggattttcagggaagtaatatgaaaaaaagaataggaaatatttctttagtgatttttatattaagctgaaataacattctacatatattgggttaaataagatatattagtaaagttaatttcacctgtctctttttatgttttataaatgtggttactagaaaacttaaaaggcccatgtggtttatgttatgtgtctgttggacacgctggtccagaggactggtctggaagacacttgtgagaagggggaatgacatgatttccatacaggccctgagttcttcaactattttggtttttattcacagtaagaatttcagaaattatggatctctgccctttctggttttctattaggtcagctgtgactttgcctttctgggccaattcctatcccaaacttcttatttttaggcagaagtcctgcatgctctaagccagcatgttaggtgtttggggtgttttcttttgagatggcatcccattctcttaacccaggctggagtgcagtgtcactatcacagctcactgcagccccgacctctcaggctccagtgatcctcctgcctcagcctcccaagtagctgagattacaggtgcctgctaccacgttgttttattaaagcaaacaagcattcaaggtctctctactgcttcttccctgcaacatcatcacagagaagaacttgcatcctttaaaaccttgttctaagtatctgtacatttattggattatctgatctactttatctttgaaaaattcctgagaagcaaatattatcctcactttacaaaaaggaacctgagttgactagagcaataatgatggttcatgtttgacgagagccatataatttacaattattttctaatatatttattctgaccctgtgacacagttgttcccattcctgttttacatactgggaaattatctttacagagggctcgagtgcctgtgccccacagctgataaacagaggaactagcatttattctttcaacacatgtttatttgttgtgctaaacactagtaaacaaggatatggtcctttcatggagtttgtatcctaggattcacagcacccaagtgttaagtgctctactaagaatcaaaacagtgtgatgagtggaaagacaatagatatctaggctgcatggtgggaaaagccctctctaaagaggcgacattgaagatgagatctgaataacaagagggagctgctacgttaagatcaggggacagcagcaggcacaaggcctgcaaggctggaaagagcttggcatgttggaggaactcagaggccagcggtgatgggtgggcagtaaggtcagagacagcaggggagatggccatgcaggcaggcttgtaacctgaggaaagacatttggattttactctggatgtaacatggaggggagggcttagcaggggggagacaagtgccctagcatcctccacacttgaatactgcctgcctctaattaacattctacaaagatgaccagggatgaagtgggaagaatcagttatacagagaccagagtgaagccgggagatcagtgacaaggttggagtcccggatgagaggcgatggtggtagatgagtgtggacccagtagaaatggtgagaagtggatggagtctgaagttttttggagataaagccaatgagactggctgatggatggcttatccctctttacacctgactgtccctccagctctcttcactcctgcagtgtccatccaaaaacactctgcccagggaaatctaatttctgttcaccccgtaataatgcccagaagacaaaatgaaacactgacagattgtcattatttatcacccctttgttttgctttgttaattcattgtcctgcctagctgttagcgtcttaattgttcatgttgacctttagaaacacattcaaggtgaataaggaggccttgctatattccaaaatcgtgtcagtgggaataaccaaaatgattttattctttcactctccttttggctggcaggaagatgagctgttcacatattcatatgacacactaccatttgaaaaccaaaaaaccagaagcatgcaatgtcatatatgcagtcatcggcaaatgtacaaagcaccctgcagcacagcatagttacacactccttagtagggaatgggggaggaaaattgtacgtaagaaccagatgttggctgggtatgctggctcaggcctgtaatcccagcactttcagaggccgacaggggtggatcacttgaggtcaggagtttgagaccagcctggccaacatggcgaaaccccgtctctaacaaaaatacaaaaattagccaggtatggtggcacaggcctatagtcccagctacttggcaggctgtggcacaagaatcacttgaacatgggaggtggaggttgcagtgagctgagatcgtgccactgcactccagcctgggcgacagagtgagactccatcacaaaaaaaaaaaaaaaaaaaaagaaccagatggttgtcacaaagtgataatttgtttgccactggcagtaagataaagaagagagagatcttgggtggaagtgacaagccagaggcaagggctggtccgaaaaggctacagagaggaggtgttacctaagattttccttagaggataccctcgggctctggttaaacaaggagaaacagggagggtatgagatcaaaacaggttgccagtcagcaaaagtttacacatgcatgcatatgtatatgcaacttcttctccagccagtgaaaacattttcttggcatataggctgaacttcattaattcccaagggcaatacatgctgtcagtgctaaggaatgcaaacccacccttcttcacttaccagcacaactactctcttccccagaacacagagcgggatcaactgtgccagcaggtgttgggcacatctgtgtagactccacatgcatctctctctgacataagggaatttttactcctacacaccaaagaactacactcccttaaacaccttcactggttcccactgcctgcccacacaaggtgtgttttgtggaataattattctgcagctgttcataggtgtcaaatacatttggaaattgttgcacttagtgttaaagagggctttttctctgcaggacttcaaagatgctttaataagccaacatgcattgggaatctccaaagggggaacatacgcagcatttcccaaacttgtaaattactgatctgttttcatagagcatcacttgggactaacagtctgtgaaaggcactttgggaaatgcgggactgactaagaagggcttcccctagtgccctccacagtcagacgctgcctgcttctcaggagtcctgcacaaggcagactgcccccaagacgctatttcagcctactcaccatatgtattcccacctgtggacctctgctcacaccacccccggcccaaattatgctgttccttctcttctcattgtaagtcaacccactcctctcgttgtaagtcaacccaagtcctttcttctctggaaagctttgctcatccctaccaggactggagatgccttgtgcctcagaccatcttaatattgctttatgtcacactcatttagcttttgatagctggcttctacctctatctctaataccttgcatatggtagaattagtaaattctttattaaagaagaagaaaaacaggaaggagataaaagaggagaatcacaaagaaagaagtaggggaggggaggaggaggatgggaggagtagagaaagagaggagaaaaccagggaggtgacagtgggaaagagaatttcacaggaccttggacgtggtactttgattgagtgtaggtaagaggcaaagcccagggagcgcagccttgagtacttagtggaaaagaagatccatgaggttctgcgtatatgaccatccaaggcagctcccaggaggtgttcctggcaccatgccacacttagctgcagggcagtgcccattcataaggtgtcagctctaaccagtgagtgcaatacctaagagcaggcgcagactgtgaccccttaacctaacctatgctttatgataaaatagatacatatttatatttgtactattcagaaaacagcatatgtatccatttcttgggggttttcttgtaaacaacataatacaatatccagttagtactgaggtgtttttgagacaaggtcttgctccatcactcaggctggagtgcagtagagtgatcacagctcactctagccttgacctctgggactcaagtgatcctcctacctctgcctcccaagtagctgggatcacaggtgcatgccaccaagcctagctaactttttttaacatggggtctcactatattgcccaggccagagtgcagtggtgaacatagctcactgcagcctcaaattcctgagctcaagtgaccctctcacctcagcctcctaagtagctaagactacatgtgcacatcacctttttttttttttttttttttttttggtagagagagggtctcactatggtgtccagtctggtctcaaactcctggcctcaagcaaccctcctgcctcagcttctcagaatgctggtatgacagacatgagccaccaccacacctggctattactgttaaacaaaattaataacatacaaagtgcaaattatataaccctaaagcaatcactgtcaagagacctaccactaaagccagtgccttcgtttcacagaggaggggcctaaaagccacagagcagattgagctgtgactagaacctcaaatctatggcctagtgcactcactacatggaccatctgaagcgctgcttctcatggctgggcagcctataatctctttgtcagccagatggccagttgcctgagatgggagacacaagaaacattcccacatctgcttcctgcttttaactcacataaaaatggccagtcggtttaacaaagctattttcctaaagggaccagagcttctattttttctgtacatttaaaacgtgccaaacaaaatgacacatgttgtcaacaagatgcaacagatatcttcccacaaagcctcttctttgtaagctgtcatgccagttctgttgatgtagttaccttccgcaaagaccagcggtcttgccagagctccaccctggaaaagctcatcctgtggaagcacagcttggtggggtcgccagactcctgtctctaacacactgttaaatgcctagatgtatttctttcatgcttgtgcagaaattccatttcagagtgtcggggcaacacctaagtcagtctcccacatgtgggtcatggaaagagccagggcctggacgccaggaggcctgggttccagtcaacattccctgtgacttttacaagtcgcaagtggatgaccatgcccccattgccagcagccttgggacgtatgtgggggcactaagcataatgggccagtgtggggcatgggagggggtcagcccagctgctgtggtccctctgccagcccccagggcaacccacagccaggcagtctcagccagggcaggacaggggccagggccagagcagcgcctccacactgagtcacagccagccctgtaggagaaaaacagctgaatgtgggtgagaacctgaacatccataacagcctggtccaggagagcatttctgggtcctgtgaagaggaagaagagaaaatgatgttggaatccccaggttaaggaaaaccaagccattccctggcctgcaagctgtatcacttcctctgtaactgtttctctccttctgagcactggtacctggtttgtgggacaagaagacaagtgacatgatcaaaacaaagctttggtttgtatttccttctactccttgtaaattttattcattgagagagatttttctcctgccaccacatacagccatggcaggccctgtaactgttcagtgtattcttaggctataagcaggtccaccctcaaaaacaaactccaaattcagtcatagaaagtacaatccgagagattaatcaaaacctccaacttgagccagggtaaaccttccttcctcccccagctaggctaaactccaaccccaccctgtgaaaaggcaggatgaggttgtctctcccctgtttctccattttgctcttctcctcctagtccccacccaagtctgttagccaatttcttacccctccttggtaggggcaggtgagcagaggtaggagaaaaagtagaccttccttgaactagtcccattataagctggtctgtgctctgtgggcccagcctgtgtttaacactgactctcttttttcccctggggtgctccttggagctcttttgggatcttccttccagtagtttccttgacacaggcagatgtttctttattcccagtgtttgcttgtggtgctttcatagcctctgggtctagcagtcacctccagcttgttactgccgaagtccctctgtcctattacatagcctcttggacagcatccaagatgactctgctctgcacttcctctgcacgacccacatctggtccacaagaaagacttacaggacgcatggatgggcgaacccaattgcagcccctccatcctgctgcacaggctgcctccactttctcagacatgagaactctgtattcgccatcttcagggaacccattccaagctctccaagtagccccatggggacagcctcactgcactggaggggaagcccagggaagccctgatgaaatctctactggaagggtctctggagactcacagcacagcaacttttctctccaagaaatcccttcatacatccttcgccctacccaggccccttttatagccttcatctggctgaagagtccaagcatcatgaagccagtttacagatgtttccctattaggcaacttattagaatatcttacagctcagagcatagtcaaaacttccattttaacattcattacatgcttatctcagattttaattatccacccatttaaagatatgccccatggggcatagacatcatctggtttattcactactacatcccagctatgataggcactcagtgaataattattgaattaacaaattaatgtttaagtaaagtagcgtcccctcctcagcctgcaagccatatgggagtgggaactgagattatttgtactcaatatttgcccccagtagagtctagtagaatgctggcccatagtaggtactttaaaagtggctttgaaaaaaattaatgaacctgggcaaaaggccacatttctctaggtaagattaatggaggctctactgacccagagcctctctcccattcttcttcaaattcttcacttggctacattgcttaaaactctgctaatcagatattctatcagttcaaagcttttttaacaacaaagatatcaccactgagaaaatggaagccagtcatttacacttaagaagacaatttgatacaaggaatgtacaggaacactgtcaggggcctgaagagtgctaggaggcacttaagagaaaggagatggcaggcccagaggtgggagctcttttagaggcttgccagggagaccgtgtgtgccaggaggtgaaaaggaagtggcagacaaaaccagtattttttagagtttgcctttagcaagcttccttctacacaatttttaagaaccaattaatttttagagctagaaggaaccttttatatcatcagattccatggcttccaaacatttttgagccaaaaaacttcttctttcaatgaaatcttaccagaaagccaatatgaaaaacaggtaagcggagataatctggttctagataggtggttttaggtgggttctagatgtttgggctgggaaaccaaacatgcacatacacatacatatctattaatacatacatacacacatgcatatacatacatatacacacatacatatatgtatatacacacatatatacatgcatgcacatatatacacacatgtacacgcacacacacgattttctcagagtagtcttcaaacctccccctcagaatcactaagtgctcctgaaacacagtgtgtccagatacaatgaaagacccacagtcatcctcacccatcaccatgtcccagagactgggctccagaggtcaaaagaaaatgaaagacactagaccctactgctccctccccttgatcaaggagcaagaccttgtcccctccacttcccaaactctttgtctattctgtaaatgtttgcaaatcaaagaaagagccctttcacgggaccactgaagacttcccccatgagtttaatactaccaacaaatatttactcagttcttcctacattcttgacccgtgtttggcactcagaacaagtgaccattgtcattgctaagttaaccagcactctctgggtgctgcctgttcaaccttctctgagccatctcaattgcagttaaatatcccacatctttccatctttcccctaaatgtgctttgagacactgtgtgaactgatctgctgaaatgcagataaactacatctgtcagcccccatctatgaatctagtgagacttgcaaaaaaaatgaggtttggcacaattcgctttcggcaaacctttgctcccagggatgaccactgtttcctgtctttggaacttataagccatctgtttaataatctgtcctagcttcctgccaaggactgacatgcatctcaccagtcagcagttcccaccaaaagtgcttagggcctcagggcctcccatccctgctgctggccagtgtccagctcacacaagtggccccctcatccctaatgaggccttactggagaggatgggccactcgcctattgcaagtgcacaatgtgaatctgagagttcagtttcgtgtaattatttctgtatcaacaacatcaactcagggctcaagatcacctaggtgagagtgtaagaatagagactttccaattagcagagctaggtttgaaacctaaccccaccactcactgtgtggttttgactaatgacccactctgaacttgtaaaatgagcccatgggagctcatggttgtgattactaaatgcaatatagtgcatttagtatatgcaatattgtgcatgaaatgctcagcacagtggctggtgcatatcagcattgttattattaaaagaaaatacccttattaattaactactgcaagtcaggggtgggaatgggacaaggagcaggcctgggtggagggcctgtgtgtgaggggactattcataggtacccagttcaattctttttctaggcactagcggtatatggaaaagatcctcttccctgtagagctcgaatttcatggagaagaaattatgagagaatgtctgtctcctttcagtcacctggcttgtggatttgctatccccaggtgaaaccaaggccctactggactggccccaggctgattcctggaggaagctacttttcagaggggcacacaggttatctcatggacaggttcttcagggtgtcttctaacccccagagatctgaggacaaaggattcctatcatctccttgagcaactgttaaggaggcagagaggagccgggtggaaggtcctcaaatgaacaaggtcaaccaagcggcaaaggttctaacagttcattctcctggccctcgtgtgaaaactgcagaaaagtcaccccatgcctttgtagattaaaattaagctggcaagattcagctgtagtgggctttagatggtctgggtcactttctgaagccaatttcttttaaaagctctcaagctgaaggcaataatactaaatgacagctgagaattttaagttttattttcagttctggaaaaaaagggggggatgggtatccctttatatttttatactgaggacaagtcagtagggagatttcattgtgttgtcggtgtaaaagtaatcaactcagtgtgccatagccaggaattcaaactgcttggaaaatgcaggtgtagttagcccttttcactggaaaatacactggacagtgacgtgggtaggttaagagcagagagctgctgggaagatctgcagaaagggcaaggttgtctgccacattccttcttcctaaagcacttatgccatctaggtgaaactgggctgttctaggaggggtagtacttcctgctttaacactaaccaacttgaaaatcacactgggaacaaaaccatgacagccaggaacacagcaccagaaggtgaaacccagcccagagtatgtagccgctgtaacttacagcattaataaaaggcttacagaaaaccaaaggcctattaaatatccctgccccacctagactcaccacttaattggggtgggaagcctcaaggcagaaggagtataaatggttccaaaggccggagcgactttggtctgaaaggcccaggtccaattaaaacaaaccaggagccttaataactgctccgttttgacatcgggaaacccactctaaattctgtcaatggctatgatgtagagattttattatgattattatttcatggacttaatgaatgcttaaaagaattaagccacgataagacccaaggtcataacctcctcatccaccacgaaagggcagcttgccccagagccagcctcttcttgggaggcagtccccaggtccctgggttctggtggtcctactatttgatttggggttgatttagagcatgcacaagcaaaatgggctgtaggcccttgccgtgactgtaaaggcttctgtgtgcgtagtcatctcctcaacctgccagaaattccccaaaaggagaaaggttaatccctctaacttaaggaattttagcctaggtaacatcacagtgtccaccagaaggaggacacacacacacacacacacacacacacacacacacaccctactgatgaaaattaggttatctatctcccttaaccaactggctatgagtacatcttgttcttttatgcattcaccatttttttgtattgctaatgagccacaataagcaatattgagtatttcttactgagttgtattgagtccttcaccatgagccaggcactatattatatgctaaacaagttcattttctttgtgtatcacaaacctttctgattataagcagtacttattaagtgttatgttatcaacgtatattaaaatgacaaattctcttggtaatcatgattcagtagatacagggtggggttttgtcctctgtttttaacaagtggcccaagggatgcttatgatcaagtcattgtcctagaaagcttcccagcttgtccgaaacctcttgactgaagtgcccacagactcctccaccatcagaagggtcccctttcccactgtgttgagccctcccataagcatctccatccttcctgatttttttttgaacaggcttttagctgctgaaaagcaaaataataccctcaaaggaaagttttattggagggaaactgtctcaaactgcagacagtatctttttgcattttattaaacctgcagagctagagccatgatttaaagcaatgggtggccaagtaacttgaagtctattttagttaccatttttgttactgatggttccacctactcaaaagaaaaaatagtgaatagaaatattaatataggaagccaaggcagtctcatggctgcaaagaaacattggttctgtgccctgaccttcctctttgtggctcagattttccacctaggggagggtgatttttgctctctcctcatcatacagagctgctgaagggatccttaagagaaggctcttctagactttgagtttcctgaccaaaattaaaccgttgcagttgtagtatctttctcttaaagtgggtttcctcattcaccagacattaccattagagcctggagtgatgagaaatgtctaaatgtaggtaaatagacaaagacttccagagttttcccatgtattgtcaatggggcaacaaggcattgccctgaaatctctgggtgtgtgacattaagattacagcttgtatgtagaacataaaaggcctctttatactctatgattatgaattatgataatctttcttaaagcaagtatgtatatattgttatttattctttaaaacaacttttcaaaacatatattctctatctcagcttaagttgaatgtacttcttagaatgaatttatgtagcaagtcaactctgctctgtgcagacagggtcagttgtcttctctctgagcagattgttgggggccaatcctagctaactatgaaactaaaggatggaacagttgacccctggaagtccctatgctccagtgatctctctccgtgtatcaaatggtcttgaaactcttaaaaagattgttattacctcaaatagaaagggtgattgtatttgatatatcctgggaacactgctcgtatgcaccatcttaataaaatgaaagcctattaaataagacatcatttaaggaatagaggagatggatggaatgccacagaaaaatgtaatgaatattcatttatagattgagaagtggaaacatatgggaaggcttgtttggggtttttattttttgcaacaatatggggctcttaaatgacactacacatttataacagctacctgttgaccaagagctgtaaagggactctccaattacagaggagcagagcccagtggatgctgttcctcaaaatagtcatctcccattgagatctatttaagaatacctttcaaagagtatctttacagttttatgcacctaaaatacagtaaaatctcacataaggagatatcagagttggggggcttattagctcatatactgatacaaaagtttatttcttttcagttctccagattaagccccattttgtccctatatcataattcagctttcatttgagtgagagtaaaaggggatctaagaataaagtaaaaataaaagagactcagtagcatcttagttctgagacccagagaccatttaggaggctactgtaatgtcaggcagaataacaaagcagaaggtggctgggggtgaccctggagtcactggatggtgaagaaggggtggagttctgatcacagaacaaccagagagagactctcagtgagtcaattaaattttgcctaaacttagttttccccactacaaaaaaaaaaaaaaaaattcctgttgcatcacctcaaaataggagatccattgaaatgtgaaaatgatgaaatgtggaaataaatatgtactttgcaaataataacaatggctgtgtggagttagtgagcccaggattttctcttctcttttttccatagagtttttagtgcctttaattgcttttatttaataaaagaaatggtaatttaagaggagagagagagaagcagatgtgagctttaagggatgactatagaaccagatctatgatgtctgagctagactccttagcgggtttcggaaaaatgttccagcccattaattcaaagcctgagtgaggaggtgtgagtgactggtcacaccaggacacagtggttctctgcagtggccacttccgctgacattacatccaacaccaccatcacttctgtggcccaggtctcccaggacactcatttgcaagttcaccattgttaaaaatcactctcctgtcttcttgtcattctccttgtctagtgatccccaaggtttctggactcagagctttggtatgaaattcaatcttcacttagtttacaatttttttcttcacccagtgacagtgtgatgaggtaatgttttctagcagaccggctcaagatttgaacctttaaaagtgaaaaacattgagagcttaaaaggccagtgttcaatattccttcagtgattttaagtggacagtaatgtcttcccagatattaattccagagtgacagaactatcattgtctccatctgcccccacagcaaagttgtagttagtcattctctgtaacagtagtaatgaactctctagttataaacaagcaacccaagaaaaatttcatttccccagagaccatttaggaggctactgtaatatcaggcagaataacagcagaccggaagggggctgggggtgaccctggagtcactggatggtgaagaaggggtggagagcgaaaagatgctggaggaggaggcatccttatccaggttgcctcagactcctgcagaagggacccagccccagcccttgcatatcaagaagagaaactcagaggactcttctcattcacaaggaaatgttctgaagctgtgagactctgacatttgtggtgtataaaccactttcgcatggcccagaaccttctgtgaggttccattctgcataaattacagttttgtaatcactttttctaactgatgctttttgtgctctttaatgtgcattcagatatgaggggaggtggcatccttttatttatttaaagaatgcacgtctttatgatttgccttcagaaagaggctctttactatcagcatgtcccaccttttggggaccctgaggtccagtgtggagaagcaaggagctggctctcctccagcctggagtagctgtgatcagcctcaagtcacctctactcagaaggtccccagaggcctgtgcaggctggcagatggcccaggacttgagatcacttcaagtgtgcatggatagggaggaaagctatacagactcatgtgacctataacttggacattaacagaccaaaggaaatgccatgccttactcagagccaatttctctttagaagagaattctaaattctaaattctctaattcctgtgtcactctccaagtcccctgcagtcttcctcccattgtcttttctcttttgtttggtaacttttctttcctacgaatttaccagcctgaagagatgaaagtcctgagttttcctacttccttattacacaaatggaggaataaggaaagctgttgttggaaggatagcactcagtagatgagcaaagcaactcaagattgtctcctttagctccagtaagtttgatccaaactgggaggtcaccgatgaagcttagatcaaacaagggccaacatcattgtcatcaacaccatcactgtcatcatcataatgacaaaaatgacccaaaaatgttctaatttttgaggaggtttgcttaaagtgaagaaggttttaatatcttcattgtgtgctagattctttaaatcagaataatcaaactgaggtgttaagagaaagaatatcagaaaatcaggcaagaccttgcttaaggaaatatgaattgcctaaaggaggaaacggctaaaaattacagatgatttgcttgatctcgaatgtaggtgtatacccaatttcagttaacctttgggtatgtgataagcaaaaaccacacctccacccttcccttagagttttcaactctggcatataaactgtgttctcatctccacccggtcctgccaatgacaagttgaatgctgtctactataactgcatggccagggcccctgagtagcatttaaggtaatagaaaaagccagctagtgtgccaatagcctttgagagatgacctgtactgatacagattccagtttatctttggcataagccagccaaaaacacaaataggatctcctcagaagcactttcaaggcttacagactgggaattttccttttgataccatcctcatcaatcgtcagattgtgtatgatcattatttcagagactcaaaccagaagtaatgttcatgtaactaccaaccttctgaaacagaaggttgagatcactgttggtttttgttgacagaagattgtggcaacacactttgaaagtaggcgaaaggtaatccagaaggtaatcagccgtaaaattgttctgtttatgggaagaatgaagtaccatgtcctgctgctgctcttcactttagttttatcaccctttttcctccctattccctttccctgccctcaaatctctacctccctgcaagtgccctacttccaagtttcagaacttgggcttgcattccattccatccctagggagagagcctgcagggccccaccgttgctcaggccctctcttgaccagagcataaaggattggcagacactctggcaggatcctgcacagcagtcttcagatacagctgctcttccatccccaaacatgaaaatctgtggctcctggcagcttggaaaatgtcattttcccatgaaaatgacgtaagaggcagaagagtctcaactccactctctgttacaaaagtattcctcctaaaatattaatatttgcgcttagtccatattataccatgtgactaacatatgaaaagaaatcttcttggagattaaacaagtctctcttgggctcattgcacagtttggggaggtaagctccaggtcagaagctgcctggagacatctagagtgtcaccctccctccgttttctgtggtgttcccagcctatgtgaatgagctcatgtgctgacctcctggccagcccctctcttcccttctctgtagtgctctgcacactttggtccttttgcctccccccattccctcaaaatttgacattcctatgtccctttatcccgatcaccaccactcaaatttcacagtcccgagcaccctttccctggcctcaaaagaatagatctttatgctggctaacccacatgttactggatgccagtgtccagggaatttctctcctgggtaacactctggcattttaaaaggagtctccatgagatgcccacaggggatccctaatgttgaaaatatcagactgagccggggacagtggcatatgcctgtagtcccagctactcgggaggccaaagtggaaggatcgcttgagcccagtaggttgaggctgcagtgagccatgatcatgacaccgcactctagcctgggcgacaaagtgaatttaaaaatttattttttattttattaaataatttaaaaatacatatatcagaccaattggtagtctggacatgtccggggtgcagagagtaggaagaagacacctcaaggcagggaaattttggtgttctgctcagctcgctaccagaggcactcattaacctcatgggtaggggagaagcaagggagatgggatgcaggagagaggcgagctgagaaaaagcaacaggtttagagaaactgatgatgcaaacccccaaactccctctccagcttcacaatgtagttctttagcctcttcagggagcttatggattgaacactagcaaatgttgggtgctattccagagcttcttttaggccaaaaccaaataatatgacaaagtccctgccttcaaagaaagaaggctgaaaggcaagaaaggaccaggtgggaattgtgatggccggaaagaggacaaggagtattgctgttactattgggctttttgcttattcataatttcaaccactgcatagctaagactcccagaaaatcagagtgagctgttcagaactgcagtgtgtccccacactgcctctccattgcattcctctgcctcagtcccagccacatctctcagcctcaagaatcctgttcctcaatgagggggttggtagccatagctcgggggagtgggccaaaccacgagcacccccactcattgcagggtctttggagactgaacagagattgttcttactaagcatgaggtcacctttcttttcctggactgtctggattcacagagtttctttgggttctctggctgaattcactccagggctgatctctgtgagcagcccctgggatctagctcagagagactcctccagggcccagtcctcatcccctgtggaatgggacctagtgaaagaccagtcaattggggaaggatgtggagcaggtcatgaggccggaggaaggcaaaggtcaagctagttccaaaggcctcatcaagcggtaggaaatgggagagcctaggagccaaaatggtggttgagaagtaagaaatgctgcaagccaggagcagcaacaaaagcagtgagaggaggctgagaagaattcgggagtcagaggcccatccaggtacttggggtgaccttgttatcctggtaagggtttgtgcaactaggaggaaccattgaaatagaagaaatgaagtagaggtcataccgtttgtcatctctccaagtggagctttctgctgagtccacttttaatgaacaaataaaattcgttggtaattagcgacattctttatttataatccaggtgctgaaatccccccaaagctttaccctgcctctttccaaaagatttaacatatatattttttttcctcttaaagattcctcttacagtctcaatatgagtccaacaaccatttcttcccagatcatacagaacacgagctcagcccagcctggggagaagtatcacagacatttaattagtgcaggctggattcgtgaagcatttcgtgcaccatgaaaatggggcattttgatactggctcatggtcttatttcagatccaacttctacatggtcttgcaattaggaagagtactggggcccagtggaagcctgaaaacagttttgaggttggataacttcatgcttttttttactcctaaatgaatcccagattttgagtgctgtaaattttctgtttttctgtctgacatcagccagaatacttcagggttttgactactgtcttcctttagttttatctgagaggcactctggcaggatcatggcagcccttacctaaaaagcagataagtccaggaaacagtccagaggcttctgggagccagctgggcaggtctcacctcttcaaaggtgggcatccaactccatggtcaaaaagtaagaggctgcccaaagcccagcctaatcccagaagatcaccacaagagcctaccacagcaccccaaatgcccagcactggggccgctcctttagaataaaatactgtcatcagaaggttcctttcttgaattatattatttaggttagaagttcagctgacctaccaaaagcccaaaataatacaagcttcaactatcgaacttttttttcccctctcacatataactctccgggaataaactgtccaggatcaacatggcagctccatgctgtcaggtgcccaggctccttccatcttgtttctccaccaccccaagagtgtggttcttgtcagcatagtccaagaatgaaaagggttagggtgtgccctttaaggcacagcttagaatttggacatataatttctgctcacattcagctggccagagcatagattacatggccacaccttgatgcaaaggaagccacacccacctgcaatccttgcaccacactaggtcaagctcagcatcatttactgcctcttgaagcagcttttgcaaggaaggctgggaaatgtagtcattgctggctggtcatgtggccagtgaaactcaggggttctactactaaaggaagaaagtgaaaatgcatatgagagacagttatcaatctctgtcacagtatatttttgtgtctatggaaagatagagcctattaagaaataaaccactatagtggacccagcttgtggatctgattagaggtttgtcccttagaaagcacagaggattataaggggagaggcacataggacaagtaaattatgattggaaaaagggatagggatacacaaggcacttctccaggaagggttgctgcagggcactgaaatcctaaagaaggaagaaatagagacatggaaagctggaacagaacaacggaggctgggtaagtgttgggacccgtggaaacttctcaaatgggtaatattactggtggccaactcttttcatggctatgcttcttgattcattctgccctagattcattccaatctaaaagcacatgttgctcaaaagaaagagcatagagtctaaacagacctcgatttatatcttcactcggtcacttacttacagagatagcctgggaaaattacgcagcccctgagccatttctacatttttgaatcaggataatggggatattaaccaatggtgcttttaggagaacaaaatgagttgatgaatataaagcagctagtaccaagcctggcatagggtaagcactcagtgagtggcatttgggattagtatgaaacttttcactccataacaaacaacttgtccctcaaatgaatacatatgagtagggggcttggccagtgtgacaatgttgtgggataggaaaaaggtgcatgtgtgaagtgctgagaacctagcagacacctacccatttaggatgcttctcttagtgtgctcaggctgccataacaaaatactatggactgtgggccttaaacaacagaaatttattttctcacagtactggagactggaggtctgagatcagggtgccagtgtgatcaggttctggtgaggcccctcttccaggctgtgtgctcacatagccatttcttggtgcatgtgtgagtagaatgaaaacaagccctgtgggaactcttcttctaaggggaccaaccccatcatgagggaggcaccctcatgacctcatccaaccctaagttcctcccaaagaccccaccctcaaatactatcccactggaggctgaggcttcaacacatggatttggggagacacacacattcggtccataacagtgccactcactggcaacaatacaggaagcacagaagcaaacttgttcttttttaaaaaaattaatattccattttggggaaaaggtgttgacagctactggcataggaaaagaactcatcctgaagatggcattcctcgattggtgcaaaagaagaaaacaaaccttcatccatgagcttgtatatatggagcgggatgatatcagcgctgtgcaccagatgaatcagtaatttttacattttcacatccaagctaaatagtgctcttgaccaaaaaatcttagtcggtttatcttctggcaccaatatttaaagcaaatacctcaacataaataaaataataaattgaaagactatactaattgtcgttctaagtagttagagtcatttaactggggacaggaaaaatatcctcaagattcttaacaggtgagacagaaagggcaagaaggaagactctaaataatattagttcatcctgggtcagactttcactcactcagcatgaccatgccatggtggttttttttttttttttaatcttagaaaagtgcattaaatctaaagtattagtgagacccatccaaaatgttgattaaaaccaggctctttggagaagtaattgctacactgcttggcaggacccaggagtgtacattggacttgatgccattgatgaagagatgatggtcagtaccaatggctggttttaagaagagcaaagttaagaaacaatatttaggatgtgccacactgggtcaccactcagcatgatttgcttcctcttaatgttttcaactttctctaccacctctaaagtatactacccagggtatctctgcataattctttgtcttgcccctttgaaaggtttgaattctcagagccagtccctgtttagtgacagcactttggccacctgatcacttttcctaaatctcctttctccaaccctattttgtctttattttttgaaatttgtcagaactaaacaggtgcaaacaaaacatgccatgattttatatagtgctatgagatttaaagaagggatttaagcatcagacaaggaggttttatttccttatgtcatctagtatatttttgccttttttagctacaatggtttatcgaccttcctcaggggccatcagagtgagtcctttaccacttggccttacagtttcattcatttgtatggcaagtagttgtaactttacgcgtagggtagacatggagagttagcatttcatatagccttaggacagagtttgttcatccctattttgatggcacggctactttatcttactgtgtttcctctgtgtccaagtatttattaatattttttaagattttcaagtcaaaatggcaatttgagtatatgtatgtagcctgacttcagaatcgggagagacttttcaaccttgagctacccactggcagcgtgagagaaggtgataggatgtcataggctcagcttacacaagtaagcatgcacaagtgtgtaaataggcaaaaacccctttccagattgcaacatttttcccagtcctgagttcagccctttctcaccaacataacaatctatatttcttttaacttttattttaggtttgggggtacatgtgaaggtttgttacataggtaaacatgtgtcatgggggcttgttgtacagattatttcatcacccaggtattaagcccagtacccaatagttatctcttttgctcctctccctcctcctaccttccccactcacgtagactccagtgtctgttgtttctgtctttgtgttcataagttcttattatttagctcccacttgtaagtgagaacatgcagtatttggttttctgttcctgctttagtttgctaaggataatggcctccagctccatccatgttcctgcaaaagacatgatctcattcttttttatggctgcatagtattccatggtgtatatgtaccacattttctttatctaatctataacctacatttcaaaatgaacactgcaggataatatccagaggacagaaaaggaaatgtgtgatggttacctttggggttatatctttctgtcatccagttatcccatctttctcctggggaccttgggttccagtggcataaagtcctagtccatcaggcaatgactaaagcacagatcgggatccttcgcagcaactttaggaagggtgccaagttcagagtccagaaaaaaaaagggaaacctacaactcatactcagcttccacacaccatgaatgaccccactaggcaaagagatgagttgcttcttgtttcagtattattccataacaaaccatccaaaaacctaatgacttaaactataatttgctatttttcctcacattttttgggtcgattgggctcagttggatagttctcatttagagtctctcatgaagctgcagtcagatggcggctggggctggaatcactggaaggttgattggacatcccagagggcttcttcactcctttgaccgccttcattgtacctcaacaggcctccctgcagtaggccagccaggatttcttacatggaggctcagggcaccaaaaacaggaagcagaaactgtcaggcctcagaggcaggctcaaagctagcacatcactttcattatattcaaaacaatcacagccaaccgagattcaagggagtagaggcatagacccctcctcgccacagcacatgtgtactacagggggaaaagatggcagccacctttgcagataagctaccaccaccacaaacaggaagcaagaattatttgggatggaagattttccttctgcccagagagccctgaaagagcaccctctgtgctactcttgggtggcccagtgattaaagagcaaagtttgtgcaaatataattgtgtaaaacgttggagaaaagtaacttaataaactcacaaccacccttggacttcaataaagcaagcagatgaaaaagtaaataaaagatatagaggctttaattaaatcgaatcaaaaaatgattaatggatatttaacagcacccttcaaataaataattcatattattttcttaacttgtaaaaatcaactataacttaggccacaaagaaaacctgaaaaaagagagaacatataatttttagagtccacatataccaccaaaaataaaaataaaaatctacaatttagcaataagggattaaactcttgcttcaaaaaagcacttagacaccactgcactccagcctaggcgacagaccgagagcttgtctccaaaaaaaaaaaaaaagcactttgaagttttaaaagcagtcttataaattactattcagtccaagaggaaatcaaaactgcaattaactgggatcctagaaaataatgacaattggaacatctcaataaaaacttgtgggatttggaaacatcatagccttaaattctttcattattaaacaagaaaaaatgaaaacaaatgagataagaattaggtaaaacttagaaaataatatgaaacaaatctacagacagcagaaacacggaatctatgaataaaaaacaaattaatgaaaacaaagcaaaatcagtagaagcaagaaataagtctttaagaatttctttggaactaccagtatcatcgatgaatctttgaaagacaaatccaaaaaggaaggttagaacatgaaaatatgtaattattaagaaagacaaaaggactatcacaacgaaggagatttgtttacctgtaagaatgccctgtgaacaaagtacaaatctatgcaaatgcttctaaaatcttgatgaattattttctaagaaaggataaattacagaaattgactcaaaaaaagtacaaaacctgaataaatcaatatctgtggcaaaaatttttaaaggcatcaaagaactatacttttaaataacagcatgtctagaaaatttttgagagaattatctcatgcttgtgtacttgttatacgacaagtaattcttatgctatttcagaaatacagaacatataaaaagatgaaaatcctcccaaattgttttgtgaagttaacataatcttgatgaaaagtagctcacaacaaaagaaacatggccaaattcacctgtgaatttgggtgcaaaaatcctaaatcaaagagaattaatttcagaacttttcaaaagtttgtttcagaaatgtgcagataatttttattagaaaaaaatttataaaatatatatcagtaggtgaaaatataggaaaaatataatgatcttgatatcaaaaagattctgatagaatttaaaatattactttttgaaactatcaactgtgaataggaaattatttccttaacattaataaaaatatctatcaatagggttatcttactttatatcaaaaaggtgtttgatatttgcttaaatttttttaaacacttaaactggaattaaagtatatttttaacagaagtaaggatatctaaactattatgaaatactgaaggtattcccactaaagacaagaataagataaggacacctgacatcacttctaatcaatgcaataaaacaagaaaatgtaataataagtaaatattagaaatggaaaatattaaattatatcaacagaaatactgtaagagaattcagtaaaatatttaaatacaaaataaatatactaagagtaggatgctaaaatagagaaaagaaactttacaatagcaacaataaaataaatctaggaataaatgtttaaaagaaggctggaacttacattcgaaaatcacaaatttggaatgtgctattgatggatgagaaaacataaaaatataaaaggccattttctccaacttaatttatgaattacattattctaagttattgtttggaagaacaatcagatgagaatagtgcagataattttgaaaaataataaagatagacttataagatcaatattacaatatgttgtggaactataacagtggaaactgctgctacagatatagagagacacatcagagaagtggaacagagatctgaaaacacaaatgaaagaacaagtgagaatctgccatataaggctggcattaaattagttggaaggtggtagattatttaacaaatggtatttctaagttagcacaattggctgatttagaaaaagatgaaataaatttgaacttgcacctcacacctcatagcaaaatatattccagatgataatagttaacatttactgggtaattttatatgtcaggcaccattcaaagttatttatagtctgggcacagtgacttatgcctgtaatcccagcactttgggaggccaaggactcctgaggtcaggagttcgagaccagcctgaccaacgtggtgaaaacccatctctactaaaaatacaaaattggccaggtggtgcactcctgtaatcccagctacttgggaggctgaagcaggagaatcgcttgaacctgggagacagagattacagtgagctgagattgcaccattgcactccagcctgggcaacaagagcaaaactccgtctcaaaaatttaaaaaatttattattttcattaatccttacaataatctcatgagctaggatcaattatttaacccattttacagaaaagaaaacagaagttaattaatttgtccaagataacacagtaagttgcagaaccagatctcttgaatcctagtagtttggctctttagtccacattctataaacattctataaacatagaaaagtgaaactataacataactaaaaaaaaaaaaaaagaatgatgaaagctttttttttttttttttttttttgagacggagtttcactcttgttgcccaggctggagtgcaatggcacaatcttggctcaccgcaacctccacctcctgggttcaagcgattctcctgcctcagcctcctaagtagttgggattacaggcatgtgccaccacgcccagctaattttgtatttttagtagagacagggtttctccatgttggtcaggctggtctcaaactcccgacttcaggtaatctgcccatcttggcctcccaaagtgctaggattacaggcatgagccaccgtgcccagccctgatgaaggcctttctaagggatatgaaaaaatagactctatgggccaggggcagtggttcacgcctgtaaatcccagcactttgggagaccaaggctggtagaccatctgagctcaggagtttgagaccagcctgggcaacatggtgaaaccctgtctctaccaaatatacaaaacaattagccaggtgtggtggtgcattcctgtagtcccagctacttgggaggctgaggtgggaggatcacttgaacccaggaggcagaggttgcagtgagctgagatcacaccactgcactccaacctgggtcacagagtgaaaccccgtctcaaaaaaaaaaaaaaaaaaaaaagaatagactctatggattgatataattggctacccacataaacttatttaacttctgtacatcaaaaaataccatcagtaaaattttaaaaatcacaaaccaaaaaaaaaaaaaaaatagcttacataaccagtgtattagtctgctctcatactgctataaagaactacccaagaccagataatttataaagaaaagaggtttaattgactcacagttctgtatggctggggaggcctcaggaaatttacaatcatggcagaaggggaagcaaatatatcttacatggcgacaggtgagaaagcatgtgagcgagcacaggggaactgccctttataaaaccatcagctctcatgaaacatattcactatcatgagaacagcatggggaaaactgcacccataacccaatcacttctctttctcgacacgtggggattacaattcaagatgagatttgggtggggacacaaaacctaaccctatcaaccagtttcatcattactctataaagagctcttacaaatcagtaaaaaagatcaataaaaaaagatcaaaacctcagtaaaagtgggcaaagtatatgagcagacaaatcatatgtagtgtgtgtgtgtatatatatgtgagtttgtgtatatatatgtgtgtatgtgtgagtgtatatatgtatatgtatacacacatatatctttacatatatacacacacattttaaaaactttcatctcacaaataataagacagtgaacagggaaacaataatacaattccttcagatagtcaaattggcaaaaatttttaattctaaaactctgtaattgaaagtgtagggaaatagaaattctcataaaatagtattggaactatgaatgaatatcactttttctagaagacagtttgacaatatattatcaaaaactgttaaaatgtgcataaactttgacccagaaattctacctcaaacaatttgttctaaaacaattgacagatgtatgaaaatatttatggataaatagttttatcacagcactgtttataatagagacaaattagatacactcttaatacccaacaacaaagaaattcttaactgcatttggtgcttccatgtgatagaagattatgcaaccattgaaaatgacaggggagaaatggtcacagtaaactactttaaaactttcatacaggatgatcccatttttgtaaataaatccaccactgggtgtgtgtctgtgttctgtaaagataagcacaaaatattaattctgaatgctataatttaacattcccttctcccttcctttttttgtgtatttttcaaattttcaacaaagaactgtgtaatcagatggaaaaaggggattttatcattaaataagtcatatctcaacattaattcttgacagaccttgtatttacacatgtcccactaaagagatgccatttttatttctaccctttccttcatttttctagtttcctcgtgttaccaaatatttcctgtgtgctttcatcttaccctcagttctggcatccaaagacattattatggagaacgtgccagtatgtgtgtcagcaaaatgaatcaattaaaagagttgaccttggatccctttccatgaacagcacataaaaggcaggctattatgagatttataggcagggcaagttttaagtggagaaaagggagccgagaaggatcagagcatcaccactcacaacacacccttctctttgcccgtggctccagctttggggaaggggaaggagcaagacagggtctcactctgttgcccaggctggaatgcactgcagcagtgccatgatagcccattgcagcctcaaactcttgggcatccttctgcctcagcctcccaagtagctagggctaaaggcacacacatcaggctaattttttttattttttgtagatacggggtctcactgtgttgccaggctggtctctaactcctgggctaaagtgatccacctgcgttggcctcctaaagtgctgagattacaggcatgagccacctcacctggccagaaagataactttgaatgcatctgtgtatctacacatttttatatatacaggtatacatacattttatacatacctctatctatacatatgtagacatgcatatatatgtatgtatatgcacatttttatttatatatatgtgtgtgtgtgcacacgtgtatgaattttacatggaaagccaaaatatcaaagtgaaagggaaaggctgaaagcaggaagactggtttacttggtggccaagtgttagaagatgagcaacaatgagggcagggcagaatgaatgagtatgaaggatctttatgaaacagaatcagagctttctctgcttctccctgactgtggcagaagatggctgctccctcatccccagcttcccactttacattccctctattcaaatgatcagtcctgactaactaactacctgtcactcagtggtcattccaaattcgcaggagagagaatctgattggtctagctcagcatagttgtccaatcaactggtccaatcaactgtggccaagctcagggtcacagatcacaaatgtggttgctggggtccatttaactactgtctgtcttcacctctagactatattcttcatgaggacagggacctcaacatttgctcaatactgtctgcagcacctttgaggacatagccggcacttaaaacccatttgtcaaaaggataaatgcataaataaattaacaaatgaagagaatcatagtgtagaaggctaactattaagtcatccaatccagccatccattcattgttgatgtgtttaattcatcagtagagcaccaccttcggcaggattatgtcaattgccttcaatatgtcgatgaggttttgtggtctagcctgagtttacaagaatgatttaagttagaaactatgctcataattccaaacaactgacttgggaaacctaattcattagtaacttgagaaatacctacagccctccaaacaaggtaatcaatgggagaactaggccagagagaaaaggtatttgtcagaggaaacttggcatgtatgttatacttttacgatctaattattttagtgttcttcctgtggaatccattttccttagatgacctctgttcataggaaactatttggtttaatctgtggaagccatagcatatttttaaccatctccaaagtccagctccctctccacggagcgtgcctgatgcccaaacagatgtctcataacacagcacacatgagctcaccactggcaagtcttttgcacacaatcggcccacacctcttctcacatctccctgtcatcccacaaacccaaattcagaagttgcaggcaagctcaaactcttaccacaataatagaaaagcagaaggcagacctccaattttgaagtttcaatttattaatatttttaaaaatctaatgaccaaccagaaaaatatgcaatacaaagcattagccaaactaattagtataaagaaatgtgcaaactggctgccccaaaagaattcagattaaattatccaaggaaaaggtttcaaaggaattcaaattttgatggaggccaggtgcggtggctcacacctataatcccagcactttgggaggccaaggctggcggatcacctgaggtcaggtgttcaagaccagcctggccaacatagcgaaaccccgtctctactaaaaatacaaaaaaaattagccaggtgtggtggcacacgcctgtaattccagctacttgggaggctgaggcagaagaatcgcttgaacccaggaggcagaggttgtagtgagccgagatcactctcacagagtgagactccatctcaaaaaaaaaatgttgatggaattatagaatattagggctgaaaggcccttgaacgtcatctagccggtacaacttaattggacagatgaagaaaccgaagcccatagagagaaagtgacttgccccaggtttcacagtgagtatgttagtggcagaactagaggtagaactctgcctcctgactgcaacccacaaggcagaccacagcccccagcaccagtgtcctgtctctaaatgcctcagaccatcaatgcctggagttcaaacccaaggaaatccagaacctgatcaacaagatctttcatcctgaccatttcatcataaccatttcagaatatgtcacctccaatttaggcaaagctttttgttgagaacaatttcctttaataaagcaatcgaaggtaacccaaaaagtatttttagaggtaacattaacctttcaagtgtggaagccaagggaagtacataggattcttgctatcctttctccaagaacctaggagatgtccaaggagaccatggggaggtgactgagaagccctaaactcatagctgtgttcctggatccttgacctttggagagcttaaacctgcagggaaaaatcagagctttctaagacatcttgctgcacctcggagctccggtgtgtgagcagtacttgttgagtgccaacttgaatgttgggctctttagagcaacactaggctccacaggagaagcccttgagggtgcctcagaggtgctcaccaaccagttaaggagcaatgtttctaatgggaaacatttagagtagggttccacatggcaaattatattcctcattgaacaaatatttgtggagggcatagggtggaccaagctggacatcttgcaagaaaagagtaagacatcaattgaaagccataagcacgcaccagatcccaaagggctgtgtatgccagtggaggtgtttggcttttattttaaaggtgatggggaatcactgaagaattttgagctggagagtgaattgaccagacttaggttcgggaacaatcgtttgactatgtcaagagctgctggattgtggtcaagtgctacactgtgtgatgctatctacaagtctttcaagaaatcatttgcacttttagtctatattcaggaatacagtataaagaggatgagttcctgaggcaaacagagctgggttttaatcccactctgccacttactggctgtgtagtctcgagcaagttatttaaataggtgtgagactttagttttttttctgtacaatgaaaatactgatacataactgacagagttttgatgataagtaaagacactaatgtacctggacgtttcaaatagtcctcccaccaccattagatacacccaaatcaaaatggcactttcaagcctaggaggaaggccagctggcatcctaagccttcatttagctggagatattgttgcattttcttcttagaatttaatctgagaaatttttgctaatgtgtgaaaataattggcattcattcctgtaaatgaggatgctgaggtaaactgaggtcaaagccaaatcttggatcggaatcaaaccacccaaaaccaatactgtggaaaataaaactgggtcacaaagaccagtgttatgaagcgagagttccaatcgtcctagcaaccttttaaccaaacactggtgcagatttgctggcctacatgacggtgagaacatctggcctttctattatcctcttgcaagcaaaaaacgatgttgtgtaaactgatctttaggccaattatatggtctaaatgttaccgtgtttatgctggcacctctgactccaggttttaagaacttattgtaaccacacccctcttacaaagactgtgggtcttactgtatattaccccagggatttattgatgccgagtctgcaccttttttcaggaagataaattcaacatcagtcaaattgtgtgcagtgcactgtgggaggtcctataagaaataagttacaggacttggtggcaacaggaggagagaacaaacataagagtgcaggctctaggggctgctttgtttttccctacaattttgctacattttttcctatttaccagttgtattatagaagccagatgtggagtatagaagctctagtctgcagctcactcagaagacactaaactaggagttggaacacctgataccacctccaactggcctttccaccacagacagggtctgattgtgtctgcgcatccccacctgcagagagacagcattagactactaaacacaatgcgccaggcactgttccaagcccttcataacactgattaagggagtcctcctaatacctgtaagtgacaggcggtatgattacccccacttcacatcacactgtggggtgtcccacagtgggggccacgcagaagctctgagcttgcccctcccctctggctgctcgatgagagctctgggcttttgtgctcagctctaaaggaccaggtggtggggagtgaggggagggtctataatgaaccacagcacaatgctctggattaggtgacccatgggcgtacccctagggtgttactgaccagaggaaggaggactctttgcctccaccatcaccattttaccccaccccatctccatccctctgctgctctggccaagacaccacggcggcagctggaagtgctgacctcaggtcttcctccccacctcactcccccacagcccccactgccctctttcatcccatcttcaggggacagatgtgagagaccatcttttagtctgtggatgctttcaacttttttgaaaacccctgggaatcctaacatggattatgaacagagatattggcagaagaaggctgggagctcccgattttgtctctggacaaaacagcctctggtaaaaacagtagagtgacttatttcaattgaagagaataagtacatgagcttccggattcattaattaattagcctcccctctcggccagcctggtggccagctctagaagacatctgaagccagatgagcactcaaccccaggcaccagcagctccttccccaggatgagggtttcccttcatctttcaaggacatgaatctcttgagcctctctgtctgactttgcatgtctaggaacgaagggcagaacagatagcacagtaaatcccagctctaaattgtcgtcatgggaattcatcacagatggtaatcattagggccctcacatcttaaaggaaagctttatccagaatcataaataaactgtaaccaaggcttagatttataaagctataaaagagggcagcttgaacagccgggaatgtacagtactgggttacaaaatcggcatcatgcctgaaaggctggacataaacccgggagctctgggcagtgcagcgaggagggggtaaattctttctgcagtgggtggaaccccagtcacagcctccccggcttagcacctggtttaatcacatgaaatgcaagctcagagaaacaggggtgctggcatctaaacatagcattgcaactcctaaaccaattgcagtcccatcaagtttggcccttcctcaccaagatgccctctgactaatgctatgtcctaggaattaattttcactttattgctaaggtttcccaccccctacttttcctgagtggctcaaacaactccgtttttaccaaaagtccctgtaccatgcagaacaccctgtgaggctgtgagttgtggagcagcaaagcacaaaacaaggctgcagccttccagaagtttcttgtctggccagggaggcaaggcatttacagatgaaacaactgtagtatgcaggctgcaatgtgtggtgtaggctgtaactagagaactcaaggaagcaaagggtaagtggaggctggagtcactgtgggggaaatgtttgggggaaaagggacatgatttatgacttgaaggatgcacagggctgtgcacaaggagggaaggtttgctcagcatgtggcttgtcccttctgtggcccatcctgagccaagtctctaatagcacactctcattttcctcttgtcctagagctaatttaagcagcaattgttccccaaattccacacctcaccctcttcattctcattcaagctcatccctaaaaggcctggaaagggaaactctgtgctctctggacatatctcgttcaggctggacaccacaggataacttccatcctggagcatgtggccaggaacaattccacaccccagccccaggcccagcatagagggcagcctcagagaggagcaaccccacctcagccgctgtggggagcaattctgtaggcatccagacatgccagagagagaacaataagataccccacaggcatgggaagtgagggaggccaggagccctcagaggggtgggtacccacccaggcaagtggccaagcgaagagagctcacgccagcatggaacatggtgagcaggagaacccctgtctcccctccgttgcagagctgagtgttgcacagaagttcctgagtaccagatgagactagtgggtatctactgggggacagagaaagcatgcctgtgactctggagagcagagcagatactataggggagacagggctacttaaggctggctttggacgctgactttcaggaggctgctttaaggggttccagggtcttctctgcattgttcagttgagtacccaagaagggtaggagaaaagcagaattcagggcagatgcctgcttggcaatagaatgtccccaggttgtatttcttaaggtacacaggttgtcagttcctgtgacaacaactaaggctacctgcacaggtgcagccgcgtgtagaagagggattcccacagccagaacaagggcaggacaaactgtttattatttactagcactttggagaaggcaaggcgtggatgaggaagctgtattgatcacatcagtagagatagctgcctccttcattcattaccgggaacaagtgtttgagggggcacagacgaggtaaatgcatcagggcctccatgacaactccaatcacagaatctagctacatccttgaattacaatataggagaagctcgtggtgttaaccttctgccatttccaggcatgtaactgaactaatcaaaataaattacttttgtttatgaaatatgaggatcccttccagaaggcaaagtagcagcaggaagaataattctggagtctattttgggttagaatcaccaaccccatctcttcctagttgtgtggccttgaaaaagtaactccgcttttctgaacctctgcttcctcatctgtgcagtggaacagctaataatacccggttagcagggctgttgaggagattcagtttaatgacctctgtacacagcacccagttaaggtcagtctcattccctttctcccacttgagagagttagactccaggaaaagatgaattttaacagttttgcaacacagtccaggaaaaggaagtggggagctcacttgtcctcaagttctactatgtgccactagagagttgtcaccaacaggggccagctttccacatattgcttgcaagccgcccaccacagcaccacaggccctgatgtgaggccgtccgctcacgtttccttctctccaattcttttctaggggcgctgcatcaacttcaccagggtcaagaacaaccagccagccaagtacccactcaacaacgcctaccacacctcctcgccgcctcctgcccccatctacactcccccacctcctgcgccccactgccctcccccgccccccagcgcccctacccctcccatcccgtccccaccttccacccttccccctcctccccaggctccacctcccaacagggcacctcctccctcccgccctcctccaaggccttctgtctagagcccaaagttcctgctctgggctctctcagaaacttcaggagatgttagaacaagtctttccagttagagaagaggagtggtgataaagcccactgaccttcacacattctaaaaattggttggcaatgccagtataccaacaatcatgatcagctgaaagaaacagatattttaaattgccagaaaacaaatgatgaggcaactacagtcagatttatagccagccatctatcacctctagaaggttccagagacagtgaaactgcaagatgctctcaacaggattatgtctcatggagaccagtaagaaaatcatttatctgaaggtgaaatgcagagttggataagaaatacattgctgggtttctaaaatgctgccttcctgcctctactccacctccatccctggactttggacccttggcctaggagcctaaggaccttcacccctgtgcaccacccaagaaagaggaaaactttgcctacaactttggaaatgctggggtccctggtgtggtaagaaactcaacatcagacgggtatgcagaaggatgttcttctgggatttgcaggtacataaaaaatgtatggcatcttttccttgcaaattcttccagtttccaagtgagaaggggagcaggtgtttactgatggaaaaggtatgttgctatgttgatgtgtaagtgaaatcagttgtgtgcaatagacaggggcgtattcatgggagcatcagccagtttctaaaacccacaggccatcagcagctagaggtggctggctttggccagacatggaccctaaatcaacagacaatggcattgtcgaagagcaacctgttaatgaatcatgttaaaaatcaaggtttggcttcagtttaaatcacttgaggtatgaagtttatcctgttttccagagataaacataagttgatcttcccaaaataccatcattaggacctatcacacaatatcactagttttttttgtttgtttgttttttgttttttttcttggtaaagccatgcaccacagacttctgggcagagctgagagacaatggtcctgacataataaggatctttgattaacccccataaggcatgtgtgtgtatacaaatatacttctctttggcttttcgacatagaacctcagctgttaaccaaggggaaatacatcagatctgcaacacagaaatgctctgcctgaaatttccaccatgcctaggactcaccccatttatccaggtctttctggatctgtttaatcaataagccctataatcacttgctaaacactgggcttcatcacccagggataaaaacagagatcattgtcttggacctcctgcatcagcctattcaaaattatctctctctctagctttccacaaatcctaaaattcctgtcccaagccacccaaattctcagatcttttctggaacaaggcagaatataaaataaatatacatttagtggcttgggctatggtctccaaagatccttcaaaaatacatcaagccagcttcattcactcactttacttagaacagagatataagggcctgggatgcatttattttatcaataccaatttttgtggccatggcagacattgctaatcaatcacagcactatttcctattaagcccactgatttcttcacaatccttctcaaattacaattccaaagagccgccactcaacagtcagatgaacccaacagtcagatgagagaaatgaaccctacttgctatctctatcttagaaagcaaaaacaaacaggagtttccagggagaatgggaaagccagggggcataaaaggtacagtcaggggaaaatagatctaggcagagtgccttagtcagggaccacgggcgctgaatctgcagtgccaacaccaaactgacacatctccaggtgtacctccaaccctagccttctcccacagctgcctacaacagagtctcccagccttctcagagagctaaaaccagaaatttccagactcatgaaagcaaccccccagcctctccccaaccctgccgcattgtctaatttttagaacactaggcttcttctttcatgtagttcctcataagcaggggccagaatatctcagccacctgcagtgacattgctggacccctgaaaaccattccataggagaatgggttccccaggctcacagtgtagagacattgagcccatcacaactgttttgactgctggcagtctaaaacagtccacccaccccatggcactgccgcgtgattcccgcggccattcagaagttcaagccgagatgctgacgttgctgagcaacgagatggtgagcatcagtgcaaatgcaccattcagcacatcagtcatatgcccagtgcagttacaagatgttgtttcggcaaagcattttgatggaatagggaactgcaaatgtatgatgattttgaaaaggctcagcaggatttgttcttaaaccgactcagtgtgtcatccccggttatttagaattacagttaagaaggagaaacttctataagactgtatgaacaaggtgatatcttcatagtgggctattacaggcaggaaaatgttttaactggtttacaaaatccatcaatacttgtgtcattccctgtaaaaggcaggagacatgtgattatgatcaggaaactgcacaaaattattgttttcagcccccgtgttattgtccttttgaactgtttttttttttattaaagccaaatttgtgttgtatatattcgtattccatgtgttagatggaagcatttcctatccagtgtgaataaaaagaacagttgtagtaaattattataaagccgatgatatttcatggcaggttattctaccaagctgtgcttgttggtttttcccatgactgtattgcttttataaatgtacaaatagttactgaaatgacgagacccttgtttgcacagcattaataagaaccttgataagaaccatattctgttgacagccagctcacagtttcttgcctgaagcttggtgcaccctccagtgagacacaagatctctcttttaccaaagttgagaacagagctggtggattaattaatagtcttcgatatctggccatgggtaacctcattgtaactatcatcagaatgggcagagatgatcttgaagtgtcacatacactaaagtccaaacactatgtcagatgggggtaaaatccattaaagaacaggaaaaaataattataagatgataagcaaatgtttcagcccaatgtcaacccagttaaaaaaaaaattaatgctgtgtaaaatggttgaattagtttgcaaactatataaagacatatgcagtaaaaagtctgttaatgcacatcctgtgggaatggagtgttctaaccaattgccttttcttgttatctgagctctcctatattatcatactcagataaccaaattaaaagaattagaatatgatttttaatacacttaacattaaactcttctaactttcttctttctgtgataattcagaagatagttatggatcttcaatgcctctgagtcattgttataaaaaatcagttatcactataccatgctataggagactgggcaaaacctgtacaatgacaaccctggaagttgctttttttaaaaaaataataaatttcttaaatcaactcttttttctggttgtctgtttgttataaagtgcaacgtattcaagtcctcaatatcctgatcataataccatgctataggagactgggcaaaacctgtacaatgacaaccctggaagttgcttttttaaaaaaaataataaatttcttaaatcaa

SEQ ID NO: 25 - DNA, 3082 bp, Homo sapiens
gaagttttctcctcctgtcctgtaactggttttcactcactcaactgagagatttctttgttgcaatgatggggtctaagataacacttctggaggctgcaggcgagaaacacagctgatatcatcttttattgtgtgttgttatttgcctagcattataaattaaggaggaatagtaacaaagagcttgaagacatgcacagctcacaggccccgggtggaggctggcgacatcagacagacagaaccaagacatctgaggggcaaccaggaggtgcgtgtggctgcagagcacacagacttgtctttggacaaaattgagaagaactcataaacttggcttcctcgcttctgctcctcagacgcgcgtggatgatttgaagatattagcctaacaagatggaagcaggtttaaaattttacataagaagttacctttttcagttgtgttgatgttcctttcagctggtcctatagtacccctcctcaggaatgtctccccagtgcaaggacaaagactgaagagactgctatattgatggactctcaagccaactatgaagttgaaacaaagaaagtgatcacctgaagacacctcctctgctaagaaacacccccaaattgtgcagcttctgccactagaactctcagaacaagagacaatcttttcaagaaacagaaaaactcaataatgacatctagattttcatgagccaagaactttcccttcctcatgtgtattcctctgtttgtacttaaattcatgtgacattcatttttttcctagtatggatatgcttattaatgcacttgtttcaaaatcccaaattgcacaaatgtgttaatattttaagaaacaaaatgaatcctacaaggagaatgatttttagccacacatagggttggatcttgagagtgacctacagaataaaagtacttttaaaataaagtagtcagaggctattcaaagggtaaaataatcatagtaccacattggtccacttgacactaaccaatcgatcatttttttttaatcaagaaagctagattctatcagataaaatcactgcttctaaagagtttaaatctagttagaaaaagttatagaaatgtttgcaaagataagtaacagatagagtcagtagaggataagatcaaaaacaaaaccaagcaaaagatgagttcaggggagtttgccatcaagttggcaaaactgacttacttagggaagaaagttataaaacaggaaaatatgagatgaaccttgagtgatgtggaagatttagataaatggaaaggaaggagaaaatggagttctttaggtggttgtaattggaggaggaaatgaatacacacatcttgttgacttaaacccagacattcagcagctctctatacatatctggaaaagactgcacagtcacctcctgtctctcaccccaggtattacttagaattattatcatatttcccttcctttaaagtaagtaagggtgattggtgacaatatggagaactatgatttttccattaacctaataataattggtatttattgagttctgttaagcattttacatattaactcacttaagcctttcaacagccttgcaaaataggtattattatccccattttacaggcaagaaaactgaggtttaagtaacttgccgaagtgccatatacagggctcacattcagtattgcagttgcaaagctcatgatctatagtgccaagttgcaatattgtagtcaatgtcacaattattacccctttttatattccttgatatttttccatggcaaacaattagctatttcatttaataatcacctaaaacttttcagtcttctgattaaaattacgctggagtgatagaatgtattttcatgatagaaattgggaaaaaaaatggggaatgaagtttatcagcatttcagacttgttttttttttttttttttgcaagactttgatgagattgttcacttttgtctatgtaaaatcccaaatccttgagaataaaaaagggggaggtttaagtcacttgttgcaatgccctttttaatagaggcaataaatctaaaggccataaatttagagtgacttacagaagatcgaactttggagtgtggcagagtaagggatggaaaccgggccctccagttcactatcagtagcttttgcactggtctgcccttcctaaattaagtatgcacttcaatttgatgagtggaaacagtctatctgggcagtaaccagggagctttgtgcctagtagattgcttctgttctgcacttctttggtttcccacctcaatgtaaaaaatagctagcaatgaagtccagaagttgtcaatggttcatccccagaagaatgcataatgtccaaagttgtatgtgtatgatgtcttcaatggtattaagttatttcaaattcttagttcacctacataaatcatttctaacaagcatcttcttaaccaactttatgcacagtgtatgtttgtaagtgcttctgcacgaatgtttatacatgactgtttccatagtacttatgtttttaaaaatattcagtcatttcctactataatcctcatgtatccatgtaactgactcaaaaatacttcagccacagaaagctaaaactgagcaaatctcattcttcttttccatcccctttgcatgtggctggcatttagtaatgattaataatatggccagctgaataacagaggtttgagacacaattctttctcaaaggagtcagctaagctgggtctacttatggacaaacatctaaatgtgtggaagtatctgatatttgacaatggtaaatttccacttagctagctagcattgtcagacttcaatctcctcatggctctggccgtcctgttttaagcatgataattgttggccacatctcacatagttctcattgagtgagttcataaataaacagggtttttttttttttttaaagagcagccaagcacaaagtgtgactttgttgacattttatgtgactttgtcatatgttcctaacccccaataaaagcaatgttgcatcaactgtgaa

SEQ ID NO: 26 - DNA, 422692 bp, Homo sapiens
gaatgcaggtgagaaaaggcacggactctgcggctgcgaacccaaacttgggcaccgcacggtgcgcactgctcagccttcgcccccgtgggcgaaaggctgctgcggtttcaggcggctgcttcgtgactaatgaccttgcgcagagttgttaagaaaaaagagaaacccgcgctctccggggtgagaagggactgactctgggcgtctctgaagatggctcgggcttctctttggcgcgccggggggaccctgacactgaccgctctgtgacgcgagtagtctcccctgcaccgtgcccgaagcgacgtgccgggggatttttcattctcgatctgttgactggctcccccgctgcatgagcagagtcggagttgagactggcttgttgctggccccagcgcctggtgcaggaagcgactcacgtttgtctgggtggccggagccggagcagagcctgggtttggagtgagtgcctggaacgtgaattggactcaactcgagtagcagcaaagaccagcgggctggcaggcgggggaggctgcaggctcattccccacctcttcccagccccactgcccgtctgccggagcggttctggccccttccgacagagcggggactagagccggggattctccgcccgctgaggggatgactctgggttgggggagcgccgaacccgcggcgcgcagtgtcccgtgaactgtgagtactgcgactgaacggcggcaggcgagcgggcgattagcacccattgcatgaattatgaaacaataactttcggaagaagcaggaggaaaaaaagaagcatctatcgctgccctcccacccccattcccggccaactctccacgccgcttttgccccctccctcccctccctctcgctccttcctttccgggagaggggagaggactcgggggagggcaggcggccggccccggaggaggggggcgccgagggggctgtggttagaaggagcagtagcagcagcagcaggagaagatgctgaggatgcggaccgcgggatgggcgcgcggctggtgcttgggctgctgcctcctcctgccgctctcgctcagcctggcggccgccaagcagctcctccggtaccggctggccgaggagggccccgccgacgtccgcatcggcaacgtggcttcagacctgggcatcgtgaccggatcgggtgaggtgactttcagcctggagtccggttccgagtacctgaagatcgacaacctcactggcgagctgagcacgagcgagcggcgcatcgaccgcgagaagctgccccagtgtcagatgatcttcgacgagaacgagtgcttcctggacttcgaggtgtcggtgatcgggccctcgcagagctgggtggacctgtttgagggtcaggtcatcgtgcttgacatcaacgacaacacgcccaccttcccgtcgcccgtgctcacgctcacggtggaggagaatcggccggtgggcacactttacctgctgcccacagccaccgaccgcgacttcggccgcaacggcatcgagcgctacgagctgctccaggagcccggaggcggcggcagcggcggcgagagccggcgcgccggggcggccgacagcgccccctaccccgggggcggcgggaacggcgcgagcggcggcggctcgggaggctccaagcggcggctggacgcatcagagggcggcggcggcaccaaccccggcggccgcagcagcgtgttcgagctgcaggtggcggacaccccggacggcgagaagcagccgcagctgatcgtgaagggggcgctggaccgcgagcagcgcgactcctacgagctgaccctgcgagtgcgcgacggcggcgacccgcctcgctcctcgcaggccatcctacgggtcctcatcaccgacgtgaacgacaacagcccccgcttcgagaagagcgtgtacgaggccgacttggctgagaacagcgccccggggacccccatcctgcaactgcgcgcagccgacttggacgtgggggtcaacgggcagatcgaatacgtgttcggggcggccaccgagtcggtgaggcggctgctgcgccttgacgagacgtccggctggctcagcgtcctgcaccggatcgaccgcgaggaggtgaaccagctgcgcttcacggtcatggcccgcgaccgcgggcagccccccaagaccgacaaggccaccgtggtccttaacatcaaagacgagaacgacaacgtgccgtccattgaaatccgcaagattgggcgcatccccctcaaggacggggtggccaacgtggccgaggacgttctggtcgacacccccatcgctctggtgcaggtgtccgaccgagaccaaggcgagaacggggtggtcacctgcaccgtggtgggcgacgtgcccttccagctcaagccagccagcgacaccgagggcgaccagaacaagaaaaagtacttcttgcacacctcgacccctctggactatgaggccacccgggagttcaacgtggtcatcgtggcggtggactcaggcagccccagcctctcgagcaacaactccctgattgtcaaggtgggagacaccaacgacaacccgcccatgttcggccagtcggtggtggaggtttacttccctgagaacaacatcccgggcgagagggtggccacggtgctggcgacagacgcagacagcggtaagaacgccgagatcgcctactcgctggactcctctgtgatggggatctttgccatcgatcccgattctggggacatcctggtcaataccgtgctggaccgcgagcagactgacaggtatgagtttaaagttaacgccaaagacaaaggcatccccgtgctgcagggcagcactacggtgattgtgcaggtggctgataaaaatgacaatgaccctaagtttatgcaggacgtcttcaccttttatgtgaaagaaaacttgcagcccaacagccctgtggggatggtcaccgtgatggatgctgacaaggggcggaatgcagagatgagcctgtacatagaggagaacaataacattttttctattgaaaatgacacggggaccatttactccacaatgtcttttgaccgggaacatcagaccacatacactttcagagtcaaggctgtggatgggggagatcctcccagatctgccacagctacagtctcgctttttgtgatggatgaaaatgacaatgctcccacagttacccttcccaaaaacatttcctacactttactgccaccttcgagtaatgtcaggacagtagtagctacagtgttggcaacagacagtgatgatggcatcaatgcagacctgaactacagcattgtgggaggaaatcccttcaagctgtttgaaattgatcccactagtggtgtggtttccttagtgggaaaactcacccaaaagcattatggcttgcacaggttggtggtgcaagtgaatgacagtgggcagccttcccagtccaccacgactctggtgcacgtgtttgtcaatgaaagtgtttctaatgcaactgcgattgactcccagatagctagaagtttgcacatcccactcacccaggatatagctggtgacccaagctatgaaattagcaaacagagactcagtattgtcattggcgtggttgctggcattatgacggtgattctaatcatcttaattgtagtgatggcaaggtactgcaggtccaaaaataaaaatggctatgaagccggcaaaaaagatcacgaagacttttttacaccccaacagcatgacaaatctaaaaagcctaaaaaggacaagaaaaacaaaaaatctaagcagcctctctacagcagcattgtcactgtggaggcttctaagccaaatggacagaggtatgatagtgtcaatgagaagctgtcagacagcccaagcatggggcgatacaggtccgttaatggtgggcccggcagtcctgacctggcaaggcattacaaatctagttccccattgcctactgttcagcttcatccccagtcaccaactgcaggaaaaaaacaccaggccgtacaagatctaccaccagccaacacatttgtgggagcaggagacaacatttcaattggatcagatcactgctctgagtacagctgtcaaaccaataacaagtacagcaaacaggtaagatgtatcccaaatatatttaaatatcccagggagggctaataactctgagacagattatcttctgtaaagttttgtcttctcgtttttaaagttattaaaattttaacagtaggaatttaatgttaatttttgcaccattaatttagcaaaggccatctacaagaggtataccactgtattttgcaaattagaattaaggttcactaaactactgaaagaagtattcagagtaggcagtgtttggcagttctctttgcacttgacatccctaattcatactacatttttttgtttccagaataaatatgtgtgtattacttagatggttagttttcacctgaaattattttcttctgtggcaactaagtggataattacatccagagaaaaagtttctaaagttactactggtgtctatgcaaattggattccatagaagttttagctatgttatttacaatgcaggattttacagataaatagatgctgattcatgcagatgtagtactaagtctgagatattgaaatactgactactttgatgaaactgctggtttaaaaatatttactgatatgcaaatgtcatgcaaaactccactttcaatcttttatatctataataatcgatacctataacaattagtgttctataatgatatgcaattaccatttgcattctttctgtttggtattaaaagtttgcaaacaaaaatacattgcatgagccatttattatttaagccaagtaatgaaaatattcatgattgatgtactgtgtgcaagactattttggtatgcattatgatatattgagaatgtaaagattatgtggaatatttgacataatagtttctcagtgaaatgtggaaacagtaaaaaatacatatattctgaggcggaacttaagcaaatctgaaatttatttttgaaagttttcctcgtgtaatatagcatcctcagaaagtttactttgtatatctaccaaagtttgccacacagcaaacaagaccttttggaaaggactgtgtctcatggtacagcaacctcagctaataaaacattacgtatttcttactgtcagaacccatctcaagaaacacagttatgattgtcaatctaatttctattaaacatgctttgcatgtggaatgtggaatccgagaagaattgaggcaaaggaaaaagttattttatagcctcattgaagattatagttatagaaagagatatgaattcttaattgctttcatgattattgaaattagtattttaaataaatattttctgtatatagtactttactgtagctattcagataaggagaaacagtctgaatatacttttatatctaataacaaatgcaatccaagaaaacaccagttcaaactacatttgcattaaatggcttttgaaaatatgtcctttggtgtatgtgaatttgaattatttatttattttaaaccaacatttgacatagtggagtgtttatatctgttgtattattgtgttacatggagtgagaagctgatttttgtgttgttttggtgcttttattggtgttgtaaacaaggaagattctagctaaaatggtagcactttttacagattaaacactcaaaaataaattgagatttgtagacatttctctagaaaatagtaacacctaatgcaaaggagtgtgaagagatctgtctgcagaatatttacacctcggttcttatcctaatggtacttctgtcctgtgtctggatagcatttgcgttctaaattgtgtaatcttatgcttttgaatggacatatcaagtgacacttttatggatattttatgcaaacacttcatatgttctgtgctgttacttaagcttcatttggctcatcagatgaggttagctctatatgcttgaatatttaaaacagctaatatcaagactgttggcatcctgtttaaaaggcaaagtgatatgcttataaataaactaatatatggtgttagccttttaactgagtaaagaagtccacattccaaaagagaaaaccctcaaagcaattggaatgaatcacacagtttgccaaaagtgactttggaaaacttttctgtcattacatattcaaaagaagtatacacttttaaccccaagtaaatagctgacctaaaatgaaataaaggcagatgaaacacattccccttaatgtaattagtaatagtaattgatatgtttcatctcctcaatattgctgtcaggggacaagggatccatttacaaagttacattccgttttgacatctgacataaatgggatcctttttgttctgctttttgtttgtgccataagtagacaatttcctatttttatttttaaaatatatgacctttaatttttacagaactgccaaaatatattttctttgattaaacctgatgttataaaagaaaaaaagagaattcagggtttcgcgggaatttccttcttttgataaatggatttatctaaggtaaaactagactgttgtattctttcaattccatacagcagggtctaatttaaaaattgagatttcattttacattcattttatttatagttttcctgaattgccttattgcagttatttatttgtgaaaaaattaaagtgatgtttcttaagagtgttcttatcttcatgaaaattagacattttaaagtgttgaacctaagtcctgttgttttcattataataggttaaacagctttgtagaaatgaaagtttgtaaataatactctcccttaactgcttactttttgttttgtttacatagacttgagagccattcaaatcaagcttctatggcagactctaggaaatgtgtgtggtagagttgctggaattatttccgaaattcacactttagaaaaactcactgatgatgtagcccaaattttcatagttcatacctttgcatttcaaacaaaagcctttgctctcagctaaataatgtgtttagctgagcaaaatgtggatcattgacagcatgattgagattaagtatccacctttctgtttcattcttccttggtaaacctggtcttggtagttgttaaacttttgtgaactagaagtacaactgtgtttttcattcataacataaaggcatacgcattctatttttctgtttatttttaagtctctggtattttactatgtgctaagcatttttcaattttcttttaaaataatgtaatccccccaaagagtgatagtatgaaaagtacagttactattttgcttattattcttgaattctattgagcttatccttgataggctgttatttagataatgcacttacaagtaaaaattttattgtatttagtaaatggaaagtaaggtaatttatttttggcaagagcttagtttgaataaacatccattttaaaatccacttgcagctgatcctgaaatacaaaaaatttacattaacttcagtgacagtttcagtttgtcttcataatgttctctttagtgatcgaattatgttcaatatattcattgtatacctagtgaaaaaatttgggagaattttttaattgcttcaattttggaagcaaatggttgacttgctgtcatctattaagcaataagaaaactaaatgtcaattcatttgtgtgtgtgtgtgtgtgtatacatacatatgtatatatatatatatatatagagagagagagagagagagagagagcatatatatatattctttagtggaaatgcatctacatagtgatgccaaccatagcttccagtgctcattctgtaagcataatttttacaatgtttttctcctgtctataaccaaggatgttttcataaggcacaatgaatctgcatatgttgtaatttccgttacatttggcctgataccataggcaaaacactaatagctgatggaagttaggctgtgtctttagtcatctagtaaagcaacactatctggatctctggatgtctatgaaataaggaaaaggtcatccattgatttgatccgcaatgaatttgcaaatttatatggaagtccacatgattatttgaatcttatccaaaacttatcctaaaccaattaatgacttagatgtaagaccacaaagtcagtttaaatattttaatgagccatctagtacaataaatatggcaaaatcattttttcttatccttctatctttgagtaattacatatctcgtatgtgaaaaagtgtgaacatggtttatatcacaaactctgtacacacagagacatatacacacatattagtgtataccatttatagctgtattagtcttttatttagtcatgatgtttatagattaatatgtgaaaaatatctaagcttaaacatacacaatgttgaaataaaatatactataatcaacagcttaatgactgtacatgaaatcactagcatcatcacattttagaattacaaggtgtcaaacagtcccctcattttaatagaagaggagactgaggcccagcatgaaacagtgacttgattgggattacaaaattgtcagggatataatgtggactagagtccaagttatggaatgtagtgtccagtattcttatttatctgatcatactacctttgggggaaaaaaactgaatttctgtaactttctgtgtgtgtatttcaattgcagtagaaatctgttgaaatttacttacttatttatgactatatatttggctatgaagattgacatctttacaatagactataattctgctttaggctccagttcttctgtgtaaaattatctgggaaaatataattcaaaatttacagaattttaaagaagttaataattcttttccctcatgtaggattgtaattgataacatagagtaaagcatcttaacatggttaagaacatatattctgttgacagaatttttaatattagcagaacaatgataacagacataagttccttcctagcaattagtatatttcaataaaaattcatttaaatagaaaagaattaaaacattctacacattatgtatgaaactttttatgcattctaattgtgataatcttttacctttttcatcaatattgataattacttttgacttctgggcttgtgtgcattttatcaactttgcacatacattttattttagtagcatccttaacacacagtcatgcacgaatgttttctcttaatttgttttctagcaagtttttagaagaatatgacattttgttaactttcaattggattgcttccttgttaggcagttaaccaatctagtgtactagattctaaatttgcacagtgataaaatataaattattgaatctattaattttaaaaataaaatctgaactattttaaaaactaaatatagtgtgacaaagccattacttcaacacagcaatctactctattaaacattttaacatcttttctttcctgggaggatgtggtggtggagattatgtaggagatttagtataattatatacagtattttaaatatatatataactttaaatatataacatgactttgtttagaatagtcatgtataaagagtgtataatcgatttctagactatggcaaggtttcccattcatttatttactatgactctatagaaatagtaagagctgttcccatatatctagagtaagctttgcttttcttagtttttttaaaaaaacccatagaatcttttctaaagcagtgactcttttgcggtacattacactgtgctttatttagcattagtgttgtgggaaaaatcacattctaagaagaattgagctgaaaccactaaaactaatcttaattatcacttctggtgaattaatgttttaaaggcggaatcaaggtttattttcaggaatgtagtgatgtttgtattgaactctaatgctgtgtacaaacaaaaagctattaaagctcccaggtaggattcctctgacaagttaacttcccccaccccccaagtgtatttattatttacaaacacaaagttggcattaaaatttttcttagctccgaaatctctactaaagctttccaattgggcataagacactggggaaaatttctttatcgatttttttttacctgcataaatctttattttccttctttcagatgcgtctacatccatacattactgtgtttggctgaattccactctaatatgatgctccattatgcaccatactgtgatgacctttctactccgaaacctgctggagcctgcccttggccgtggggtgtcagccaatcactgcttgttccacttgttgtacattttatttttgagtctttttctttctcatatacagaaaaatagtatgaaaataaaataaatgtatgaaacagtattaatgcagaaatgtgctactaatggatgtctgagtcaccagaaattccattcttaaagaggcggttagcacctattagacgtaacagtgatgtcttttaaaaaatccaaaagcatattgcaacaataagtttgagactttgtgtgaacaaagggaaattcagcctcttatgtctttgtctttaatacattaaatactgattttgaataaaaatctaaattgatcaatatttttaagtgccatgtaatcacaggcctgtcagatagttttgttagagtgaaggataatatcttttgctcattctgtgtgtgtatttttaaatgctgttttgtgtgtttgtgtgtgtttccatatatgtgtgtgtgtgtgtgtgtatatatatatatatgctggaactttgagcaatatttataaaaatattgtctgtaaaacaagtttgagaaattaattttttatatttataatgggcactgtaatggattgatttttttcttaatcttgaaatagtgaccaagatatttatatcatttttgaatttattttttaattctttaagaaaatttagaacttttcactttcatttgctaaagtcactgtagtcacattcggaaggaatatgtggctttctgttctttatggactacgtttatcagaagtccatatttattaaacatcctatttgatgtcagataacgtaaactcaagcagcttcaaagagttcagcatgttacatattattgagagagcaagtgactgaattttagttgtataagcaatattataggtaggtcagggagtcctctggatggcccctctacctctttatgtttgtatgtttatgtctttatttgttatgtcgtatgtgtttatgagcctagaaaatagcctagaaaataagtgttccatatgtaaagtttaataattttgtaatacatttaccacgctgtctgccctattaaaattttccacaaatttgggaactaagaatgccaaattctcaagattttttggtgaatcactctcaatataatagccacttaagaaaaataaataaataaatattggaaggccattggaagtgataggaaatgcactgtaacccctgtgaatctctaatgtatacctgaggattttcattttataagctgtgtatttaatcttgcaaaagggaaattttcagaaacatcactgcaagtacagtaagatttctgtataaaacttaattatcctcaacctctcattttgttttgaacacaaggactagtgtaagaaactggtgaaaggaaccttaccaatctctgcttcttgaaaatgctgttttcctcattccaaatagtaaacgtcactagatattcttcaaatgtaaatcccgtaacaagtcatatcaactcaaaaacaaattacagaaaaatcaaagtctagaattttgggttaatttaatgtgcaatcacatagaagtgatatttatgaataccttcacaaagaagaacattgtaagttagcattttctaaacaggttgcaacacactcttgaggtatgaatcaatttattgagtctctaccacaattagaaaagtacaaaataaaatagaaaaattcagagtacatcacccatagtaagagtaaatattgacttgtgcaatttttgtttcagttgtgtttgtgtggaggtgtgtgtttctgttctcggttgctatgttaaaaatatatcttattgtggaagcagttgaaaaggtttgagaaccagcactctagactggggtaggaagttatggctatttactattatgactggaaaaacatagtaaatcaaagcaagaaaaaaaaatgctgacactctcaaggattttagtgtactattaagctgaatcagaatgatcaacagcatactgattacagcaacatttatcaacagtaaaaagcttttgagaagtctattaccattcctctactattcttgtgattaaaaacaaaaaatctttgaacacgtgccattggtttattgaccagatacagattcccagtcccccttccccagtcccttaccatgcccagcgcctccccagctattcctcacccagctgttgctatcaaactcaggtctctaggtcagtgagtctcctttgtaattactggaacttaccatttatggaggtgcctgtggacaacggacaggtttagacagagcaaaccacatattaccctgtatagtttagcatgtggatattttattttaaactagaagacaataattaattctccatttcaaaatctgagaaggaatatgagatgctagagactggtctattttagagtagttcatcctttggataaagttttttcctttatctatcagtaccggtcctggtactaaaagaataataagatagagtctttgccctcatggaattaatatattataaagatgataacagggcagaaaaatgttacttcgtttcatttaaaaattttattttatttttttaagagacaagtgtctcattatgttgcccaggttggattcgaacccctgacctcaggggatccttctccctcagcctctgagtagctgggattacaggtgtccaccaccacattggacagaaaaatgatagtttatatttgtatcatgcttcttaaacttcaaagcattgaatacatgtttgcttatttgtaccacagaacaaactgtgaggaaaagcaccagtttaccaaggtgaggatactgaaataatgaacaggtttttcacgactctaatgtaactaacttaaaaaccttataacgtctgtgaaaaaaaatattcagtcataattcaagagtactgaaaacatttgagggaagttttgaaatgtatgttttggaatatagaagaattccttaaaacaggtccagtttttcaaacattttgagtcacaaactgcacttcatactactaaaaaatcatgcttgtgggattaatttggagatccaattattcgactggacttatgaactacagccacatatgtgattaaaaaacaaaaccctcaagaattaggcaaatcactttataaccctaactttattttttaggttatcttaaaaaaaaacacacaaaaaacctaccaaagtcttttgggagcaattccacagttggaaatatctctctgggaataattttctatctgcaactttgcaaaacactttctttgatgtgcgtgacttttttaatccattcattttttagaaaatgtattaattttctatcttttttttttttttgagacatagtctggctccattgcccaggctggagtgcagcagcacagtcacggctcactgcaacctctgcctcccacgttcaagcgattcttctgcctcagcctcccaagtagctgtgattacaggtgcctgccaccatgcctggctaattttttgtatttttagtagaaatgcagtttcaccatttcggtcaggctggtcttgaactcctgacctcaagtgatccactcaccttggcctcccaaagtgctgggattacaggcttgtgccactgcgcctggccataattttctgtatctttaatacacactgaaaggctttggagtgaagatacaacaacaactagaataagttccctgtcttcatacataggacaatgaaaaataatatatatgaggcaagggagacatgaagctcagagggactgctgtcaagttttttttgccatcacagtatttccagtgcccagtagagtgctgggcttagaggaggcactcataaatgcttgttgaacaaataaacaaagggcctaggctttgttgctaggtagcctgcagatccatccacattggattgttggaatatggggtggctattttatattaggctctgagaatctcatagttgctattttctgcccctgctgggtgggtgtctccaagatgaaagtctacctgctgtgttggccggagtccctgccttccttgtgtggtgtgtgacccttgtttcggtagcacatgggcaattctctgatctccccgcttcccttcttctccttggtggtgtaagcacggaagccttagacaagctaaactcaagcaaatgtttgaggcaagtaagagacgcactggtcgtacagtacactttgacattttgagggggtatgaagaacaatcacaaaaacgtacaggtttttagcatttttctgaatatcattatctggagaagatgtagatacatgtgcacacaaacacacccacaaacctctgttttcgtcaactgatatattcctgcagatattattccttcgttgtgctaatccatgctcaccgataaactttccatctttgttcagtcaaatgtcaagcagccatgtttaaaggtgaggcggggcatatcttggtttactaagcaaggacgtatatgccgtatcttgagagcaacgggcagtgatttgagagcagagcgatgccttgcaactgaaagtcacttctgagcagcccagaattttcgaaggactcctcctttaaagtgtaactgaccgtaagtgacccctgaagcagtttggttcagactttagctcgccagggtgtaaactgctctaagtggataactaggtcagcaactcacagagatcaatagtccttaagaaacgggaattttgattagggccttgaggaaagatggggtaaccttgggtagcttagaagactgagacttgtgttaacgtatcttgaattctagcgaggagttggggaggtagggtgagattctatcagcgaaggatgttcaagcctgacaaaagcaaatgtttgtggcctggaattttgggccagggccttggtgaccataaggatgccagtaaacatcatgctatatgattgcaagattcgtgtgaaaaagtaggaaaccacttcttcctatttagaccaagtggcttgtttgggtttggtttttgttttcaggctagaaaattcagtctaactgcttcatctccattcattttctgctctcatacttatgggagatagaggagtacaaagaagaaaaaggggaaaaagaaagcagaaaaactgcgtggcaccatacccgactcctctctactgctgttagacaagtatagtaaaaatagttgccacttttgacacattattgccacacagtggtttcttaccctaacttaactggaggaagctgagacttaaagaggataacaaaggcctgtttttcactgttggaagaaacttgaaaaaatacaaataacaaaaatctgtggaatatttagagcagaccaaatgtaaagagctctcctaccccatactggttggatggactaaatatttcaataatttgagagataatatatttcatttatttacctgtaatcttttagcaaaacaataaagattaaatggaattaaaactgtttttaatttaaaaaatcggggtgatctcataatgtggtgtgcgactgtgttaaccaagtgtaataggcctgtgatttttatctggcacaaatgtcattttagtttttttaatttattttatttatttattttcatttattttttttttttttttttgagacggggtctcgctctgccgccggggctggagtgtagttccgcgatctcggctcactgcaagctccgcctcccggattcgcgccattctcctgcctcagcctcccgagtagctgggactacaggggcccgccattgctcccggctaatttttttgagtttttagtagagacggggtatcaccgtgtcagccaggatggtctcgatatcttgacctcgtgatccgcccgcctcggcctcccaaagtgctgggattacaggcgtgagccaccgcgcccggccacaaatgtcattttaaatgcaggttttgcatgccgcattctcagaaaatcagttctaggaagtctgttctatcgcctagaaacctgagtttttaacactaacccctattctccattctgattgcaaaatgtaagctacgctagtgaaattgggagttacagcttttgaaattcttaccaccttcttactggtttactcctcaaaggtctctggaaaaatagaaaactaaagctggatgagggaatctaaatctgccttctagccccagctctgtcactgattggctggtgtgaccttgtgaagtcccgttcaagtcttgaagtctctggaaactcctcttctgtcactttagattataactcctgctctgattacatgacagggtttatgggagtcatataaaacatttgcaactttttgaagcactaaagcaactgaagagaatatttctaattatctatgaatttctctaacctctttttcagttgcatttacacttttgggggcgttttcaatatattatatttaaaatataggctgggtgcagtggctcacacctgtaatgtcaacactttgagaggcaaatgtgggaggatcgcttgagcccaggaggttgaggctgcagtcacctgtgttcacgctgcactccagcctgggtgacagagggagatcctgtctcaaaaaatacgtatgtatacatatgtgtgtgtgtgtgtgtgtatgtatttgttacacttatcacttgtttgatcttgtgatagcttcttatcctagtcactgtcttcaaagttacaataatttcagatcaaggtgcatcaaccgagtgtggccttccacatataccagtaggcactgggtattgtgagaatgactttcagtgctgttgacatgtccctggtaaaggtggagaggtaaagcttgttgtcataaactaggtagtataggaaaaactcacaatagtttgataacattcttttttacatttgaaaaaatccaggttagtagagagaatctatgtgagtctactcaggatgttatgacaaaataccccagaccgggtgtcttaaacaacagaagttaattttctcttggtttgggaggttagaagtctcatgtcaaggtgctggcaaattcagtttctgatgaggtctctcttactggctgtaggtctctgccttctctttgcatcctcaggtgactcttcctctgtgcctgagtggagagagaaagctctggtgtctcttcctctttttataagaacactggtcctatcagattagagccctaactttagtaccccatttaaccttaattttctccataaaggccctatctccaagtacagtcacattggagaatacagggcatgatttagtccatgacagaatctattattttctgagcaaaaacacattggactggaccattgtttcttcatgagcttgtctttattacacacagcccgtccattcctgggaaagtacgcttcccattttaaaggaaactttccttcccttgatgagctccaaaaaaccaaccttatggatctgttcttaaattgaaaaaaaaaaaaggtacaattactatcgtttttgtgaaaaatatatgaatctatactacgtttgcatgggcatcaaatttaaaatacattgtttagcttactatatctaacttattaggcacatcactgactgctgtctgcaatgttaagctttcatggagatttctgacattaaataacatcttagttttttcttaattctgctaaccaataagtgcatgagggtatattaattaatgtaaaatcaacatttacatgaaacagtctaaaaactgtttcacaaatttaacagttctttttaatggcaatattcatatttagtcttaaaattttagtgcattttcagcattaaaatgaaaagcaataggagttaagtggagagggagtcagttgaaacagaaatgtagtcttaatattcttcttatgaaagcacagtctcagtggattttcatgcacagtggcataattggtctgacatagatccagtgggtctgatttctcatggcatatggaaactgccaggcatgtaaccaaggctggtaccacgctctgagtgactcttcacgattattatgtacgcatgcaatacacgttttatcatgagaccaatccatggacaaattaaaaattatgcttttgttccctttgtgcttttcaatgtttaaaataaaataaaaatttcccatgataaaattaataatgagcaacctggaactatatatatatattttatatataaaaatatatatattttatatatatattatatatatatatctgtgttccagtgtgctgtaggagtgatgactttgtgagggtaatacaggataaactcatcaaagtccagaaggggaaattcctccttcttttcctttggtcagcatttctaggcaacaaaatgtaacagcgaatagactttttctaagaagtacctttctaagcttctagagctaattttacatttgaccctctacaattaatattataaactttaacagttcccttgttgagggaaatggcaataatgatggtataaacaaatatatattttttaaattgcatctaaatctgtttttcagtgtatttaactgttgaacacaaggatcaatttcatatacagagatggtatttctgttggatttaggaacaatagatggtaatgtctggatttttcccaaactaatgcttatactgttaggtcaaggatattaaaatttactctgttactaaaacttgatgttttctttaatgttttacctttaataagaaatgtatgtgtgtatgtatttatgtgtagtggacgtattcatatgcatatatacatatacatacatgaaacacacagaaagaggtaatgcggttgacatttcagaaagaaaatagtgaatcactactatatgccaattatgcttaaggtctattccaggcaccagagaaaaagtagtaaatgaaacagaaaaaagtttcttccttcgtggagtttcagttttagtgttgtaatatgtaaatagtatatcaatgataatatgtaaatacataaatagctaaacttgcattgcacactatattttaggcactggtcaacatatttcacatatattaactcattaaatagtgataataatgataaagcaacacctataattatcttcatttttagttttcgaagcaatgtgcagcagcgttaagtaacttgctcatggtcacacaatttgtaaagtgatagaactgaagtttaggtaaggacagttgggctgcagaggccactctctctgccactgtgcatatatgaagtagagggaacacatctattttacagccaactagttctgtgagaatggaattggattcccttgcttctcttcccttcagtgatatttcaaccttgctattttagtatcttgtactatgttcttgaaattaggtcactctgtccaattttttaaaaaatagtttcaccttaaatcttaccttatgcaaaacaaaagatgggaagatgcatattagaccagttttatcctgtgcttttgggaaacacttcataaaatattttttctttttcattattttatttcaatattcttcaattcactcattatgtatatagtttgttatttatatcattagtacaggtaggaaaaaataatttcattatttttgttgattgccaattgattcaggataggaaaatgccttttcatagagaataacattttgactaggatttttttaaaagtacattttgtttaccttttacaaaaaaaagatacatgtttttctcttgaggtttttttttaatctttcacaatgtttgaaagaaaataaagtgaaagtgaattacttatacaagattctagttttacctaaattagttgttcgttattaaatagtcaattaaaatatgacctatgtcatctaacagttttttaaaaaatatcattttacttcttattaaaagcatttatataaatttttatgatacatgcttttttttcaaagaatatgaaacatttttaatcagctaaagtgtacataagcaataccaaagcccatctgaagttaattctttatgaaagcaatggtgcagtgatttttttgctgtgacattgtgttcttcatgtgtggatgatgcttttcattgtaggattttttttcaactgagatatctcaaaatatgatctttgtaatataactttgatatcggttatataatgtttttaatacatatgatctgagttgatatatcattagaatgatttaaaattttagacttcaaaaactagtgaattaactatgcgaggctgtttccttagtccacttatgcatttatagagttttgtttactcaacagtagatggttttttttttagagccgagtgtgtcactcgggctcaggtgattctcccacctcagcctcccaaataactggtgctacaagtgtgtgccaccatatatggctagttaaaaaaaaaaaaattatagagacagggtttcgccacgttacccaggttggtctggaactcctgatgttaagccatctgcccgccttggcctcccatagtgctggtgttacaggcgtgagccacttcacctggccaacaataaatattaaaacattgccaccattgcattttttcctaggaatggaaataaagtatgctaaaattgtaaggaacccagtcaatcccctgcaggtcccaatgcccaacatataacctccttatcattcttttgaaagtttaactcccagttggaaacaaccaacttagaggcaagtaactctggaagttgaatagtgtttgttatttgctgactgactgtgggcaccacaaatataatctgcaattactatatgagtagagtataagcaaattaggggatggaacaatctggctcgatttggaaagctgtttcaaatttagtgtctgaaagtggacaattaattttgaatctataaacgtcaatgaaaatatttgtatgctttcaaggagggttcaagagaagaagaaaagattgaggatgcagcgtgttttgcatgatctcattgtaagaacttcatgaaatttatgatttgctctgtgtctattattatcattcttgcaagatgtttcctggatacaccaggaatacgcttgtgagtctttgtattcattcagacaagtggcagttgttttcagtcctcagtaaaaaatagtgtaaacactcacctcacacagttaataataaaattgtatgtttatcagttcttgagaattcatggctattaattttgatttttgatttttttttgtaaaattagaacagttattgtcagagcacaagtcagggcttcctagtggcaaataatcatgtaactgcactgcttagccagacaaatagtttaatgaagaatttatgcttaccatttcaaatattatctagaatattgcttgctaatcattagatgaaggcacaccctggagggatatgaagtgtctgatgtctccactgtgtcgtattgctgttaataggatagcatatgcacatcgtgaaggaagaacagacatggcttcgaaaaaacaaattgatccatataatatagtacttttacaacctacatgtatatatggctatatgcatttctctttagaaatgctgggttctacattttaagctacagagatgctgtgcaaagaaaatgagagtgatttgtgtgaagcctaaacaaaggaaattcagaaacatttctagtcctaattattatatcatgcatatttgtgaaacttgcctggagttcagagttgacaggtgtgatgcccttttgatctttgtcattagtatactaaaagagtgctgccacttgagctgtgaattttgttttaattcggcttcatatgagaaagaaaaagaatattcatcacatactgcttcatatcaaaagaaattgaaatgcagaaagatcctcacatctaaaagccacataacttaccatacaatatgccatcatattagtggttacaatcctggctaggacgcagatacagattttacaagatttattttagtcttgatctctgatgttgagcaaatcactcaacttctctttatctctgttctttaattaattcatctaatactctctgggaaatgtaagacactataaaaatccaagtgacactttggttattgattaatataatatcgattacatgttattgtaaataaactagctttggggaagatggtgggaaatataaacaaaaataaaataatgatgccaaaaactgaagctaagtattttcctaaggaaaaaaatagatttttcgaaaagaatatcttgtaaccaaaaatagcagagttacattgtcacattttattcctagcattcatctgtggaggagaattgaagacatattattttatcactctgcgcaaaagctgaaatgtcttattgaagaaaggagagaaaatatgcttcagagctagagaggaaagtcttaatttacaaaaggaaaaaaatcaaggattttgctcaggggttcaaaaaatggcttatttcttttttatcacttaagctggtttcttgctgggcctttttactgaataattgaaaaaaaaactgggtgggggagggactttttcatcaaaggaaaaagatagaaataaaggtactaagggaatatagataggaagttgtatctttctgtacttttatgattgactacattttctcctaaacttatagttgaaaaaacctgaaaaaatatcggcctctgaggaaaatcctacagaataaaacatagcattctctgctccttcaatccttcttctcaatctttctctctcatacatacacacacacacacacacacgtatacctcaacaagctcaaactactttatgttttaaatcagtcataatttatctttgcaaactaaaaaaaatcagtttggtgaacattgaaactttgggggaatattggcgtttttgaaagctgctttcagaataagtattattaactatctcactagatttcaagttgtggaggaaaattactagaataatgacgtgggcaaagtagaaattctgtacttggcaatcttcctgaaagacatgggattgtaggcaatctatctccgttgattctttagaatgctctacaacagtcagtttatgatagtctgaggtgttgctcttttctttcctcagtggcatcctgtaagcttttgctatcttcatttttcccgccaagctgttttctcactgtctcagaggaagtcagaagtcagtatctaccaagcagccaagtggtaggattttaaacactgaatgttttttcaacttcagtgtcccagctgcattgaaaaaaccataaaggactaacagactaacaaatttacatttttaaaaaaatcagcaagtttccaacattccttgattcatataactaaaggtcagtaaaagcaaaagagtttccttaggctgtgtctccattaacctatatgattcgaaataaggtgggaccataagtaagactgtaataataatgtaaccatgatttacatgtccaatgggtgttgttcattcatttatttaactcccaattattaatgttccattacactagtagtatgaagcaggagctgacagtcttgtaggggagacagacttgttcaggaataattataatgtagtatgataagggttataatgggaaccatatgtaccctgaggaaggactgactgattcctagaaaggatgacacttggcacttggctcacaagagttagaatatggctttgatttccttctcctttatcagtcctgcatcagtcttgcaaccttggccatagggcatcaactattctcactggagctgagttgggatgtatttttcttcacattcctcctttacatttcaacaagtttttgcttttaacagattgctaatggattaattctttaattgtcaatcctagaaccagttaatgagcaattcccattagcttcactgtattttagtcattctatgattttgaccaaaactgaacttattcactgtaactgttcaccctgaattcttcactcttggctctaaatgacttttagttatttttagatgtcaaatcaccttcagatggaacttttgccatcatcgaggagattgaaaatagagggacagatgctgtgaagcgatttccaaaaaaacaaggagtttatataaagaagatatatagacacttttaatcatggaaacatttctggaatgtttacaccctcccatggcaacttctttgaagagtacaattcatctgagtcataaattatattttcctaaaaacagtcacgtaatctcatatttttacatcttgttttttttttttatgaattggttgtagagggtgttctagccctgggatatctggagaacaattataatgactttttttcttttacaatttctaattatttttaggtggctttcatttatctagtgctctccttttcactggagcacttatcatgtgtcctattaacactggtacttgttatcagctggctttcagataatcctgcttaagtgactggttgatgacagcttttaagatactgcctctccaagttatatttctattcatggaggattctagaagaacaaaaagccttgacatgaggctttctaataaaggcactcatgtggggcatcatgcagtatggaaaacagtggaggcaaaacaatcctggtcgacttttctcctgtcactcttggtccctgcatgaagtcttttaaagctgtaactaacaacagatccctggttttgtgtcttggtggaaattaggtacttcttatttagtgctgatatcatccaggatcaaattactcagtttatttgtgtgtgtgtatgtgtgtgtgtgtgcgtgcatgcacatataatttttcttctaaagagatattattattattactgttaattttttttgatacagattctcactctgtcacctaggctggagtgcagtggcgtgatctcagctcactgcaacctctgcctcccaggttcaagtgattctcctgcctcagcctccccagtagctgggattacaggcatgcaccaccacatctggctaatttttgtagacggggtttcagcatgttggccaggctggtcttgaactcctgacctcaagtgatccgcctgcctcagcctccaaaagtgctgggattacaggtgtgatccactgtgcctggctaaagagatattatttttacaaatcctgaagcaattcaaggtttgaaagactctcacctcgaggaaataatagtggctgaatactttaaaattatatttctatcttttatgaaaatgattaaaaagaagccacaggcagaaagaccacaacatttaaaaagtgtcctggcccaccctcagtgtaaaagatagtaaacaaaaatcctaattcaatctggtttttgcaagaaccagattgattttctgggaattagctttggttgtaaggccctgcagcgtgaagggagagcagggggtagatgttctggaatgggcaccacagtgcaattcgccttagttacagtccttgccttaatattttggcatctaatcttcctagtgttttatgctgccaacttttccattttcttgagtctttatttttggtggctattcctgaaatttgccccatttgctttccacaaagtcttgcagaatctctgtgtaattctctcagggccatagtttgagctaatgcattggttggcatagcctattgagaggatatttccactggtaaatattagtggtctaatatgttaacattactaatgacaaaattgaaaattgacttgatgccaaaaaaatttcctctcacaatggttattttaactaagtctgcttgatggaaagaagatttttttccttttcaatcatttcacttcttttattcctctcctttctttctgtttgtgtagaatctagaaaaccataaataggttttccttgcactggcctatccccatgtgaggatttcgaaatataggtcatttgtgtcactgggtcatttataccactggtatagtagtgaattctttagtgaatcagaatacagcagtataatgaatcatttgaacaagatatatgaagtctcttaatactttaagtatttcaatgcattttttgaattattttttccatcatggcaatttatattatgattttctaaaggcattagctgaaacaacctgtatgttgttaaaatgttttagtatggtttatatagttaatactgaactggatctaagaaaatagaagcatgtttgtactagacaaccaggatcctctaattcatgtcctacatgatgttggctaatgcgtctaattataattttccaagtgccttccaaatcttaattttattcatttattagcttcccattgcccctgtaacaaattataatgaatgcagtgtccgaaaacaacaaacttttttattttaaatggctcttacggtcaaaagtcagaaatgggtctcactaggttaaaatcaatgtggaggcaaggtcatgtttctttctgtagtgtcaagaggagaatctgttttcttgtcttctctagcttctagggctgcctgcattctttgactcttgatccccttccatcttcaaagccaggaatggctagtagaatttttctcctatctcttcattctgactctcttctgcctctctcacatttaaggacactgtggttacattgggtccatctggataatccaagacaattttattttcagtttatttgtttagaaactttaattccatttgcaatcttaattctcctttgccatgtaaggtaacatattcacaggtttcctggattaggatgtggacatcttagggatcgattgttttgcatactacaggtctgattggcagacattcccaaaatttgataaccacctgttataagccacaaaatattatttgggtagactccagtcaggctttctttttttctgtgcaatctcaacattttattactgaatagatactttattattacttgcactgtatcttgcttttccctcagaataatttattagtgttttaaacaaattcagagatagcaaaagtttaagcaatcagttatttttctgtaaaatgaaaggtttattctcatatacaaggctgtcaaatattttgaaatgtgaaaaaatgtttcacactttaataggagcacaagactggagaaacttttacaaactatttattcaacttatcaagtgcttgttacatacaaatactctgcttgttggatgtgatctaactgacctgctacaatcagaggccgagaaggggtggtgaggccaggcttgagatacagtaggtctcatcctacttctttgagcttcagtatccatctgagtttgttttctgtgctgtaacagaatgccacagactgggcaatttataaagaaaaaagatttatttggctcacagttctggtggccgagaagtccaagagcatgatacaggcatttagagagagtcctctcatgttggaaggcaacacatcgtgagtgagcacattagacagagaacaaatggggccagcctcattctttttatcagggtctcactcctgagataactaatccacttgaaacacagcattaatctctttgtgagatgaatatccttatcacctaatcacttctaaaaggccctactacctaatactattacaatggcaattaagtttttgatatacgaattttggggcgacacattcaaaccatagcagtaccatctgaacactgggaatagcaatatcattaattgacatcctatgtgatattggccattcaggggtgttgtgagggttaaatttgataatgatgcacccgtcttgggatgtacaggaactcaacagaagataatgtctttactctctaaggagtggcctgacaatgatgccactgaatggacagcctgatgggtgttctctgggacaacttaaaggaaataagatgtagttatatctggcactagtcataattctttcctctcttacaactatgtcatatgaccttttttcttgcaagagtccatattaaccattattatactagtacttatcaacaggggaagggatatgttatgaattggagaagggcatttagtcgtagcttcctcaaatgcattcgatttattcctatatgcattttctttggagataatgaatccaagataatgtctccttctaaaacaaaagaaagaaaaagtaaaagagaaatattgactatgaagaaaaggtgtggtttcaccactctcatcaattaatgccccctcagatactaatggaaatattacctgttactgctttgaattcataacttttttcatggcacacatggctgacatcatttcttaaagtccgatagcagtctgtgtcttgtatgaatgagaaaatttcaatcggtgcaagtttttttcttcgtcatggtagtgggaagagaggaggaaagatagaacagtctctggaactctgaaacgcattaagcatccttcttgatttaacataaaatcatcaaatacatgagtatgcctggagttattctatttttttctattgcctggtggtcttttttctgtagaagaggttcagaatacataatctttgaaaaggattccaattgtcaatacaatatgcctgcaacactgctcttctaaggggaagaaaaagagataatagatgattgactgtatcacttacatttcatgttatgcccagagaactccactatgacttttgtattttatccgaaaccagtgaatcctgatgataaaacacgggcatttaggaaaatagtaataaaaggaagtttagtttaataatgtttataaggccagtgcagtacaatgaaaattagattatgattttggttttaaaaattccatatgtaccatttctttgtagaatttttaggtgcaggattattaggtgctgtaactgtttcattttctaatctgtaaaaatgattataataacatctatttacacagttctggagcttaaatgggagtaaataactgaaagtaatctgcaagtttctatacaaaaggtatttatatctagtgggtagatggcagggatgttgctaaacctcctataaggcactgggcagctccttgcaacatatacttattctgcatagaatgtagataatgccatgttagggaatttctgatctataatgagtagtacccactctcttccacctttaggctaaagcactagagagagggagaagttaatagattatgaaaacagagaaatttggagaaggctgtccaaagtggccctgaaggctggaaatcctgtttcttttctctctttttagtatgggctagcaatttctcattggcttaaccttgctataagtcagaggtcaagggaccttgtgattgcagttcatattggtcaacctcctgggcatagaacatgatcacaataaatgagagtgagagtggaaagaataggtgtatatgagtctagatacctagactcaaccattaatccctctctcaaactaacattcaactctgtgaatctgtgaggaaatgatgtctgtggcgaggttcatctatacgcagagggaaaagttaaccctgggtgcaaatttggagaggaggaaaattagttcctagagatattttgtgtttgctcaccataataaaacagtgcatttgtttttgccactttctactgtatgcccttatccattatgtgcattcattaacttaccaagttactgagaacatgctgcattctaggtactggcccatgtaccgagaatacaaaaaatggttatgaatggtgcccaccccgaagcagctttaagtgtaacgcgaaagacagtcatatgaacaaactattataacacttggagcatttatatataaagtactatgatagagaatggaaatactatttttttttccaggatgtagaaagttcttgcagaataggtgatatttacagagttgttaaggaaaggcaggtactttttggtgcagggaaggaaaaaaacgcaagactaaaaattgtcctgtgttatggtgcagaagcagtggacaatgaggccataaaatgagttaggtttttatttcaaagactttttgtggccatgttaagatattgaaactgttacctcaaagtgctggagaatcgtgcacaggtgattttgtacctgtgcaaactcatttaattaaaaactacttccaacttctataaccttgtatgatatgagctttttggaattttgtctttaaattaaaatctttcaaagtaacgtggtaaaattaatgctgtgcatatttatttgagtgagcttaactcagtgaaaattttactgaggcattttgatgtttaaaagtgattacacttaatacatatcctttgctaggctattttgattggagtgatataggatcaaagatctcagaaatatttcgagcaaaagagttcttctgtttcccaagtataagcattccttaaatcctaaaacacattggaaaatatttcttatatcattatcttttagaaaactgtgaaatagccatagttggggaatagatttaaggaaagtttataggttatataattggatccaaatattatattatgtggatgttcctaaatttgacagtattaaaatatgagtatatatatatattttgcatggtctctgaaaagtttattaatctttgtgacctccacagagctaggtactgtgctttgtaggtgcttaataatgctttggaactgatattgtagatttcacctttggctagacaattttattttgaaggaatttcaacttaataaatatattttaatagggctatacattttttccagtaatatttacttgtatatttccccttagtcctaacaaatattttgagaatgaaagtaaggaaaatattttcaccatggaatgtccttcctattcgctgtcatttttaaaatggaattttctcctgtttcaaaatagtaaacttgttgccatgatggtttttagggtagaataagattttttctctaaataatcttagacataaaaaactaaaagagcatgattgtcattgaaaaagaatatgtctaggtagttcctatctttccactcttccacgcttctttactttgcttttctttattactttttttctttctttccctttttttttccttcaagatggagtctcactctgtcgcacccaggctggagtgcagtggcgtgatcccggctcactgcaacttccgcctgcgggttcaagcgattctcctgcctcagcctccggagtagctgagattacaggtgcctgccaccatgcccagctaatttttcgtatttttagtagagacggggtttcaccatgttggtcaggctggtccttcttggcttctttggcatgatggagcaggttcatggatgatttttccaacacatctcacacccaagtaggtgataccaggagtgaggaagtagtgacagctacctggtgtctcctctttttatccctgaacctgaaacttgaaagaatttcattataattcagtagtttagccttaatatttctacttctcaaaataataaaatttcaaagctatcttttgatctaaatgtgaggaatgttaacagtgcacgtatgtattagaagatatggactcttacttttttttttttttgcaaactttataaattgttttctttcattgctgaaggtcagaatctcagtgattaatggtgactaaagaagtttgtgacagaaatttaacccagatactcacacatccagtcctatcttcctcttacctgtaggggcaaaaaaaaaaaaaaaaaaagaaagaaaaagaaaaaaaagaaaaaaagaactctggaaaatgggacagattttataactaaagatcagccccacatatactgtagatatttaaataagtggtaattcattctgcaaggaataagtaaatggcatattactgtaacccagttaaaaatattagacttcaacacggaagcatttgaacttggtgtcatggattttgggaagacctgaaaggaataagaagtgttgagattccaggaatctttgattaaaatatattaatgaaagtgaaagagttctcagtggctggtatgggagataaaataccataaatgtcagcatcatgcctgggagaccctttaagtcgttataaacaataatgggcctatgaaagacaaggtcagagtatttctcttaacttctccatacagagtctttttatttctggtacatatctcatttcccttcaagtatctctaactgtaaaaagagagataacctttactactttctctgttcttgataaggaaccagaatgaaaatgcctcagtttatatacatggtcgtggtaagctgggaacagcatattttcttgagtgacaatatggttaaattagcaagaaacatagaagtgtattttcacataacttgcacatattgcttagttgatgtatgaaggtgcattataggcaaaaatgagtcatttcttaggcaggcacttagtacgtgcaaaggctagcagtagcacgccatataaggtagcatttcaggggctatacaccctttggatttttgacacagggctcaaggtagatttgggctaagcttccatggcaaagacatgtttttggctctggttgtcattcagtaaatatttattaaaccccttgactgtttttagctctgttcttattcttgtgaagcttaccttctaattttgaatgaagaagacataaacatttattacatatgcagtgcattttaagaattgtgatagagcctttttttaagaattcctcccaaaaaaataattaccagtactttctgatttcattgcacatataaatatggaatgatattggaagagaaaaacattacatttgtaacttcaaataaagcatgaattagatttgaatattatgaaatttaccaacaaaaccttgattttatagataagtgttactgatcatagaaactaccagacataacagcactgtatacttttaaaatatatttttataagttacattgaaaccctatacacacgcttctccaattgtagtcaggttgggcggtatgtgataactaaatttttatgaagcaggtagcttcttcttatctattcaaaactgtcaagatttgctgcaaacactaggtgtgtgtgtgtgtgtgtgtgtgtgtgttttttctggagggaggaggaagtagtagaagaggttactattagcctccaccatgactcattagaaaatgtcctgaaaaaagtttagctctgtatcagacaatatacagataattcccaagtcatttgtcaagtgaaaaagaaaagaggttgttataatcaagcagctccagggacatgagcagaagtgtatcactttattattttcccttctaccgaaagcatgatatattaatttattttagattgtttagggtccaaggttttctatgcttacaaaagttatgaattaaaggtcctaaattgtaagtccttaatgtgaattaaattcacacccaatacaggaaatattagttggaaacaataaatcttgtcaggctcaaggtacttttattgctgtaaaaaaaatgaaggtcacacaataatactattcagggaaataggtaagacattcaaagagattcatcattttctatatgacacacagatacccttctaaaggatttcaatattttatcttcaattcagtttggtatttaaatattttaagtcaatcctttagaaacttatatgtactttttttttgacattatctaattacatagcttaacaagtagatgggcagtgaagatttttgatgggtgtacctaattgtttggcaatattcagatggcttaaacaattttatttataatagagcttaaggaagtccacattgatggggaatctattatacgccagactccaggcaaggtgtgtgtaggctgattatgccatttcatccttatgctgctgatggataatatttttatggttgtattcacagatggagaaactgaggtttggggtttaacaacttttcaaagatcatacagtggctaagatgtagagctgggttggaacctagggctagctgactccagagcttcttatgtccgtttaagattagtcacagacctcaccgagtatctcatcatatgcgtgccatcctataatattaataggggcataaaacttacatgtgcttgatcttagaaatttaaacaactcaagtgtttgaaaaattacagatgtttctctgtttatgaataagtatggtgctctccctttcttcctcacaattttgacttgccttataattgcttttattgagagaaatttacagggaaaaccctgttataaacaaacttctttttggatcctgaaagttgcatagatttcaactccttgtagtccttcctatctgctcttgacagaaaaaaaagagaggcctctagccttgaggcctgagtccacaaaacatttttgtcttcctgttttctcaacaaatacttctatagccacaaagtagtcccagacactgtcctgagagctttacaagggggagattgactcctgtagttatcataacaagcctgtgcagaaaaaatggttaccatcccccactgtcttagtctgttttttgttgctcaggaatacctgaggctgggtaattgatgaagaaaagaggtgtatttggctcacagttccacagtctgtacaggaagcatggaactgttatctccttggcttctcatgagggcttttgtactgcattaaaacatggtggaggccaggtgcggtggctcacacctgtaatcccagcactttgggaggctgaggaaggaggatcaggaggtcaagagatcaagaccatcctgaacaagatggtgaaaccccgtttctactaccaatacaaaaattagctgggtgtggtggcgtgcacctgtagtcccatctactcaggaggctgaggcaggagaatcacttgaacccaggaggtggaggttgcagtgagccgatatcgcaccactgcactccagcctggtgacagagtgagactcagtctcaaaaaccaaccaaccaaccaacaaacaaaatatatggcggaggtcaaagtggaaacatgcacctgtgaggagggactaaacctaagaaagctttataacaacccactctagatggaattaattcattcccttgggaaccagtctggttttgggagtgtaagaactcactacctcaagaatggcaccccgctgttcatgagggatcttccctcatgacccagacacctcccactagtccttacctcccaacagcaccacacgggggatcaaatttcaacatgagatttggtggggacaaaccaactatgtccaaatgatagcacccacccggaagatgaggaaactgagacaaatacagattcagtaacttcaggtcatatacttagtaaacggtaataatggaacttgaatccttaatgtctgatgctagagaccttggtctcaaccattacattgtgctgacaccccgaatacggtacaacctcttcttatctttcatgtttctgtgcatgttaagaaaattttgcttgtgtcaacttaaaaaatgctcaggctgtttgttatccctgtatgttacgccactacctatatttctcctaaaacattgtttcattactcattctcttcctgtcttttgttcagtctctctccccattagttcttgcttagatgtctaacatcttaaacatgtaccaacttcttcacagctctctcccaccataaaatggagtcttcctttgtacgtatttatttcttcatctcccttttggctgtgagctcactactctctggcctacgccttaatctccttttccaactgttttttgctaagtctcctctgactgagaggcttggatctttcagccttactgtgccactgtttgtaggaagctctgctcccagagcttacagtaacagctgtcactatatccagggggtacttctacctccaaacagttctacatctttttcatcctttcaatgtcacattcccaaagcttccattgagttacactccttattatagcagtcaccacctatcaaaagagcttctattttcaaatgacagttggtttctgtatttgtgcacaagactcaatgtgtaatgtgtgcaaagtcaaactcactatctccctgtagctgcacacccattctgctcctttttctaggcttcatcctcaaatgttctacctttcatgatgccctaagagttattccaaaaaaatagatcttgctttctggattgtccaagttgctcctgtgtgtaaaagccttcagtagcaccaataggataaagcgaacaccgtgagcagggcagaaaggcccttagcaaatgattatcaatctgcattttctgactttcctcgcaggcactctgcctagccctgctcaggtatgctagccatacctagcctatttactatttgcccaacaggatttcccctgtatcagctgtgtgcctttgtacattcctttttgcctgtatgaaacatcctttgatccttctccatttctcagaaacacactcatatttcatgactcagctcaaatgtcacttcctatgcaatgctttccctgcctcccacgccaaatgagttgttctccttcctttagtcttcattcgacatacactaatcactttgcattccaattaaatttttatatgcctattcccgcaattatgtgaccttttcaagaaaaaggactgtctaatttatcactgaatacccaacgttgcatacatagtaggctctcaataaaagcttgtagaatgattggagtgatcagattagtgactgaaagcaacaaacattcatataatgcatatgtacatgctctgtgccaggcagtgctcaaggtgttaggacgggaaagaacagccttgctaaaaatcactgctatcacggggagcttacattctagtagagaaatgtgcatgattaataagacattgataagcaaagtgtacacttagatggtggcaaatgttatgaaaaaaaatgcagagacaatgtagggagttctgaggaccgtgagggctgcaattagctatcaagaaaggccttgataagaaggtgatgtttgagaaagacctaaactgtaggagggaggaaaccatgtgaatattgagcatctcaccacacagagagaacaggaagatccaggtagaaacctgtatgggatacttgaagcctggtcctggagaccagcatggtgggagaggggttggggagtatgggagtattagaaaggaagtgttaggaagaaagttcagagaagaggttatgttgtgcatggttttaccctaagtgtcatgagatgccattggaagactggcagacaaatggaatacttcatagaatttaaaacatttatcttacagttccagtatgagcagttactgcccgtaagtttgtaacaatagctttgaaaagagcatcgaaggctcttgatattgtggttcattttgccatacatatatatttgaggacagccaacattcacaaagataaaaaccacatctccatctgcaatagcatgacagttgtgtgagcactaaagggcagataggacaaatgaccctgcctgcatcggtggacaggaagggagaaaagcatggctgggaatgcaggtattgcactaagtattgcactaaattaactacataactgtggattgctcattgcttttttatatactgcttaatttggaaggaagagagtatttcatataataaattattgatgcagttattctaattgagtagggtatttcttagaaactctagcacattaagatagataatttttttgttgatatgtggcttacctgttttaattttttgtatttatttgaagaagtgtttttttttttttttttttgtgatacagtctcactctgtcacccaggctggagtgcagtgacgtgatcgcggctcactgcaacctccgcctcccaggttcaagtgattcttctgcctcagcctcccgagtagttgggattacaggtgcccgccatgacgcccagctaatttttgtccttttagtaaagatggggtttcaccatgttggccaggctggtcttgaactcctgacctcaggccatccgcccgccctggcctcccaaagtgctgggattacaggtgtgagccactgcgcctggcctctttggggaagctttttaagtggtcatgtcaaagatgtcagcattcttctttatggataagaacagaaatcattctgttcatcctctgtccgaatttcttgttgcaatttcatagttactttgagctctacacttttctggtgaaatagaatgagtttcttagaattcggtgaatcggctttcaggaaattctgggagtaaaggatctttgaaagacgaagaaactcaattaagcagtcaactttattccaatctgtgctctcaagagaaagataaagttcatattttctaggaagagtgaaaagatagaagttgaatattaagttattggatgtcaggggtttatctttgtgtgaaaagaaaaaaatctgtttagaatttttcttcatcttagccacaatttcattacattataaataaatatattgaaatgtataaaatacagcatatatatacacatacatatataacaaaatctttcattaaatgaaagattcatataaatgaaatctttattaaatgaattaacagtggttaagtgctagattatttaagaaagtgccaccattgtatttgtaataccggaatctgttttgtaagattagatacatcttacatattactttttgatcataactcatgtggctcaaaaccctagggtgatgtttctcttggtttgggctctactccccaattccctcataatgaaacccaggacaatcttttcatgaaaccctcctttcaaaatagtggcacctcctctctacattggaaataggtgggcatgaaacataaacacatatgaaagctactgataagaaaaaaaaaaacttaagaagtacggtagttaagcttcaagtgccattgttcctctgcttctcaaggttagtatcccccagtgtttctacatgtttctcagccttctatcacaaaaatttctcctacaatgccttgtcacagctcttgctgaaggaatggaacattaaggaggaagaagtagagaggagcaggggaaggcagtcttgtgctgctcaaaacacttatcaaggtccacttcctacccactatccctagcccttcaagaggtcactcttccggcacagggcacttaggcaagagaaagaaataaaggtattccaataggaagagagggagccaaattgtctttgtttactgatgacatgatcctatatctagaaaaccccatgatttcagctccaaagcttcttaagctgataagcaactttagcaaagtctcaagatacaaaatcaatgtgcagaaatcacatgcattcctatacaccaacaacagacaagcagaaacccaaatcatgagtgaactcccattcacaattgccacaaagagaataaaatacctaggaatacagctaactagggaagtgaaggaactcttcaaggggaactacaaaccactgctcaaggaaaccaaatatttcattatgccatgtcatttcctaaagggcaccaagacactgataaggtctcccaaccaagggcatctgagcatggctatacagtgagatttccttgagttttgacttctctcccctcctttgacagctcagctgtgtgccttacacagacacatctccaagagtgaatcagaaagggtcttacagagtggggtgccttcttcccaatcattctctttggagttctgtttacaccctgcattaagaaagacccacaagcttccattcaacttgaaaaatgagacgtctgtaaattctccttaatcttgatgttcaccatttggttgagtgcttgcctaaaggaactgctctctgtttaataggcacccctttcttgtattgtattctagtctcattaggcactaagtaggaatagccaaatctctcaggacttttagctggaacatccagatgaggatgggttcttggcagtacctaatgtatgcagccttagggaaatagtttttaaattcttacctgcaaaagattcactaacagagcttttaggaagcgcagctctcctctgcttatctcagtcatgggccaggagctttcacttttacaaagtacactgggctcttcttatgaaaatactctagagtagcagtgtccagtgaaaatataatgcaagtcacatatgtaatttttaattttctagttgccttatttatgattatttttaaaagatgaaattaattttaattatacatatcatttaacctcatatatccagtatactatcattcaatatttaatcaatgtaaaattattaatgagatattttatatccttttaaaaatttaatcttcaaaatctgatatatattttataattacagcacctcatatcaattcttactagccttgttgtaagtactcaataatcatataaagctagggactgccatatgagacagcataacttgggataattacattcaaatccagtaaataaacctgcaaagtggaaaggtccaaattcaatcacttgactgtctaaataagaatatgctttattttgtgttgtcatgtgctaagttcttaaaatgaataatataaaatcttacaacagtaatatgaattagatatgctatttaatctatttggtagagaaaaaaattctcgctttagatgtcgatttgctcaaactcacagagaagtgagagacagaattagtttgatgtgacctcagagcatacctgccaaccacccttgagtaccctcttcaacactatgcttgtttcttgtataattgagtgaaattcaggcttttctccaatgttaaagtcttatacatgatcaaggccatgtttgatataaatatataataaaatagaattcagagataatgtgactgcatttatatattaatcctgtatgccacttgacttcctagaattgaaataagcacccttggaatggaatgcttgggagaatcggctataaaagctgtgtgttattaaaatgctgaaactttacaccagtagtttttttcttagcaattttgtatttcttaaaattcgcattttttcccctgaggcaataggaaacattataacaaataatataaaagatcatttaaggatgattattcattgttttaaatatatgaatgattagataaataactaaactgatccaatatgcaataaaactataagagcttcagtttttcaagagcaagactcttaacatattatcattcgttcaaagaaggttatttgtcggaagttatttactcttcttttcccttgcttcctgaactcatgatatgaaatcttcatttattttagttctaacttggctgattaaaaaaaaggattccctttgcttttaatattgctgaatatttgaagatcgattgaagctattaaattaaaatagtttaccccttgaggattttcaaagaccaaagaaaatattagtttaaatggaaagcattagtcttctattattactgtcttggactggattgcattagatcttcagagtaaggcagcaagtgctttataactgtaaagccagttgtaaaatgtggaattaaagcaaacacaaaatcaaacaaacatggtatttctcccaataattataagtttactggatgcttatttatctgtcattagaatggacatacaatcagaacatcccaaacttgtttactcactccaatgagatgggcagaggtaaatggcaaacagcaatttaaatataaatatatttagcctaggccaggcatggtggctcatgcctgcaataccagcactttgggaggcctaggcgggcggatcacctgaggccaggagttcaagaccagcctggccaacatggtgaaaccccgtctctactaaaaatacaaaattagcctgtaatcccagctactcaggaggctgaggcaggagaatcgcttgaacctgggaggcagaggttgcagtgagctgccattgcacattgcactccggcctggggacaagagtgaaactccgtctcaaaaaaataaaagcataaataaatatatttagcctaaaatggctgtattatttttaaatctttattttctaattctgactgtatattgattagtcaatgagtaagatttctcagaaacatattgctataaagtctaactacagttacaatttttcatagatgattcaccacagtgatctttatctaaacaatgcaggggaaattatttcgaatgtcaacagctctcttaaattggccatataaaatcatctacttatatgtaagataaacacggaggcttagaaacttctcaacattgaggtacattcattacaagtcagtaaatcagtgtttcactagcttcagctgttacctcatgggtatagctgtctagtcagaagtaggaaatataatcccacagtgctctgttagcctgggatttcaggatccgttttgtttttgatctcagtatttctcaaatcccttttcattaatgatgaaatagggtctcaatatcttaagctaccatttggaaagagaaaaaggaagattacactgttcacatcctagtcgtttgtgtatcgtcttccgtttcttcttactttactataaatacttacttgcattttgatatatttacacattttgaacattaattcactgtgtaacctttactatttggaatgaaaatgaaactgagaaacaagctaaaaagagcactgagcaactgaaagaggtgctaccaaatgtatgtaggaaatctcacataattcactgatgtctaaatcctcactcggagcttgtttcttttcatttaatctatgactgtactaaatatacttactttcctactcttaactttgttaaagcagccaattaggatttgaaagatcctaatctttcaggcattagtaagacatacatatttcaatttcagtagtaaatgatacccatatgtaaggaaaatatgtgtccaggagagaatccttacctggattcgtaaagttacacacacttcattgacatcagatggccctgacccagcatatgtagtatttgtaatgataatgagtcttcatgtattctgcaagaattcagatcaaggtgcaatgcgtttaaccacacaaatggttaaacgtatgcttaatgggtactttaccatatagttttaatttccattagcatcaacgagccatccttgtatctaactttaagtagtggttcaggaatatagttttataaactgtttatcatttatcatttatcccaagatatttatttatgcaacagtgcctagtcaattcttgactgaagattacccaaacatgtgaaaataaatgttactgttaaatctttatatgacattgaaagaaacgaagtttgtaaatgcactgtgttaactttgaaataccagccttaggtttcactagatctttattggtatatgagatgaagacctaagtctaattctacctaatgcacacaattgacctgattatatgtttggtgtttgtttgtttgtttgtttgtttgtttgttttgacagagacttgctctgtcaccaggctggagcacagtggcgcgatctcagctcactacaacctccccctccctggttcaagctattctcctacctcagcctccagagtagcttggattataggcacacaccaccacacccagctaatttttgtgtttttactagagacgaggtttcaccacgttggtcaggatggtctctatctcctgacgtcgtgatctgcccaccttggcctcccaaagtgctgggattacagacgtgagccaccgcgccctgcctggtcttttttgttttatctgtattcttgcacatatgatctgcttgggaaatgtcctttgcaattaacaaggttacttaagggaaagagagataggacttcagatgcttttttttttttttttttttttttttaagaaggaaaggaaagtagcacttatgagttagggtgtctcatttcctgcacattgttcctgaaaacgacctcgaaagattaagttatgatataagataactaacttaaaaatgccctcaaattccactttgccacctaaaatccaagggcaaaaaagacatcaatggcatctggtgactttatgcataatgttcatggccttgccgcctggaatagaggctgttaattgtcctcacaaggatttttctttaacattctggaatgcgtgttttagtattttggtgtgttgtttgtttgtttagtccctggtacctttagtagcattagaacctgctgtgcaaaggtctgctctgactgattttgcactttcatggggttctaactgcacttcttttagcagagacattggagtagacagataatctatgggccaagggaataagttctttttaagatttattttcaaaatggtattttctaggcttacatttcagtgtctaattgtaaatcctatggtgtaaaaagaaatgcaagttttaagtatgcaatgtgcctctgtatttactgtgttctctgatgagagtgtgagctgtgcaggtgggaagaagggagagctgttttaatagctgagagaattgaagaaggcaccaaaggatttgaggcaataatgactttggatattcaggttgattaactggtacttcctcccccacctgtcattagaggtttactagaaggcagtcggttctgtttaggcaatgcatcagtcaaagggtgggtcaattatctaacctgcatatttataattgggagggagcagggaagagccaaattcccttaagacggagaagggaaccaaatgtgacgcctggtaagagacactagtgggcttagataagacgtcacaggaaaagtggctggggacactgtgccagacagatctctcccattaaatgtagggaaaaaaaaaaggaactgattctgatgaaaagccccctctaattgcaaaatgtcactgtgttataagtgagatctagtattatgacgattctaaatttaagagaatatttgtatacagttttaagatatgcaacccatccaagaagggtggtgcatgccagaaatccatctatttgggaggctgaggcagggggatcccttgagcccaggagtttgagaccaacctgggcaacacaagaaggctccatctaaaaaaattttctttgaataagacatacaaccaaaattcaaatttctattactattattttttcttttgtaagaattcacttgaaaagtgatttgatctaacaagacttgtggtgtgctaaatgacaatgacacataatctggaatttaatcttaagacaactgcattagggggtagaaggaaacacagatttttaaatccattcaactgagatactggtgtatttataggcatcatataataatgtgttctttgtagaagtactgtattatatcaaatctcaaacatatatatatatatatatgtttatagtgtgtatatgtgtcagtaagacagtgtcccatttatatttttaaaaagcaagaacaaagtattttctatactttagacattattttgatagaaaattaccaaaaaggattttcttaaatgttacatctgatttatttgtattatagttactgtcatttttatcacagtctcttcaaattgcaatattttagaattaatcactgtattttttcaagttgcaaacagattcataaaatgtaccatccatcaaaaaattttaaaagatgggcttacagttgtgaaagatatgtataatatcaaaattattactcatctcaaatatttgttgaaagagtttgacccgttggtataaacctatatctgatacttttttttttcttaatgtcacatcaagttcttaaatcactagtgggctgtaaataacagccattacaaattctcatagtaataacctgtggccactgaagtcttagtatcttttctctgaatagctaaactcagcgtggttgcacatttaatgattcaatagcagggtatggatttgtgaaaaggaaatataaaatgtatttcctgaatatggagtctttgttcagtatgttgtcaggtaagaattagcggtctacagtcatccactttaatctatgatctaatcggaactcaagagctaaataagaacacgggtgattagaccttagttagtagggacccctagggaaaatttcagtgccacaggaagtgatgctaacgattcatcaagtggtaaacttgcctctgagaaattaatgaaggggcaacttcacagcccgggtatgtctgttggatatttcaaccaatctgagttttgctagcagaagttcaaggtacatttttaagacaggacagagatggtaacaagaactgtgacggtttgttcataaaaacctggactctgatgaaaatcttcctttcatttgggctaggaatctttagtagctctgccaacagtcaggaaactcttagtctcccagaggtactgagtggaaaagcgttttagaatttaagtaaaatagcaaaatcagatcttactagtaaggcagaatgtagtgcctaccttgcaatttagaacactgaattagaaatttgagagaattaaacttttcagaataataaaaaattctttgtactgcttatcttctgaaacaaacatcaatagaaaggaaaattcaagccctgttccattaaaaccattaaaggagctggcaagattgcagtttgcaatttgtgtaacttacctcctatccttcattattacagttttatcagttgaacatgatatttatgtctcctttgtctgaaaacattgtttaataattttaatagtcattttaccttaaaaatgtgatactcagaatcagaaaaattcaacagattaattttaataatttacttttttagataaaatgttctcactctatgtaaatgtatagctgccattacaataaatttaatgtcatgcatcaatcaattgatgagcctttaaagatctagcagttgtatcttatttgatctcttaatttattgtttaattcaataactaaatgtacctttactaagcatattggctaatccaagtagtatgcatacatcttccaagtagtatgcatacatcttccaagtagtatgctttcacttgcttattactggaaatgtcagaacttttaagagcggctgaaattatgtcaccagtagaaagaaggtcgagtggatagcctcagctgtgaagcatttggttccttttcagcttccctagtaagctccatttgcaaaggagatatgaacaggaagacctcagttggcctgaatctgagattaaccccctgtgattcagtcctgctaaagcaggaaattggacttaataaatattgtaacttagtgaaagttttagagcaggagattttcaagtaagagaagatacttttaagacaatatcttgctgtttttatcaccagtgaacttatttagccagatgacagtgtacatgtacattttctgtcttatccatgactcggttttaaaatttcaattattatcttgctatttcctacgtatctttaaaatcagctggaaacctttcttagaattgtgttcagctacacaaaaagtaaggaccaacagatgatgctatttgtagtgaaaacaatttgaaataaagcataattttaagctaaatttcttcatggagttattgaggatgaaatcaagtcgaggagatgatactttcaggtggctttaaaactgtataatttttacagctgaatcaatctaatatagattagcaatgattgtgtttccacttccatacactatttaaaataattgaatctagtgaggaacatggatcagggtcaaataaatgttttcatagcaattattggcagacatttcctttctgataagtttctccaacatagaagtagagtttggatctagttaagtgtagatgagttgagtcgtgagtttttctgattttgagaaaccacttgcagagttgcaggactgtaggcaccaggacttcctgcacgcagctagtgtagagccacatctgcctccagctcctgctgacttggctgcaccgcagcccccttaggccctgctgccagatcaggtgtggagacactgcagagctgtcactccgcatggtttcctgcaagtcagctatctcgttcccatctgtgttggtattctttcctagcttttttcactgcttgcctggcatgcatatatttatccgataagcctcaatttggctttaagacttgccttcccaggtagagactaaagatgaaatttctccatgcatgtatcttccttttaattgtgcttgtagttaatacttaattcttaaatttgagatgttactgttttaagatacactctatcatgcatgttagcatccgtttacatgttgtctatactattttgaggatcttaatgcattaagatccaccctgttgtgagttttgtttgctttatggtgtaaataagagaaaatgagattacttcagtatataaggacttttttcactttatgtttatcttacataattctttaagctaagagtttacactgttcatcagtttttactttttagaaggaacttattcagatagctttattattaatattcagatgtgccatcctgcaaagtcagggatggattacaaggtgtgatacttttagtccataaatggtttttctatagctagagcttgatcctttgtgctttgcaccattaattggcattttcagctatattcttgattatgcagctaaaatttagcctgaagtggccaatcccgcaggctttgtacttgaaaaacacccattgaatttattaagagtggtgtactcgtaatggccattggaacaggcttggtgggtatcctgagttcaaaaatgaaagggcagatgactcaggtacaccatgctgtgattagagagctatgaacagctttctccacttgcagattaacatcatttcatgctctattttcaaacaagtaatatctgttctaaaagtagattccaccagtgctactaacgtaccaagttccagttgtcctcacatgaaatagtccatcaggttttcttttccttcaaggaataaatcattattgctttcatgtattttggcagatttccttagttatgggaatgtggtttgaaatggtttatgacttcctgcttctaaacaataagaaatagcttgagtgtcttggccctattacccaatatgtttgttatggaaactgtttggggtgaagtaaatggaaagagaaatatgaaactcaggtgggaattgagtgctagctggatgatagcttgtacatttctgccttatagattcattcactgcagtaacagtaactgaatgcctacatcatgctaactactcttctagcttagaagttataattaaagttataatatgtgcttccagatgattataagctggaagcctgccaaaattcctattaagtacataggaatgaaatgcaacttccccattaaaaaactggaaaattgaacaaaaaagtcattaaataattttcaccgtgttccatttgttataactgaagttacacaagaaccacattttgaaggggaaaacaagattgtctttcatttgtcttttaaaaaaacaaccatatacactatatgatttattatgaaagaaattttgcaaaatataagcaaccttactttctgtaactatttttttcccaccacagaacaccacgagtaagcaggcagtttatgtttgagctgtgacaatttcaaatgtgaacactagattaggtcttcttagttctgggaaggtcacaccctaaaacttatttctattgggagctaacatttccttgataaaataagttacctaagtgttctaaacaggaaataagtgctatttgatctatttattttcaccagatggaaatattcctccacatttcttgtttttaatttgtgtttcttattttgaacgaattcataattttgccctagctacataaaaatgaccatatttgaaccagttctagatctgacaaatgactgttgttaaattaggattatagggaaactcagaagttgtacttcattgtcaacaaaacaaaataagactgtaaacataagcccttgcattctgggactctatccaaacgcattcagcaatttggctgtgcccaccttcagaaaagccataatttgattctaggatctgggtaccataatgcagtcagaggatcttagcattcaataggcactcgtgggggctgggggttagaagttggtcagttctgtttccttggcacctaaaatctattctcctcctggagctctttgctgctcacagaaaagaaaagtacacaattttatacataaatgtgatttttaaattttgttttgcaagaagactctcagattaatcattccagaaaatattttgtaactttaagattttaacaaatctgaaattttctttaatgattgcagacaccgggaatcataaataaataggaaattatcctcggttattaactgtgaatgcctttttatttcataaaatgctttatgaaattttatcataaaatcataaaggtaacgtaaagtgatagaagaagaagggaatataggaatatagatagccttttctttctttcttttttttctttgagatggagttttgctctgtcgcccaggctggagtgcattggtgtgatctcggctcattggaaccttcgcctccagggttcaagcgattctcgtgcctcagcctcttgagtagctacaatcacagatgcctgccaccacgccgggtaatttttgtatttttagtagagatggggtctcaccatgttggccagggtggtctcaaactcctgacctcaggtgatccgcccgcctaagactccaaaagtgctgggattacaggcgtgagccaccgctctcagctatgggtcaccttttcttgtacacttccataggttctgattttgtataaccaacctgaaacatgtttcaatgccaacactaaaatgaatgtatttagttaaaactctttggtttccaatatgagaaatcagcggaagacattttatgctaaagttgggaatacatgggacctaatcttcagaaatggattggaaattcaaggccatcatgtgtattctgtctccctccctctctttctctatctctttctttgttatctttttcttttctagaggtaaagcatggctgacaacttcatagttcctgaattagcctgttatatgcctgtttacctacaaaactgctactgtgtttgggtggctatttcaaatgccagggagagaaactctggctcagcttggttaagagttgactcttcattccatctgccatgcctagaagagaagagtcatgaggcaggaatatgccttctgaaggactgtgactctagcaaggcagggattttctcaaggagctatggataggtatctttgaataataacagtggtaatgataaataaacacttactgtgtgcccaaaattgtgctcagtattttacttatgtcatcccatatacacagctattagtaaagtgctgtaagtttttagaaagtgtttttacatgtattatcttgttaatcctaacaattcctttatcaaataaatgctatactttctattttatttatttatctaatcccttttttttgtgagataaagtctcattctgtcacccaggctgcagtgcagtagcacaatctcggctcactgcaacctctgtctcccaggttcaagtgattctcacacctcaatcttccaagtagctgggactacaggcatgtgccaccacacaaccagctaatttttgaatgtttgtagagacgggattttactatcttggccagcctggtctcaacctcctgacttcaagtaagccacccaccttggcctcccaaaatgttgggattacagtcatgagctaccacacccagcctactttctattttatagtgaagaatttcttgctaaaagttgagtgtgtttttaagtgaaagagccagaagggaaacccatgatttctgattcctggttcaaagattttacacttgaaagtggtctcctttctgcaaggtgtcagcaatataaaagtatgtgaaacatggtagttgatcagacgaaaacacctacagccctgtatttagtgtctgttagtagcatcatggacctctcataatcatacattgtgtttttcttctctttttttggataaaccttctattttttttttctttttcttttttgggaatgtattgcttaggaatgcactcagctgcaagaaatagattcaacagagtggaatgaggggtttatgttttccttatacaagactctagaagtcatccgcaacttccactgaagaatcatggtgctgctttcctcttgcccaccatcataaatattttattttcattaccatattccccagagggttgctgtctctccagccactaagttcctatttcaggtggggagaaagttgagggaaaacttcacttcatcccatttcctttctattctgggagggattcccttcccaaagatttttctgtatatcttctgaccacataattctgtggtcagaattatgtcacacagcttcccctagggacaagctagatgggagtgtgaaggtttttctttttaatttttatgacattggaagacaaaggaatgggccatcccatattccatttagtgggactggaagtagcacctgagatcttggtaccacatgcttctaagttctcccatgtagttttgcttcagttacgctttttcagcattttctttgctcagttgagtgatttcaatttcttttatgtctcttaataggattgctttctgacttttctctgacctctagagtccctttcattgatttcttctgaatccctgtctccacccatacccaggagggtgtatatacctacatattcccaagaggatacttgagaactgtcttgttctctctgtacccttcctttgcatctcatagatgaaactggagagacatggagaggcaaagttacacagcaagttagtgaaccaaaaccacactccatgcctcttaactcttaggcctagctttttaaagtattactaaataataagtttttatgtttatgtatgtcaaaattttggagcaaaataaaaccactggtgtataaagtgtttattacagaaaaaaattcttgaagtctgtcatttaaattccgcagaatcctctgtttattcaaatcagcagatgttcattgagtgcctgctaatgtgctaggcacaacagaagccggggtattgcagtgaacaagaaagagtgacccttggccctcatagagtttatgtgccagatatatttaaagtatgcaatacttttcatagagtaattagatatttattaagggcttactctgcatcagggactgttctacgtacaatatacagtttatgacaagaaatagaagatttctgctcttatgttctagggatatatagtatagaactcagaggccgtcattctcctgttgtttattaccaaatgtaatgaagacatacctaactgatagtatttcttaatctatagattggagtaattcatatgctttttacaagttataatacataccttatgactgtgtgtgcaatttagttggcttaaaaattgatttagatttaagtgtaaatttgttggactgaattctaacagctttgactccttctttattcttttgttttatagaatttaacttgaatggaatcttttatttgtctaagtctatttctgtctagtaagggagttgaaattgatcatgtcttgactttgtgggccatcagagaaccatgacattccagggtattgattttgtggtgttaaagggtgacagatctactgttaaagtgccgagagagaattgggtttcagattgtacaccataagcagtcttggcttttgctgagacatgactagctttttaaagtaatggaaggaattgtaagtcttaggtaatttttagtgcataattttgaaaagattaatttcagcaagcattatgtaatcatgcatagaggggaataagttccatctatgataaatattgtatatctaaatatatacaacttggagtgtgtgtgtgagtgtgtgtgtgtatattcagaaagtatactctatactaagggtattgagtaatgtttcaagacagcatcactgaacctttcaaacatatttattcttacatttggaagttgcttaagaatgacaaattttgtttcctttcatacaattgattcttgtaatcattatttcgaattttgcttctgttgtgctttctctcattcagctattataagatatgagttataggacgggcatggtggcttacgcttgtaatcccagcactttgggaggccaaggcgggaggatcacgaggtcaggagtttgaggccaacgtggtgaaaccccatctctactaaaaatataaaaattagccaggcatggtgacgcgtatctgtaatcccagctactcgggaggctgaggcaggtgaatcgcttgaacccaggagacagaggttgcagtgagccaagattgcaccactgcactgcagcctgggtgacagagtgaaactccattgcaaaaaaaaaagatatgagttatgatgcccacatttcagaaaggccagaggtctacaagtgtaacgcttggcgatttttcatttccctctaagacatagaatgttggcaagtacattataatagctgctatagacatgaactaaggaagagtaaccatggtcgtctttcattgtcccattttcctctggatttgttcttttaaattttatgacctttggtgaatgcattgaagataacattttgattatatgattattgtatggaaaactatactgaactaagtccaagtgtatctttggaaactaatcagaggtgtaccacattcattgacttaaaccaatccatcatagtcatcttctaatttatttccacatgttcttccaagttcccattcttgaataagactctgacctgcaaagaagaatggaatgtagtctataagtatgtttgttctgttttctaacaacataaatattttgcttaagcagatttgctaggaagtgacaactttgaaaaattggacataggatctgctggaagcatttcagttcgaagcaatctaaatagtgcagaaggggaaaatgaaatatcaccatgttttagagatgacagttttgtcaaagattccctttcactctttggcttgaaacaaatgaagtaaatcaagtatatctgttcaaagtatgcatgtgcactcactgaggaacattccttcctgagaccgtttcttcagagacaaccaatgagagaattatcattgaaaaaaatgtatcacgagttggggagactatcattttcttggcttaatttttagtttggcttttgaggtcataagatttcacaagaacaaagtggtgcctttaagaaatgaggaaaacctacaggcttaacaccatttgagtatatcattaggtacacgtactggttgttcttcagaaatatgattataattttgatatgtggtgtgtgtgtgtgtgtgtgtgtgtgtgtaagtgggagagagagtttcagttaagaacttaaggttagctagatactaatttttatggatatattaaaaatcccagtaatattccctacctgaaaagtgttgttgaggtacatttgaaaaggtataacaagtttgacaaaacttgcttttaagaacaatgtaatcactcattggaaaggcagtggagtgtagtctacttaagagaacaaagaccagggtgagacttcctgtgcttaaaactccaatactgccgttttagatctgtgatttggggaaagttaatttctcagttcctgagttccttctttgtgaaatgtggtcactggatagtatctactttctagtgacctggcatgtcagcctgaaaccttacaaactttcagtagaatgttagtatcactaattgaaactcttaacatgttttgacgccaagaataacagcagaaaatttttaaaaagtaattcagaggatgaattaaaagctcaaacatttcaggaatcctgtaatacatacattatgcttctttcaaggtagtagtaaatgagtggtgatcacataattttaacaaaagaagcattgctgattatcatttacgtcctatgaatattatgtaaagtgctttagaatcacactgtatgggagtcactggtagtttctgattttcagattctataatcagtgggttgatttcaagttcagaggttattctcagtttttattatattactgttagaaatagcagtgccatgtaaatgcttgtatattttaattataatttgttcccactcacctttagtaagagtggttatgttagtactgttactttgtgaaacaactttcatttactacgttacatttattaattctatgttcacttgtgtgctatatttgcctattattaaagaggtatctggtagtataactctatctgaataacaacctaaatctttcacataaaacgattgattcattctagtatacatttaaaaaatcttatctgcttgtacattttactaaattttagagcctatcatcttttcatattaataggattgccatttttatatatggtaggattctaggtgtagtttggctttgagccataatatgatctatccttttaaccctttggaaacattgactttttcattgcattagtgcagtcttcattttatttccagtccaagatgccaaaggtcacttcattagacacctcatttgcctttcttccctgtagtgttctgttgtcttatatactaagtatcattaaaaaaaattctgcttccattaacaaaaagtgagcagagaacaaaaagccaattatttgtagcacataaaatccttatgataatttggtagactttaattaaactaatacatcacgctgcacttataatacaaaagagcaaaagagaagcaaataatcttttttttgttctgttgagaaaaccatattgccttgtaatcaagcattttaagacttatgatctattttgaagtataagattttcaatgcttttcatacaatgtgcatgttaaaattatatgctatattgattggaaacatacccccaaaatttaaaatgaaaatatgacaaagcttgacttaaagtaactttgattatattttatgatttttttcaaactcttcaaaaataaaaggagattctccaaattcatctcacatcacacagaaactttactacaaagaatttttttttgtatttaacacatttttgctgggatttttgcattgctgtttattctttttgatgaaccaactgatattattaatgcaaaatttgctataaattaaaaggataccggtgtaacttatttatctttcctgcatttcacaactgggttgtactggaattagagatacttagtctttgtttaaataatctcatccccaaatcttcaacgtctttgtgatataattctcataatttaagtggaaataaagagccgaattgagagtgaatacatttgctttcaatctaaggtctgcaatgttatattgaacatgtcctgtcacatctctgggtttcagcattatcactagtaaagtaaataatctggtaaagaatgattccaaatggcctccttactccgttttttttttttttttttttttttttttaaatggagacggagtctcactctgtgtcgttcaggctggagtgcagtggtgcaatctcagctcactgcaacctttgcctcccgggttgaagcgattctcctgcctcagcctcctgagtagctgggattattacaggtgctcaccaccacacccggctgtttttttgtgtttttagtagagacggggttttgccatgttgcccaggctggtctcaaacttctacactcaggcaatctgcccgcctccgcctcctaaagtgctgggattacaggcatgagccactaggcccagcccctggtctcatttctgaaattatatttctacattagatagtaatgtaatgtctttcttgtaccaaaatcaatatttaaatatgttcatatcaatctttaaatcaatgtcttagtgtttacaaaaagtctttctgaaaacatttctagaactttctaatggtcagaaagcataggtttttgaagctggtaaaccacaaatcatattaaaagatagttatattcaacttagaaattcacgtattatcaaccaaagggatcatatagaatcactgtgccagttcttagattattaacatatttttcataaagaggaaactgtttgtaatttctaattttgtcctatctcacatttacaaattcaagtctcaattaattccttggacatttaattaatttgctttttagtagatcaaactgttagtgggtttatcaatcacctggaaatactttgtatttttctactcttctctgtgggtgttcaaggctccccaagtagctctcaattttttaggcacatgattgcaattttagtgtcatttaaggacagccaaacttgctattcacttcatcttctcattagcatctagtctctgtttctctcaggcagccttggcacatgaataccagccaatactgcttttgtttccaaaggtggccggtattatggcctgaagaggataataatgatagtttaagtttgtatcattttacgtttttattatgagccttcagaatggaaatgaattaactcttaactttggccaaatgtaattagaactctaaagctgggatccattctaatgttttacttatatagtgcatagtggtatggtctatttgtagtaatctgtatccttccctgattcagaaagggtgtttctttaaaatagttgttttctggccaggcggggtggctgacgcctgtaatcctagcactttgggaggtcgaggcaggtagatcatctgaggtcaggagttcaagaccagcctggtcaacatggagaaacccccatctctactaaaaatacaaaaattagctggacgtggtggcacatgcctgtagtcccaactactcaggagactgaggcaggagaatcgcttgaacccagaagacagaagttgcagttagctgagactgtgccactgcactccagcttgggtgacagagcaagactccgtcgaaaagaaaaaaaaaaaaaagcaagaaacaaataaaatagttgtttttataaaaacaataaaataaaagtatggaccaagagaaagatgatttaacattgaagaacaggctcttctagagcaccaatctttacatacttaattacattagcattctcttgacaaatagttgttttatttgaatactctgtcttttgatagttattgaattaatttgtctgtgtacgtctaattgaggatgttcagaacagccttgttatgtttgtttgttttttcttagtatactcgattctattttatgtaggcttcagctaagtagagacaataggaaaaacagctcatgacggagctgagtggaattaagaaaatctctggtttaggcagggaaactaaatcctctcactgttttctgacctcaccttgtatcttcctgtcaactttgtacatataagcagattgtaaccttggagagaaaaatgtaagagccaagtaagtaaaactataagaaatagttttaccatttcaaaagataaataaaagtttcctcagaaccaggactgtgttttatggtgctttgtatttccttccatgcctcttacatgactgggctgatacatacatatggtattctttctaatgaatcctgggattccatgattttaacagccagtgaggaaacactgattgcttggctatccaacccaaggcgttcttctttttttttttttttgagttcaggccattcttctgcctcagccttccgagtagctgggactacaggtgcccaccaccacgcctggctaattttttgtatttttagcacagacagaatttcaccgtgttagccaggatgttctcgatctcctgacctcgtgaaccgccggcctcggcctcccaaagtgctgggattacaggcatgagccaccgcacccggccccaaggcattcttttgtaagttcccaaatcatttatactctgaagtcagggccaagtatctatgatgaggaattcgtataatattttctatctctctattttttttttttttttgagacgaagtttccctcttgttgcccaggctggagtgcaatggtgtgatcttggctgattgcaacctccacctcctgggttcaagcgattctcctgcctcagcctcccaagtagctgggtttacaggcatgcgccaccatgcccggctaattttgtattttcagtagaaacggtgtttctccatgttgggcagacttgtcttgaactcccgacctcaggtgatccgcccgcctcatcctcccaaagtgctgggattacaagcgtgagccaccacgcctggcctctatctccttttcttatgtagctaatcagtggttgactcgctgactaaaatacttatttttaagagtatagttcaaacggcgctaatggcctttgtgtgtgtgtatactctaacttatgtaaatgggtatagacttccctttctttgattggatagaatgagtcttttaattaattctttttcatgttgcaatttagacaactttcaggtatgtagaagttgcttcatgtgtatgcatctatttaaataattatgatagaatatatatttgtgaatttaaataatcatgatagagtatgatatatatggaagtttctagaactgagcttcttaacactttttttatattagtttaggaaacttgtataagtttgcttattttttcttaaacatgccaaaaatggagatatctacaatgataactttgctgtctattttaaaaagatttgaacttggatttaaaaaaataaatgtgaggaaacataatgtaaggggaacctatttgatttgagccctaattctaccacttacctgtgtgattttacataagcagattaaacactctgagcttctgtttcaagtgtaaaatgagaaaaatattattcctactttacaaggactttttgaggttaaattagatagttaaatgcaatcttgtaataaacattgtaggagagaaaagatttctttttcttaaccattgctagattgatagctgaggcacccataacaaaagatagaataataacagcaaagcatgcaaatttatttaatataagttttccatgacatgggagccctcattaaaaaatgaagacccaaagaaataagtaaacatatgtttttatgcttgggtttgatgaagatgtgggtagtcatagaaaagtatgattggacaaaagagatgtggtttaatgtctataaactgaggggaacttagcaaggcctacttgttcagattcttctgtgtggcactgtgtcttcaaagataaggatgttcctttccttcgagtatatggagggcacctctcgaatgagggtcttatgacctgcttcaagggagaagggcaaggggaaggtgagagttggctttcctgctcctgctgttttctcaaatgccaaggtaccatattttggggtggtgtttcttgagccccatcaacatctatacaactgtcacagtaattaataattattgtcatttatggtttttgatatatcatttgtataaatgagaagaaagtgaaataccaaaataccaaccaaaattgtctttctcatagtcctccactttcctaaatcccatgttcactctatgtcctgtctttcatttcaaatggtttcctagtattaaaaaagaaaaaaaaccaataaacttttcaatgttaataataacactggttattcttaaccaatggttcaactcctctattatgcatttatgctctaaaaattaacatcaacttcctgttgttagactatggaaacttaacatcaatttgattttctgggtcatggaccatactctgcgttttatgtcatactttttatttttccctagatttgaacattagacaaggaaaaagataatgaatattcatggaatcattttacgtattgccaattatatgcaaacacattcaacagatacttgtacttaatctacaccaattacatagtgcatgatttagtattgaagcatacctaataaaaataagaagaaaaacagacatctgtttcttttaaaatatatatatttccctgtctgtggttttgaagtttttcagggtcacagataaaggacaggtttattcctatgtgtgggtgtgcagtgtgttcttgtactgaggtctgagttcttttccaattctctgcataattcagttttcttctcctagcactagttacctattgttggccaagaaggtctagagaaggtaaacaatatagcttttatataagtgaacattttactgatttttttaagtaaagttctcagcttaatttagcctctggggtatgaaatggaagctgagtgagacacagagataacctggtagaagctgctcaaggaatgatgtggcttcatctgcatttgtttgtgtatgtgtgtgtgtgtgtgtatgtgtgagagacttgttgcctgagtgatagaacaaatccaggagaaaggttgaaaggcaaagacaaaggccatgtctatacaacttcagctgaattggacttgactgaaagattggtttggtctgatttactagagcatatctcctcagtgtctgtgatctgaaaattgcttccagggccattttaattagctgattcaaatcaaaaccaacacattctggtaacatccagttctactctgacccttaccaaagacaattttcagaatggtgattcctaagtagttgtgtataaactcaataagtgattcaagataggcactttttgtttctaaacatttaatctttaatggtgagaaaagtacctatttcttttggctttagtgacaggtgagtattagtacaccattgcatttgttgagcacatcacagcttaaaccacaaaaatagaagcctgttcttatgtagttaacatatgaaatgagagagtttctgttcctcgataacattttaatacgtggacttcattatgctgcatagcaatatgattaatgtaacatttaaatgcattatattcctggggatgcttttaagttaaaagtgtaaatcaggtcctgaaaataaaaattaaaacatttgacacctataatttcctatttttttaaaaaaatgtttttcctatctattcatttattaaaaaccttgcagaaaattttacatagtatctttcgcttaagaaaagaagagaaatactattataggagaagaattaacaagagaagcttaatgaaattttaggttgttagactaaatttaagagagagatggggaaaaaaaggggcaaaatggggatgttagcaaaataaagagcatttactatagtttgaaagaggtgtattccacaatctaaaatatgataaacaatagaaagtcaaagataaccttgtgatttcaaaatattaaaattacatatgtgatactatgatataacaagtaatatgatttccctaattggttatttccaaatatgcatgtattcattaatccaattttcagggcaaccaaacatgtaccaaaaacactgaaaagaaacagaaagtacatgatatttgccttcatagaccacatggtagccttgtatagaatgtgataattaaatgaataacttcacaaaaatagttaaatagttgataactgctatggaatcataccatatataagaaaagtgcataataggaaaatctaatgtggtcctggtatacattactttaaggtagttttagttggttagtaaataacgcacgatatcagaaactttgaaatatttagctttcatctgtgtataaggaattttagaattaaatgtgcagtgatatggtttgtgtaaattaacatgaactttctgaaacttacaatttaaatcataaagattcacttatagatgccttggtaaatgtgttttgctttatgtaagtagcccaaatattcccatatatattaatttttaaagctattgctagagaaacaaaaagatattgtttttatttctagaagaagacaccatttacattttaaaattaagacatattttaatgctgcttaactttatacagctaatattgataatatactgtcagagcattttaatgcattttctgttctctaaacgattaattttaaagttagtcattacttgttttattacaccatttactttcacaaataagttggtccaacattcagtgaaataagtcattaatttcttttctaactttgactctagtgtgctgatgcattgttacattggaaattaagtggaatatttctcttctctgatcctaattcttaaaaataagcactttgggcagtgaaatgtaccatgtttactctatgaaagtgatttattattattttttggcaatattcagacttactaagattttactaacatcaattgtaccaccatcgaattggaaaaagacactttgtgtactttctggcaccgaaagtagaaattgacctgttggtcaggctcaagttcagagaaatatttaacactatttaaaactgacattagcaccaaaatattttgaaggagtttttatcataacttttatttttccaaactagaaacaaagttaggaaacattgtgcttttacagtcatgactttgaaaaggggcgtaattcatccttgaccagagattagcaggccatttgttgatagcatataacttgccccaatttctatagagaaagtgagctatctaatgattgcattaagagactagagctacttggaagggtgtgaacattcagatcaagctcacatctctgagatcttagggatgtgcaagttgtaaaagcactgacaacaaagttaccatttcattcttatttgtatttgtaatataaagaaagcaaacaacactcccccagccctcttttgacatttcatagccttgaaaagcttaaactctgaaacacactaaatgcagtgtttcttataccatgcaaacatctcttgtcagagatagcatccctgagattagccagctgtattgatttagatgcctcagggttgttaattgtagtgaggactgttatgtctctatggcttctgaaagaggttatggctactgcaaatacatcttaaagaaggaaagaatactatcagccaagatgtgcagtccaagctttggaactaggctggcaaaaccctactcacatccctgtaaagcagacatatatttttgtattttttataggtggatacagtgcagaccatgaacccctctggccacattgaggaatcgtgtaaaatgaatgtatgtgctcgtaagtgaaatatatgcagtgttccaactcaatatgttggatcctaatagacctggatttgtcttgtgtaaaaagaaatcgattcccaaggggcaggatcactaactgattaaaatgaagctttgagtttgaagaaaacaaaaaaggctttaaaataagatctctgcaaaaaggaatcaaactgtgctttttaaacaagtgaaaaaaatcaagctctcaatatggaataaaggagggatgtgagagaggttttgcaatcttatcaattactgtggggaaacagaatcagatatcgccatactcaggagtatgaaaagaagaacaggaaattctttttcttcagtttgcacttgaatggactcaagcaaagagtgtggatatgtatcttgttactgtttatagttaataatgtggagattagtatatatgggatttcatttgccttgtttgaactaattggatgcattatatagaaatcacctgagcctgtgctagatcaacaaagaaaatggaaatgtatacctcaggattgaaatccgagaaaattagacaattcaatgctatttaataacgcattaagaagaaatactattgccaatcagggaaagtgagaatctagtgaacgtgagaggaagtaaaatttaggcaattattacacttgttgaaacataacttatgacggtgtaaaagcagaagatagatcacagtatatgtcacagacattttacacagtttccaactgaatttggggttaactatgtaagtgttctaggaatgtatggccattatatcaataagaaactgtccttttaaatttgtgatcctacacatttatatatgcagaagagggcctttttaaatttattgaggatgaattgcatgctggaagtacctctttgcattacagttacttgctcaattgaagatactgtataaagtctaatttttgtatgggtgtgaaggtatgtgtatgcacttatgtgtgcgtgtacaagtggaaggaggtaaaatttaatgattagcatttgcactttggtttgttacctagaatgtaaagaggtagagtaaactgtcttaagccattctgttatcattattaaagattattattcacaaaggaagcaattttaaaatagaatgactacttcaacaatttgccaattaaatataatatttaatgcaattgagccgtttaaattaagatgataccaacgcctgaaaataatgagagtaggctcatgtgaaattagtctgcagacacttggaaactcatagtgtcctccttcaggctgtctcacatagcggcaggatgtgaatcatgggtgctattatagaaaaaaatagggaaatatctgtgttctaactataactttttaattctaccaataagttacatgtgctttcccccacttttcttcaacctaaattatataaccagtaatgatatatcaacatgaacaagatagtgaatatttaaagcagactgacatgtttttgtgtagtcaccatgtgccataataattttgaaactgttcttctccgctatttgtactcgtttctttttatcttgccgattgactttatagttaaaatttttacctcttctttctatgtgacaatcaactgcagttagtaccctatctgtaatattacagggatttttgtccttatttatgatactataataaattataagccaacaaactgtataattctgttgtattgaatattttttgtgaccaaaataataaaaaaaactactttataaaatgcctatatttcctattttaacagtctcttaaaagataatgggacataaaataggttcatattgctggcttttagaatacactctctacagctttacgaatggagagaaaagagtttatcttagacacttaagataaacagatttgactgagttaattatgagagtgtgtggagagaaacactctgaacaagttagaagtctagatgtcaaattttgctgtgccactaaacagccagacatgagggacacattttttgagttcatgggtattcagacttttcaactgggttttggaatacactatcatttttaagacaattttaagtcttaacttcaaaggttttggtaacttagaaatgtttcaaacagatacttaatattcatcatcttaataatcaatattgatcattcatattaagagaatcacatgctggtttccacttaaattgacctcaagcgcaagaccaagggacagtatgaattgacagttgttgctacctcaccattagtttaacctaatggaaatatgtactgaggtataagttatcgtgttctgggatcaataggtccccccctaagttaattgaagcaagcagtacccaagtacaaaatcactcaatttgtaacagaggaaacctttttgttctgcatcgagttgaatgcattgcctggcagaatattaaagtgcaagaaccagtttttcttgctctttacccctgcaaggattgatcagcacatgaaggtctccttgacttcaaaggcatttctggacttggatcagcctgattgagttcagaagagaaggaaacactagcccctgatgtttattgctgtaggctctttcatctaatagtaactctctgctttagaagaagcaacaggcagaaagtcttgtgacttttaatttcacgattaatgtttacttgcaaagtgcctcacacagaaaatagtgcttttattttagtttcctgctactactccaactgtgaaaggtcagggaaccagtaggaagcaaaatgaaagcatgtatagagggtttttttttccttctctgaagcatgctgacttgcaaaatagtgtcactttcagaatcccaaaggtgtggtggataatcttcagaaagccttatttagagcactggtcacactgaattttttatttaggtgaatttctggccattgatgaaaccgagataaggaaatctaattttgtcccattaattccttattttccttagaagattagacgagagagttgcagacttccacctaccaaatctctcttatgtccccctgtttctaaataaaccttctaccctttcctcttgcctctattttgggggaaaagaaaaggaagactaaacttggctcaaggaaaatggctatctacagcagaagaacagctgtgaatgagaatcaccaactgaaaacttatgtgcagaatccatcattagatttggactcgcatgaataaaaatgtcactaaaatataaaacaaaatccaaaatgtgctattaaggatcaaaaccttgcttttggttttagttcttgttatttttttgaatgctattatttcacttccctgtttggtaaatacactttagttgaactgattctaatatttctctgatgacttttgaaacttaagttactgagtcaattctgtagaggcgatatattcattgctctcttaatattcttgttaacctcctgaagaagatactattatgttcatgatacccatcttgcagatgaggaaaatgagatacacagagtttcagtaactagtaaagctacagaactagcaggaagtggaactggactttgagtccagaggtcacactcaacaggagggcctcagagctttgatgccaaatagtaattaataaattgagaactatctagggatgcagagaggaattttatggttccttaaatcacataaccagtagcttgatggattcaacttgcattacttaagatgggaaaggtactcattagttctagcatacagaaatattggatgaagatgaaatctgatatagaagatctgctttaaatattgtagacagggctggccatggtggcttatgcatgtcatctcagactttgggaggccaaggtgagaggatcaattcaggttaagagttcaagaccagcctgggtaacatagtgagacctcatctctacaaaaagtaaaaaacaaaattagccgggtgtggtggcaggtgcctgtagtcccagctctcaggaggctgaggtgggaggattgcttgagcctgggaggtcaaggctgcagtgacccgtgttcacagcactgcactccagcaagaatgacagagagagaccttgtctcaaaaaaaacaaaacaaaacaaacaaacaaaaaacaataaataaataaatacatgctgtagacagaaaaaaagggaaattcttttccaatttacctgctttgtgggcttaacgtatgttcctgtatatatgtataatttgtgtcaaaaaacattttgaaaatgagtatcttgccactggaacctagatggaatgaggaaaatggcaactgcattctttgaacagggagcgttcacagcctaatggggtcacagccaaccatgcaggctagttgttacaatgtcgtgtgctaaatggcagaatatcatagtgattaagagtgcagtgtctggaattcagcctgcttgggtttgaaacgtggttcatacatttacaagttgagtgaactttggacaaattacatcttactgcctccatttcttcatattttatatgttattaacaatatttactatttaccttataaattatttatgactgttgattagattaacccagcctatgtgtggccggtataagaagaattcaataaatgccagcaattattaattttcttattgttgtttctatacttgacatatgactagagtgtagtagttgcagacttagatgttcatgggccaaaataaacccaatgtcattgtcaaaaggtgaaatgcctttggaaaagataaccctgatccttcaatattctctatatgctattgtgtgaaactcagcaaaattcagcagatacaagttctccagtttctggtctgctataattcaaatataattcaaatcttatagctctgtgagctgtaattttttcaggcatagacaagtgaaaggaaactgtgaaagccaaaatcaaatctctgtcacaaaccgatgatgaaagtttccaaaaaggttgaagaataatttttgaaaatcactttatccacagtcataagggtatatacaagttcctccgactactagtagcataagaatcatgaaacctaagaattataaattgtcatattatcataaaaagataacactgattatgataaccatttcacaaatagttgttactttgcaaatatttaatgtgtctattatatttgatgaggattttatttcaaaagtttttcattaaatagcaaatgtgctgtgtttattaagtgataagatttcagtgtatgaacagaaacaaaaattcttgcttaattgaactggacaacatttaatatctgaaaagtcagtggctttcattggaaatagttaactaagagtattttggagaagataaaatgagcaaccattgagaatgttcagttttgcttgtttgaaactactttttgaaagaaatatattaattaataatcgtgactggaaaatgttgctctcagaaatggccctctggtcttggagtacatagtatcatgtgtgaaaatataagaaagttatattttgacttcatatcatagtttagcaactgaacatcagaaaaaaacaaagccaatttcagatttgcattagatgacaaatctcaataatttttacagattttatggaagggctggctactctatttttatggatgttaatatcaccataataacctatcttaagctgctttttttgaagttctaatgaagagttaaaattagggtgattcaaaatgaacgtcttagcctatatggttcgatgttaggggaaaaattaacatttccaattttaagagattggagctctgagatcaggtacagctcagtctgttttctaattgctactgctcaattgtgtcagtgaaaattctatctcagtaggagctgagggggatccaggtctctaatctttcttttctgtgtgtctagctgttaaaggcgggtcagcatgagttttttctcccctatgtgtcagacttatgaaagaagcagacatttggtatgtgcattccaaaaagatcagaaactggctgcctcccgataatacatttcgagtgggtacagtattctaacattctgctggttaacttttaaaaaaccctgcatacttattacataaaaaagtatgccattttttcaaccccaaattgaaacctgattgttaaagttatgtaattgataaaaattacatgttaagaaagacactggtaatattaaggaaataatcaaatttatcatgtgggccttttaaataaaaatcctttgatgaacagtcacataaacgccttgctattttgattgagaagtttgtgaaaatgtttatgaggcttacttccaattagtcctaccttaagagtgattgtattcaaattaacaccaaggagaaggcaaacacagaatctttttatctttcaatagcccactttaatactaggaagaaatacaatatgtatcttgcactactgcttagtaactgtgctcttgtcatttgagattaacatttggattaaagagcatgattagaagattctaaattagtagttaccaagctgaaatgacacaaaagttaaaacaaagtaatacaacagtctatttcatgcaatttatttcttataccagttaattagcactttaattagcatgatgtttcatgttgtgacctaagccattgtattcccaacgggtttagtgaagacaattaaaaaaagaaaaagaaagaaaaagctgcagaattgttgatggctgtgtcacataccagcagaattaaatataattcttgactttaaaacatgagaatacacatatactttgttcctgaattcagaacagatttttttaaaaggcattttgatggtatgaaagacttccacaaactcgaagcatatgtaactatgtgtgcaatagcgttaaaggaactacatttttaattccaaatgaccacaaatcaatgcccaaaggattcacttggataaagaagtacctttcactattttgggaacaaacatagaagataagtataaaggtaatcatggttttgaataataatgtgattcataggagtctattaaggccattgaaattacttacaaaggacagcattctggagtgtcacaatggaactctgcctttggacagacctgaggaaaagaaatatgcaccttagaagtcatttgttgcttgcaggacataaaagaattctctcatctctcctctcctcccctccccagtgagaacacattcagattctgtgtgcttgtctttatcatgtgagatagaagtttctgcagagccaaagacagtcatctgccagaagattggttctgccattttgcaacagcataaaaaatggccacaacggttgtgaatattggactataaaaaacagcaaacctcctgaaggtgtttttctcttcattttatgctgcttactattcaaaacatgcaaaaaataaaacattttaaagatctaatatccaaagattctgtcaagcttgctttgttaattgctggaagctgttggcctcctgttttaggactgtataattaaactattagtttcctttgaatttgtataatacagtaggtctgcagaggactcttatttcccctcttaaaaattgttccatagcctcttttggcagttaatctatagatatcatttggaatttctttagaattgttacataattcacagataattcattgcacacagaactgtgtatttatggaaatctaatttcattgttatgcaaaaccttataagaagggagacatttaagtttaatttttttttccttgtctcttttctttgttgaacacataaattcaaaggctcactttttttttagtagggatttttggcaaatgacatacaaagtatctaaaaattatacattttaaatttttaatacaatcgattgaaagttctattttgtaaaataagaataaatttgtaatttgtgataaaaaaatccaatagacatttttgttgagacaaacacaaagatgtgttacctacatttctctgtagtttgatggcatgaatatcattagacaatcagaaagttccagttttatttttggtatgatagttaagtgataatgatttgatctgagagtgatctttcaatttaaatccatttattgagtatttaaattactatttttcctccctcttggattttctatgaaaatatataatttaaacctatatataatttataaattaaaaggcgaattatttagagcaccgatatggatcagtctttgagactttggggaagttacttaatctttcctgtgtttgtttatttatttgtatacattttgagatggaggtctcactatgttgcccaggctggactcgaactcctgggctcaagcaatattcctgcctcagcctccggagtagctggaattacagtcaaatcccaccttacccagctctcttatgtgtttaaatgaagataatagcacactctgatggcattatttggaaatgtgggtaagtgaacattttacgtatgacatacacaatataatatataacacttacagcacttcctggcataaagtaagaaactgtaagtaatagctgttgttaaagaaggcttggaaatgtgacacaagtcacaaagctactcacttactggttgagctaagattctagaattggtctcagtgcaaagcgaacattgcctggcatacagtaaatgcatctaggtgcaatctgctattaaaagcaaacacatattttccaaaggtcttacaccagtcactaactaggctggcatgagaattgcaaggttgtgtctgattttaaaccctaatttccctaaatgtttgcaggcatctaaacttattagagctatttattggtatagatttcacagccttgataaatacacttgctgtttaccaagactttgaaaagtatgtttttgaattgtttagaatatataaacgtgcccataaaacatggtaatatttgtaaatgggaatataataaaaatgattaatgatcaatgcacacactgagttgtaattgtgagaataagagtttctatattgtcttttaatatagaaactatttattaaaacaaacaccgaaaaaatatgtaacaagtttatttatcttctagtagacttcagcagagtaattaggtaagttcatattctcatctccattttcatttttttgaatatttggaattatattgataaaaggtgtcaggctgttgtgtctatgagaaatccctttaaaaccttgacattctcttctcagctgctgctacatcatttttcttgccattcagttttgtttaactgtgaagtttaggattgctttatttcagttttcttcaaatattttactgcagtttttcttattaactggtttttcaaagatatattacagttggatctttagattgactacttctcaatagggggcctaacggacttccccagtagtcaccgttatttactgtttagtctgaatttgaaattgataagccctgatgactgttattagcagtcattccacttattgtgccatctagtaatattgtatcgtggaaataggtgttctttaaaaaagcaagagttctctctttctatgtactgctgtgataactgatcaaaactatgaaatacaacagatcatggttaggcctgaagagcttagttgatctgatattacagtttgtggacaaattatatatactggattcagatattacatagaaggctaaaatattccatacactgctgcctcagattcttgcaaggacagaacaatttacttcttgtttgagtgtgctcagatatatccagtgccagtttgcttttaatacgtaaattttaaatgtcttgatttagaatcacattcctctggttttaaactccctttcccactttactttctgttcttcttctagagctctattttccaactaaatcttataactttcgaaggcttttacgtgctttgcacttccctgctagcttatcctaatccttactgttatctcttctgcaattctctttctaattttacatgagtaaatcctacctgccgttttcttttactgagctttttctaattattaagttgttggcgctttttctttttcttttttttttaaatggagtctgactcagtagcccaaggtggagtgcagtggtgcgatctcggctcactgcaacctccgcctctcggactcaagcaattctcgtgcttcagcctcccaagtagctgggactacaggcgcatgccaccacgcccggctaatttttatatttttagtagagatgaggtttcatcatgttgctcaggtgatctgcccgcccctgcctcccaaagtgctgggattacaggcgttagccaccaggcccgaccacttcctactttgttttgttttgtttggttttgtttggtttggtttggtttttttgagacggagtcttgctctgtcacccaggctggagtgcagtggctccatctcagctcactgcaagttccgcctcccgggttcacacctttctcctgcctcagcctcctgagtagctgggactacaggcgcccgccaccacgcccggctaattttttttgtagttttagtagagacagggtttcactgtgttagccaggatggtctcgatttcctgacctcgtgatctgcccgcctcggtctcccaaagtgctgggatgacaggcttgagccaccgtgcccagcccacttcctacttttaataatgaaatactgtgtgcatgctagtgcatatgtatgtgtatttctttatcacaccataatgtcttcactgggaagatcctggtgtagttcatatttacctatccttctttcccagttcttcgcaaagtgccttgcttatagtagattactagattgcttactaaacaatggttgaatacatttgatgctgtaaattggaaaattacgtgttttctgggggcacgcaataaatatttacagagctcctacaatatactagatgttgagtttatcacattcttaagaaaatattaaattctgggtcttacagttgaggtaatatacacgtttatatacatatatgtcacgaatcacgtgaatctgtaacaaatcatgtgaacttcgttagagcttcgcgttcttttgtgttactcaggatctactatattgctggaattcagttgttaccaagataaatgtgttacccatatgcgataaatacacagtgccaagagtccaggctctagtggaggacaagttggtgtccaggcagcatcatataaaatgaggctggaaaatgaatcaacatacctaagacgttgtatttaagttgaaggagattcaacttgaacttgggaggaatgggagtcagacagcagaggtctttacagacaggggagtggatgccttgatttgttagaacaataactttcatgacggcacagaggaagcactatagaaagaatcaaataaccctaaatatatctgggttgtatgcttacttgagacgtatctccattagacttaaaacccttgtgacattcatggccataatttatgtaagataggatgtagtagaaacaatcgcatttggtcatttctaagcaccaatatgatgtttggtacatgagacttacttctttaagttgaggaataagtataattaacaacaaaagagaaacatattaatgcatggtttcaaaaattcgtaggcacaaagacattttgtgaacagagttcagttaaactatttatgtgtgatgatatggaataactttaatataaatttttaaaaattactttgttgaatactaacagtaaaaagagactttccttggtgttaagctaggttcttaatgaagtcatgcctaggaggctatcttgatgttgaaggctaaagaaccatcactaacgaatccatggcctctcatttctacctctatcctctgaactaactgttcaagttataaactgatttttatttcaggctgcatttgttttatactttgcagcatattactaatttttaaaaataatttgtttgcttttgtgcttcctggtttaaaaaaagaatttatgctgcaaatagtatgaatatgagttacacagttctgtagtttataggactcactgttttcttttgaaaaaaatataaaacaattcatatgatttcatttgtagtaagacacttctggcagttctgtgacagtgaaattttaaggatcatcaatatcggagacatagtctgtagagttacttttctttctcctttcttttttcacctttaattctaattaaaagatactctactagactagatgcttctgcctggatgttttctgtctgatctttgacttgcaatcaagaaaattcagcttcaatctgttagagctgaaagggcctatggcatgctaggggctgtctagcatttcaaaaattcagaattcctgtcctatgaataatgattaatgtacagtacttacaatgttaaattttccaagaaagacaccctgtaaagttattctttattgttgaagccattcttaatattctgtataatgcagaagttgcacataacacatctatgcaaagtagttaacccatggttctctagataaatattcacatgcatataattttcaaaatgcctggattatgctatatcataaaatttatacaaaatcccatatcaatcacattcaatgtactttatcatgtactttcttacaagtaattgtatatttatctgaattttttgttagttttcataagtttcagtgggaatatggtctttaacattgctgttactcatgatgtgacaaatttcaattagaaaatatttatttttctaattgaaagagttaaaagttttctttttaaaattcacttagaaatcaaggtttccttaccagacttattattatgagaaaatataatctatatttttggaattattgcatataattcaagattttctcaattcttaatttgctatttatgaatatcactttttttttttttggacacggagtctcactctgtcacccaggctggagtgcaatggcgcaatcttggctcactgcaacctccacctgccaggtccatgcgattcttccgcctcagcctcctgagtagctgggactacaggcacacaccaccacacccggctatttttttttttttaatttttagtagagacgggatttcattatgttgggcagaccggtctcgaactcctgacctcatgatctgcccaccttggcctcccaaagtgctgggattacaggcgtgagccaccttgcccagcgtatgaatataacttctactgatatcataagtaaagtatatcagggatcctaatgtcagtgtggggtcatgagctgacttgactgaggcattaaccaatggagtgtaggagtataaaaatactagattattttggatatacacatgcaaacacatatatatacacatacatttgtatatatttttgcaatatggatttttcttcatgtatatgtttcacatatatatatttatttgaaaatgtattttttcaatttgaagtatcaccagagagctataattactcaataataattgctgagtagcgactttagcccagacactgtgcttgatgttttgaatttgaatataggaaataaaatatctgtgttttcaaagacctcactaccatgagagttagatgtgttggaagtgctatagcaagacagagatagacaggaaaagtgaggatatttgggaaaggtttaatgatacaagaaccttttgagttgaaccttgtaataaattaagtttcctcaaactaggacagaagaaaaaagcatttcaactggatgagaaatcatgaacaaagtcaagaggtatcaaagtgcatcatttattagacaaaaggcacatcatccagtgtggttaagagtacagggagcatgggatgagtgactagatgggaagtggaaagagaaactggacttagccagagatgggctttgacttttatgcctaggagtttgtatttatcctataaacatttggaagtcattggaagttttcatacaagagataacaaaatacctgttttgggaagttggctctgctgatagagtggagggcagtttatggtgaaagctctggaaggagggatgcttgtcaggggactagtacagtctgatgaagtctgcttatgtgattttgatgccatgcccttggacactgaccttggagacagatcaagaagcatatggacagaaggatataaactatttggtaggtggttagatgttgggaaaagattagatgttggggaaaagagaaaatagtaatggataagatatttgcttcagattttagttttgaacattttaataagaaagtggaattggaaatgtgggagataaacattaggaggaaagaattaaacaatttatttacacttagtgataggtgactccatgcaagtaaatgaaatacccagtgaatatatgcatatagagagtaaaaacagaaggcagaatgctaatcttgataagccatggaaggagagcataaaagaaaagccaatgaagtaaacttagaatcaggggaaaattgtgatagaaaggaaagaaggagtgtttcagtatacatggagtcaacatactaataataatatcaaaagcaacaataataataaaaatcaattcaatccctgctaggccactagtctttaaactaaagatattacacaaattatcttatttaatcctaatagcatattttgttttaaagaaatagaactcaagtttatcacttaatattttaaaccaaagaaagcttcatgaatcatgaagtggaactcacaaggtcatactggaggatgaagaaacatgtgcaggaaagaaaaaggtgtattccagctccagagggtagaagtaaattgagaagttaataggaacaggtaaactgtctctttcaaacactactgctggaatgacttaaatccaattatgttaatttatttaattcctatgctcactatttagattccagagagagaatgctgctgaaatgtcctgttggagaaactagccaaccttttggttagagaagggtaacattttttgactaacagtcctaccaggctaaattccgtgggtgaaaagtaatttgctcaagggaaagcagggtgtccttatcaaaagaaagtagaatacaagagtatgttaaaattgtattgtgtaaaagtgactcatggatcttcaacttaaatgtgagggtgccaaatcttagggtaattaagtaacttgctcaaattcacgcaggttagtaagtgaatgaattcatatcaaagccaaactccatcattcagatcaagaaaactgaagtgagaaaaggctattttatatagcatttctaatagtttcatcagtatggtagccaggcaagaaaattattaataatacatcaagttttatggagccaattttaagtaaattctttgccaagaatttatgcaggaaagaaaaggaaagagcagttcggcagtggaagagaggaaggatgatctcttttacaaaataggaaaatttggtaggtttgtgggttgaaaaaaagttagaggttgaacaggaaggagaaagtacatggatgaaacaagatcctgtcagaggcaggaaggagtggaatcaaaaagtcagatggacaaaagaataaggattcttttgagatgcaaaatgagatccagatgaataaagatgcagataaatttggagatatagaggagggaagcggaaggggttcacaactgataggctcaatattttcagcagtaagaggggaaatcatgtgttgaggttgaggggaatgaggataagggtggggatctgaggagggtgtggtgggaacagctgctgtgtggaatgggaagaccagccaagtaggaatgagtaatagggctgctgagcagctctgaaggttcagctgacatcggaaatcataaatttgtagcagagtcaatcagcatggttattcaattttctcaggaactcttggcagcccaggaggaggaggagagcaaacagatggtaggactgatttggtaatgggattggcaaggcagctgcgagagaaggttaaagaagggaagaaatcaattgcacccatgaaagtgtgttgaaaatggtttatcagggggatcaaaattagggagagaaggaagtgaagccaggaaggattagacactgccaattcagggaagagtgaagccatggaggtcattagcctttgaagcttaagaggaggttttgtgagcatgagtgagtgggataggtgatgagagaggaaaatttcacaattttagatattacagtagagcatttttttgtttcaaaacagcccattttgtatctgtgagtgtgattgccaaagctgagtagaagtgactgtcactgaaatataaggcaaaagaatttcaaacctaaataggggaatatgtcatcaaagtcattgagaatggtgatgatttatagaagataaaacaatagaaacaacaaaagcaacaataaaacaccagctgccaagttattcaagtgcattttttttttcttagagacagggtcttgctctgtcacctaagcaggggtgcagtggcatcattatggctcactgcaacctcaaactccggcgctcaagagatcctcctgcttcagccttcctcactgctgggactacaggtgcatatccctatgcccaagtaatttattttttactttttgtagagacagggtcttgctgttacccaggctggccttgaactcttgacttaaaaccatcctcctgccttggtgtcccaaagtgctgggattacaggcataagccactgtgcatagcacatgcaaatacactgatgtagtactgtggatgactagatttagaagacagctagaaggtttgattgtttggaccttgtaaatgtaagacttactgaaataaagcagtggaacaatgtcctggaattgaaaggggaaatccaagagaatgtcccacttccaagagggacaaaaaattactatttttagcagtattctagcatatagtgaaatctatgtgaataaaacttaaactaaccagttttctcaagcccttttataagggttctgatcctcttcatcaggacagaaccctcatggcctaatcgcctcctaaagatctcaccttttaatactgttacattgggtttaagtttcaacatgaattttggacatgacacaaacatttaagccatagcagtgtttaaaataggttatattatcatatgtttaaatgtaaattggcatgacctagtagtagagaggaagacatttacccacttgaacatactgtaggctaaatgcatattaagatttcatgcaggccaggcacggtggctcatgcctgttatcccagcactttgggaggccaaggtgggtggatcatgaggtcaggagattgagaccagcctggtcaatatggtgaaacccagtctctagtaaaataccaaaaattagtcaggcatgatggtgtgtatctgtagtcctagctactcaggaggctgaggcaggggaatcgcttggacctgggaggcagaggttgcagtgaacagagattgtgccactgcactccaacctggcaacagagcaagactatctaaaaaaaaaaaaaaaaagatgtcaggcataggtatattttgaaatgagtttaagttttattctgccatgtgaggatgcagaaacaatgcaccatcttggaagaagagagcagtcctcactagacattgaatctgctggtgccttgctcttggacttcccagcccccagaactgtgaggaataaatttctgctttttataaactacccacttaaagattattatatcgccagaaacagactaagacaaacataaaatatctaactaaaataaggtctctgacttagctaccacctccagtgatacccccttatttctgatctccttcaccaaaacttgtctaagtgttgtctatgtagtcgttctctattagtcacatcttaaggtctccttaattgagtcctgtggggctcgttttgtcctttctactccactgacgtggcccttattaagggcacaaggtctcttttgctgaatctagctgtcaattctgtctctttttctaaatcttgtcatttgaatagttgttcactcccttccctggagcactttgtatcactctatttacttggttttcctccttaattgctgactacatcttgtcagtctgctactctggttctaatagatgtctatgtcttatagtgcccccaggattttgtttttatgtatcaccatcccggacttctcccttgggctcagtacaagtcctcagtacaagtacttacctgtctttcctaaaggtgaaggcatatggtagggggtcatatggtaggttttggtgccagattctctttggctcttgtaacctattagctggctgactaaggcaagtttcttaatgtctgtactttagttttctcatctataaaatgaggataatactaagaactacttcatggggttttggggaggattaagaaagtaaaagatataaataagtaaatacatataaaagtagaaatgttcttgaaacatattaagtgctcaataactgctcattattaattgtattacaaacataatagagcaaaagtaaaatcatggattatttccctctcaaatattctagtttattctcttcagaaacgtttctcatgagtgaagactactgacatccaaccagttggtttagggtaaaaatccagagatcattttttgttcttttccctctttatgctgttccaacctatcagtcattacgttatttttacttcaaaattttataccaaatctgaccactgttcatcatctccttctctaaaccacagtacaggccaccaacatttgctctgtttctctgacacttctatgcttcttacaatacattctccatggagtgacttctctaaagtgtaaatgcacattcaggttgaatatcccttatctgaaatgcttgggaccagaagtgttttggatttccaattttttcagattttagaatattgcattgtacttactaagtgagcatccaaaatttgaaatccaaaatgctccagcaaacatttcctttgagtgccaagttggtgctcaaaggttttagagcatttcggatttcagatttttggatttgggatgctcaacctgtatgtcctttcattatttaaaatccttcagtggctgttgatcacattgagaataaaatccagtcccccaaattggtacaagcatgtccttattgagtactagcctgactctggaaagtcagctcttttctcagagctattcactaaaatccactctgaccccttttctatcactcaaacatgcctaaagatttccttttttttttcagacagtctcgctctgtcacccaggctggagtgcagttgcacaatcttggctcactgcaacctctgcctcctgggttcaagcagttctcctgtctcagcctcccgagcagctgggactaggtgcatgccaccatgcctggctaaattttgtactttttttagtaaagaaggggtttcaccatgttggtcaggctggtctcgaactcctgacctcgtgatccacctgcctcggcttcccaaagtgctggaattacaggcgtgagccactgcgcctggccaccatttcccattctgaaagcctttgcactcgttattcttctgcttggaacattgtttttgccctcagatcttcatatctgcctccttttcatttaaattttatttcaaattccatgtcttgacagaggcttctctgactactttctgtcaaaatactctattttctattttctgtagcatttactaaggtcttcaatcttcagtccctgccccaaccttaatttgcccatgttgatcacacacctaaatctgaaaacaataaaagaatctattgtagagtgtcacttgttttacctgattatctacattttcatcatccaatttcttaaattttatttttgtgtatactttgccttgtatttcactattagacagtacactggtatctgctaatgcattaggaattttggaatggtaagcatctccagccatccttttcatatttgcaaatgttgacacgcataaaatagtagttgttttggatctggatttctcatgaagaactacatgtttttggaaaattgagcagttatccttttcatatatttaagagctctgaaagaattaccaaaataacctgaacattgtgcttaagcctggaaattcttcccttgaatcacaaattattttattaataaggttaatatatcagaagattctatttgtttttatcattagtttccaaaagcataaacaataaaatacaaaaaaagacgttgtcttccttatattcactttgctttagagcacagcaatgcaaaacatatttctcattattttcgaagcaatgatacctatttttctgggactctatttgttatggaccaggacattgaccatggaggcatgttcatggattactgttttacggtgacagcagtacggatgaggatattgggctttaaagaactgcaatcatgagctttcctctgcaaaaatagaaagactcttactcagcaaatgtaaaaataatgttatgtttgcaatctctactctttataatcacttaaaattttaaggtaaaattaggcttttaatgcgtaacatgaaacaacaaatattctatttttgagttctggttgcgtttttaaagatgtgatggagcaaagggctaacccagcacatactatcatagtcaaatctatttgtgaaaaaaaaaaaggaaatttggtgatataggcacactttcaaaattctcattgatagagagggcccagagagaggctttgatcttaattatttcataaattctaaactgagatgcttaattagagcttaaatttatggagactctgatacatgagaggtgtccacccaggtttcgtttttcatgaaggagcaaaaagtatatgcagtcacagcgggctctctggagagtctacagtgacatgggcatcaccttttcttagctggtgtaggaggcaggggagggcttgtaggcacatctctgtgttggtgtgcagaagctgactgagatccaaacatgtactaaggttgtcagatggatagaagagatgaagagatgctagtattgactaaatgaacaaacagactgaaaacaggttaaattcaaagattaataattgattttggagagcacagtcgataaatttcaagtatgaccaaagagctgctataaattgactttcctagcctaaaatattcggtaatttttcttaatggatttgttaagaagatgtttgaataacaactattttttagcttctttattggcaaataaaaccaaaaaataaataaataaaactttttcagggcattctgcttaaatctccctctctttctctgctgtttttttcttcaagataacttaggcacaattcttaaaagaacaccatttggctaatttccatctggcatcctttccctcttattttcactacaaagagtggagtctcctttttaatgatatttctaagtaaattcagccttcagctcaacattcatcctcccttctgtttttcatataagcaattacttttttttgtggggaaaaatacatataactgggctctgagttgattgaatcagataaaaacaaattgtagaaatataggctcactaatttctagtaatattttgtatgctctagagtacaaatgtgtcgtgtgaaaagttccatttgtgcagaattgagtattttacatacagataattagaaaattgtcaagacatatgttgcttttacaaacgtttttgtatttattgttttgcaaatgataccaaaaattatcatggtgccaaatcctgaaaaacctctcaacttagaggtcttcatcagtgactaattgctactatttgtaacccactttaaaagcaaataaagcacccatctggtaattctattaacagtttctatgctaaaatggcaatttgtcctcaaaaaagaaaatatgcaattatgaaatatttgtatttgtgtcactcttgaaaagatacaaatgtatctggcaaaatagagtttatcattccttttcgcattctctattaagtctacaaccttttaaaaaatcaaattggattagcgacatagctatgtagctcatatatttaacaaaatggaaaattagagcaataatctgaataaatgaaggcaaacaaagaaaactcataatcaatcatctggatagcattatcaaatcgtctttccccttccctccccaactatctgtgttgcccactgtaggattaataggtcttgaatacctaagtctctcccctgaaaagagggaaagggaagtgacattcctgaccttgttattttgaaactctgaccttgagaaaactgtatctctctgagagtcagtttctacggtggtcaaatgcaagaatttttttctgctagtctataataaatgctgttatgaataattaaagaaatgaagaacttgaaaatattttgtggaagtaagccccttctagaactcagaggtagctgtgatcatgcaggtttctgaaataggacaacaatgattgtccacctaaataataaaatatttaacttctgaggaaaaacaatttgtagacttgctccagccctacgtcattctgaacctaggccctttggaggcttgtgaatattcactaaccttcatctactgctgcatgggtattctttacaagggacacagatttttccgtttcctttttactttcgacgccctagtaaacatctcggggttggcagaatgggttggtctggtgtttattatatgtaacacatattgtgtccctggccccagtgctatagcaccttttctgattttatgatgccatgtcactcttacttgcttttggacatgcctggagtgcaaaatctcttttttctcttgctaagtttttcttgttcttcaatgtgcagctaactcagtgtggcaggattacaggtagttttaaagttttcttttttatacttcacttttgtagttctttcatggcttttataactaaaaatgccatttgaagattttattaacaaaaacctaaaatacctaatttgaaacctgaatcaggattagaattctctctcgtatgttccattagcacagatgttcacttctcataataattatcagagtataatataatagactatctgtctcactagactgagacatcttgtaacatatagttccttatgtctgctacaatatccataataaacgtttattacatgtcagttgaataaatggatgggcgaatatgttacatctgtagttcattttcatttaataagtagacatatagcaatatgaaatagctaataactaattggatctgcacttaatataatacatttcattttttagcttttttttttgcttttctactcattggaaataaatggtaaaataaatttcttcatcataataaagtaaataaaattataatgaataattaaatgatgaaaactcttgtaaattatgattttttaaaaaacgtcttctcattttcttgtaaattatgattttttaaaaaacgtcttctcattttctttttttttttttgagagggagtctcactctgtcacccaggctggagtgcagtggtgcaatctctgctcactgcaacctctgcctcccggttcaagctattctcccacctccgtctcccaagtagctgggattacaggaacccaccaccacacccggctaatttttgtattttagtagatatggagtttcaccatgttggccagggtggtcttgaactcctgacctcaagtgatctgcccaccttggcctcccaacgtgctgagattacaggtgtgagccaccacgtatggccaacttctcattttctaattccttttctgtaccatgtgaagtatttttatcttgtggtttatacttaaaccttaacagttacagcggaggtgctatggcaacataaggccacaactcataaaagctaattgtgactatgcatcatggtttaccatgacggattattgctatttgtccatttcatgtcaaaactgaggctcagacaactggataacctgaatgacagccagaagcttcaaacattcctttcatgtagaaggatggtgtactttctactggaagaatatttcctctgggatggcagtcagtggcacttgataggagttggcaaagataagtttaattgtattcagtgtgattcaacagacatttattatataccaattagtttataattctctagatatataaaagtaaataaggccttgacccttttgtggaggaactcacagtaagtttagggacgccaaacataatcaattacctataaaaaaaaggatgacagtttaattggcaacattcaacaaacaattattaagggctgttctttgccttctttgcctaacgctgtgctggatgctaatgaagtgctatggaaaaaagtcatgtggaatctatttgactctgatgttggagggaagcaactgggcaggactcccttttcagggtacagtaggtacagagctttggtcacatgatacttttagggtcctgtgacattttaatttcttttaaagtcagaagagaaacaaggaccttttaggaaaaatgaaatgttttagtatgtaatatctttatgccaatatagtcataaaatataatctgtagtgtttttagtgatgaaagtgtcccatcaaggcaaaagagcctaggggccatgaaagtcctaatgtggtcctgactgggagaaggaagtcagagaggaaggagaagattcagatcactggagctgggccttgaagtgataataatatttcaccaggtggagaataggagggttttttagccagaaaggttaaccaaagccaagatccagacttgtgaaagtataggatgagttaattcagacatgcacaagacgcggtcctcaaatgaaaagatttatcaggtcagtggatagaagcaaaagtatgtgaatgaaaagttacattattgaagaaatatttctattccaagaacggcaaatgaggcaactgctcctgaatcttaaaggtctctgagaattaaagctttacaactagactatttaaataaacaaaactgtttaaaagtttaccattgtataactcttgatgttctagtctgtgtaatgtatttgagagtagggtaggagacagcacagttttgagatcatcctcaagtcctgaaatcttcacttacaagtgattatatgtttaccaatatttgttttattgttatccttaagtattttgaaagtaatacttggaaatatatcatttcaaatttacatgaaaaataatgtaacattttgacccccagaaattaactcaggactagttgaataccctagtcaggacattaattcttaagtatattgtatgaaagtgtttagtcataaacaaataaactttctttttctagaataaactccaaatccaaattcaacagtgaatagtaatacaattcatattgatgaattctgttaagctattttcaaaatatgagagcataaatcaaaactttaatctagtatatgctattgtgttaattccatttcagctttaatcaaattctaaaagggtaggttctcttggtattttctaaaccctgttctcagtattatcttctatttttcccctttgtataatgatgggaaaacattattcatctaatttattttgagtgaataacattaaggctacttacatttttcttgttattataaaagctgtagtgaatagtaggtgagcttatgaatttaatttttcagctaagtaaacatgcacatattaaattctctaactgtcataaatataatcaggcctttaattagaaaatgaaggcaacataattctaagcattatgaagatatattgggcttctggttgttaacacatctagggagatgaggcaactcaatcagaattccagtgtctagctctatcctgactagaacttttgcagatcaatcttagcctataggagagctgctggaaataaaagcctgtgcctgtgtatggtgcgtcatattgggaatcttcagaactaaagaataccagcctctcatataagaaagcagttggattcttggatattgcaatctatgtttactaaatacggagatagatctattagcttttaaaacacatttttccccatttgtttcatatttgtttgcaactctgaaattcattcaggggaggcagacaaaggcattagtaaaaagtgaactgttccttttggtatgttactcactgagtgattttgcaagacttttatcaatctccggatcctccaaaataaatgttatttattcactcaagaaaatgttggtttggcaaaacattatgctaaagtcagagactgtaggactgtataaggcacaatctctaccctcaagaaatgtacactctggtagaaaaatggaaatacagtatgatatgactaatagtagtgcatcatatagtgtagaggaaagtactaaactcatgcttaggatgtcagtgaaggttgcttcaagtcaatgtcactgggtccacagaagcttactttattttaatttatcttttgagatggagttttactttttttgtccaggctagagtgcagtggcatggtctctgctcactgcaacctccaccttctggtttcaagcaattttcttgcctcagcatcctgagtcactgagattacaggcgcctgccaccacacccggcaaatttttgcatttttagtagagatgcggtttgaccatgttggccaggctggtctcgaactcctgacctcgtgatctgccagcctcggcctcccaaagtgctgggattacaggcgtgagctaccgcgcccaatcggcttactttattttttaaggaattgggttaattatttgaaataatatgcctagttttatctgtgaccgaagctatgaaatttttatcccatctttgtactattattttttatattttgataagcaaatgcattataatatcataatttattacctgtatttatgtatatttacagataggtaacatttatttattttacatataggcaatttttacataaatatgtaaatagctacatttacatgtgagccaataaaggtgtgtttgtgtgtgtgtgtatatatatgtgtatatacaaatataagtaatacgcctatattaaatatatattgaagaaagcaaataacattaatcacattttgacaattattttcatcatgccttgcaattttttctgcagctttaatttcatatcagattcacagtaaaaatgtcaattcgtcatatgaatttctattattagctcgtttagttgtgagctcctttagtttattttactcttcagtgaatttttaaaaccatattaaatgcagtattgcctcttttatttactttttcttctctgaacgttgttgttggtaatatatttttacctttttctggcctaagaaattttttttttacctacttgaattttctctttatataaggaagcccttttgtgttgacaatctctgttgacttttattcaccattcattactctctcacttaataattgctacaaagatatggaaacaaatcaaactgtttctttcctcttgggaaagatttctaaggcttaaaatattggtataaactttatatgatggattaattaaagatattctttaggttttggaaaaagttactagctcctcacatttaatttctaaggtaagaatgtaagagtgaattagagtcattttttccccataatttttattaaagcaaatgtgttaattaagactcatgaattgagcatctgccttcctatattatgtttgacgtgatgggaatgtaaaaaacagtgtaagtctctttccctgtactagatgggctcaaagagtacagctttgagacagattaacaagcacaaaataaacagcagtatattaataaaaaagagaatacagctcaattgtaagttatacaacggatattataaatatataggtctttttaaatctgtgaggattatatgtgtatatgtgcatgcatatataaattataatgaaaaaagaaggatcttttttcattataatttatatatacatgcacatctacacccagtactgttgctagtggtgaatccatccatatgggtctgcaacaactggattcttgcctcttcagaggaaataattaggctgaggggcagaaatagatttaaggcagagggggagagaccgaaatgagttttagagcaagaatgagcatttattaaaaagttttagagcaggaacaaaaggaagtaaactacacttggaagaggaccaagcaggcatctttagatccaagtgctccatccgacccaacccttgacttggggttttatacaatgacatgtttccagggttttcatttgtatttcttttctcctgattcttcccttggagcgggctgtccacatgcctgtggcctgccagctttggggagaggacgcatgcgcggtgtgtttactgacgttgagcacatgctcatttgaggcgtttatccattaccagttgagcgttcctaaaggaagatcatacaccagtaaaactctgccattttgcctcttagtgcacatgtgggagcccacttactcaactcatgagatcttattgggaagctgctgatcactagcttcaagtttttctatctattgggaacctgcgtttcagctggtgccagctgtgaccaattattattttagagagacagtttaacaactgcctgatcatcacctgatggtcgcctgacattcctcaggggagggccctgtcctgccctgctaatgtctgcctagctaccaactctaagagtatctcactactgctagaagtttgagaaaaggtgtttgaaacaatacaagtgaactcattcaataaattaataaatggacctctaaattacaaaggatcactcttccagtgagactgctgattaattattaatttccattattttatagatacattattggttttgttcatccttttaaaatatcttcttgatttttttaatagtaaatgtaggtaatatatctagttaaattaggtgaaatgagcttcaaatgtgctttaaaatatattgtactgtacatatttaaagaaattcaaatgatgtcatgttctctcttgagtttttgtataatgctgctagtggcatattttgctttaaaataaattttcagttctaaaatctctgaagtacttctctcctgcagtgattgactttgtagggaaacgcttaagaaggaatttaaattcaaaaggtgcaatttgaaacacattttcttgtgacaacttttgacactgaccttttaaaatatgtaagcatggactttcccctttaattatgttgtatcttttaaattaaatctgtgctgtaattcttataaaataaggtgatattttggaatgagtttttttttttaacttctcttaaatttggggagtagagtttcatatgtttacaatgataaatcaataattttttgaaacattttttcctctcttcatttaggcaatagaagtcacaacactttttatccaaacagcgattatatatgatacaaaaatgtatattcatttttcaagatgttttctatagtgaatttgagccagaattgcacgatgaagagttagaaggaaaataataatagtaataataataagctgatccatgggatatttatcagaaagaatagggaaaaggggcattttttggatttactctttggtcttgatattaaaggccttttgtttgcattccaatgtagaagaaagaacttcatcagctggcttcattatgagttagcatagtatctattcttgcatcactttgccagaaattcagcgagcacatagagagtacagactggtcatatcaagagaagtcattaacaataccgaacatccttaggtatttgattatttggctatgcaatctctattttgaggaatttaaataaagaaattctcaaataaaagcatgacagttgtgatataggagaagaaaatggcacctggacttagaaacctgatttaaatagatgcaagatatttacttgctatgggaccttaagcaggtcatctcactttttgtagcttagatttttcttttccatctatctcataggatgttgtgagggctcaaggatatacagtttctgaggcttttacttatagtgctcaagcattttagattcattctctatgtttcagtatgctgagttgttattttagtattttgaaatttggtttttagattttagtttaattattagttggtcctaagataagaggctgtgttatgcatgaaacatttgtttcttaatttgtccttttgtctgcatatatctgttctaaaaatgtcaataaataagtaggtgtgaaatatatacataagaatgagataaagtaaatggaacattagagacttatgtaatttgttgaagaacatgcagtttttaatactcatccttctgagacgactattcaacctctgggaaaattgacctgtcagcatttttcaggatatggtggatttttttttttagagggcttttgttgtggtttcagatcaggtcatgcatgttattgtgttgttctgtttcattttctactatcttttctgcctggcaaagagtatctaaaagactccaaattggtctccctgcttccaaccctggcccctacagcactctatttttaaaaccatagccagaacacttcttttaaaacacaattcaaattactcctctgcttagatgcctccagagatttttttcatctcgtccaagttaaagccaaaagcttcaaggtcctacaggacctggtttctcaagtccactcctgccacattcttctcactcagcttcagccacagtggcctcctccttgttcttgcaacaaggccaggtctagtccctgtctgggatctgtacctgcttagccttttgagccatttcttccaaatttcctcagagctcaatatgtttcctccttgaggtcgtcttagcagtgagctccttcagatcactctatttgaaattgcaccttccttctataccccaaacccgattcttcttcccttccccttaacccagcttgggatatatatgtatagtgtatgtatgtgtgatatttacctatttatttagcttacttctttctcacccattagaatctaagttgcaagaggttaggaatgtctatggagcggaataggaaaattatttactgtttctcagcttccatatttctagttatcatatgccaaaaggaagccttatggtcaagaaaatgagtcttctctccataatatgggactagttgtttttcacttctaaacaccagatgatttctccctgtaatgagagagcagctttccccttgaagagaatctaacaattccaatgatcataattaattctctatatatgtatatgtaaccatacaaacatagtaaccctcagatttgctccatagaactggaaaatcaggactgactaggaggatttgcattagaatctggaacaccaatttcccaaggcactgtttttccaatatatgcagcttaatgatcccaggaaactagccctgaagggatgatatgaccaataataaataagcatgacaatacctgaaatccagtggactactggcagggaagattacaaaaatactcatgacaatacctgaaatccaatggactactggcagggaagattacaaaacagggctcaaaagagaggttttcaatctcttttattttccctacacttatagttctaaaatttcatctgattgatttttgctgtaattgtttctattcctaaccattttgagtttccatattctaactggaaagggaaagacacctttcacagtgcatcattcctgttgtcacaggatgagacagaggtggctgacctgtgatccacagagcacagaacattgctgagtgcttttttaaggtgatgtgcttcttgttttctgtgagggtacaggagccacgactcatagtggataaagtcttctagaaatttcccatcatatgtatgaagaccttcagtgtaaacagtgtcttttagggaagaaaaataagtgtcatgaggataaaaagttgtggtggggaacctaggcctggctctctgtgttgctgcattgaaattagagatttcactggttgggtagagcggtgctgctttttctagatcatttagatagactctgatttaaatatgttacatgaaggctctatttaactatatatacactttttcattctcttgggatctgataatgtttgggtggattgtgtgattaattaagtgcagatggttttgtgctcatacaagagtttaacattgttgggggaaattgaatagataaagtaaaaatagacttcgttgccgttttgctaaggacaaattaaatgattcatcttcagattgtctatccctgccattaatttgatgggggtgttatgatatgatagtctcttgaataactaagttaaagttggttatgaaattatttgtttagtggattttgctcagatcatttttcaataggtagaagttttctgtaagaaggtgtggtgaacaaatttctgtaattgggccggacaaagagctcactcttttttttaaaagtaaatcctatagcaaattattctaaagatctttgggagaggatgggggcaaatatgtgtaatggtgcctctcctatcttcaagagcggtagtcttgccataaacaagttctgaataaatcctagttcaaagcagtagagcagataggaaacatgtcctgccttgtaagggtgctctaaatatgttaatagagtcttgaattctcattaagtcattgaccagaacaattaagagagtaaaaatgctaataggtcaagattcaacatccaaaataatactcttggactttcaattagcatttttaggtaactcaatgataggaaaattcctttgctattaaagaaaacagcaacacagaatacaggaaaagagagagaaaataatggaaatgctttcaaaacaggcccaaagttgcaaaataaatagtaaaataaaatagatactttttgtgtgtgagagaaagtccttgtctaaaaagccccaggagggggctagtttatcttagttttcttaattttcatacttttgactcaagcatttttttaaaaaatgaaaatagttctttttgtaactctctaggaatatgtaggaagtgacacattaaactgaacggttcttcatacttaagtttgaccactgtgaagagtctgattggacaaggagttgcgtatttgactacttcttgtgtatgaagaaccacattggcagcaaacagtgaaagatgataaatcatattcaaatggatttaaaaatagtaatgtattattctgatgagaaactgagcatattactgtgacaaagagaaaactgaagtaaacaacactagttttttttttaaggaatgaagaagttttgagaatatgtaggtcacaaccatcacatcatatataaatgatgatcagactataaaaatacagctaatctaggagaaaatggggagggggacatgttttcatgtgaatatgaatattttaatgtgtaattgatctatttagtacatttgcaaaaacaccacaagccacaggactttattagcgatgacacatgaagaaaatgcaatgttcataaattacagtaaagaaaatttgaggggttgttattgcattttgcatggtattttaagtacaggttctcacctgcactgttcgtataatggaattatttttctgtgcctcatttaaaaaaaatgacactaatggcttaaatattgatactggaacattatcacaatgtacaacacctcttgagcacttaatgtcagtcgcttgtgctaaggacttatgaattgtcacaatgactgcgtgagataggtactgttatttgacccatttcgcagatgaggaactgaggctttgggaggttaagtcactctctgcctccttgtaactggtaaatgatctcactctgttcactctcaggtatgtctgattctgaaaatcaagtctttactattctacctcctctttgcagattctggaaaatcacctaaagtgttgttctccacattgtcagccaagcgatgggtcagataagttttatccactttcttgaacttagagacttccagaagaaccaacatcatgcagaggaaaggggtcatccccatttagatgtgggaggaaagatgtgcaattgcacagttgactcatggtgtttggtgtgcctgtagcttggcacaatgtccagaaaataaaaatgaggctagactggttctgacatacagctaaggatggtggccttctcaaggtctcgttcagatgctgggcatagccctgtgtgcttaagatttcccaccccttaggcgggcctgaaatcggtataaggcagtgttcctcttactacaaatgcacttgtcttcttagtcttaaataagagatacccttgcttcttcacagatttccttaataatcttcagtgataaatggtctgtgttcatgggaacccagggtttttaggacactgctgctgtatgcatgaaagttgaattgccggaattcaaaactttttatttaaactcaaacccatccttctgcatacaattttattgtttctaggaatattcagttgaaatggcttctgcatactgatgtaacaagaatagaaacagtgggaaggataaaatgtgtatcccagaggcactattcagaaccttctgagctatgttcctcgatgctcagtttttattaacggttgaattaagagtgagataaattgagttaagccctgtctcgtagcagcatagtaactggtgaccacaaacgatcggtatctcagatattgggtgatggcacagacatagtaagtccttaaagggcaggtctgtaatccgagcatttcctctctcttccaggcatgactaattaaactccttgatagtgaggtcatgagagtgccctcccatcctaagcaaattcattttcaaagagcacctactttcacatttatttgcaagcaacttctattatttaatttcatttactcaaaataatgagtaaaaatttgaagctttgcctgatgggggactggatgctatcaaagtattagagtgcaggccagcgaccgcttggtttggaatgccacacgccacatccagagaccttttctcattgttgtgttgcattaaacagcgacagcctggcacagagtaacagtgagctgcgtaaaaggtcaggtgctgcattttcatctttggtttgtgttattatttttctgcctgttaaatggtgctgtaagccttaaatagctactttacattcctgtggggatattgtgtgcattttgatgaatccgtcatggtttacttattttgtgcttccacctctttatattaaaaatttatatttttttttagttagacatttcaaatactgggcttttaaacactggtgcttcttgtggtcattgcacaagaaagattgcctttattacagaatgcaactgtggggagtgcgcagaggataatctacacaagatcttaaaacctggatattattcctggactacccctctgttttctaaagaacccatttgactttcagtttactagtggtaacagaaacctttagaaatagtgtgtagaattaattctcttttgaaagcaacaggatccttctcatgcattttccttttcttcatttgcagcgttttgcgttttatatgtgagtaagaacgggaaaaaaagtaagcattaaatagcaaagataaaagccttagagcccagatgcagaggcagttgacaatacaggcatcaccagaaatgagctttgcacggatattcatctagtgaacagtttggttactgtatgtgatatttataacacattaaaacatggagattgtcctgtgcaagctttttggcacccttttgcttcgcagggttgataacatggttggcttaacaactttcagctggtaaaaatatggaggcatgatttgggtcttctgatttatctccttttgttgttgttgctttcttcttatctctttcactccgatgcctatgtcctttggtatttctcatagcttgacatgtagcggtaatggttctattagctgtggaaaatctgctgagcttgctcttcaaggcaagcatgtcgtcaccggtactttttgcagttccttattagtacgtgccctttactgactctgcaagagccatcacctagaattaaacattttctgctagacctgtccttactctgtgcaaaatgattatagtccattatgccacctccttgctgacagccagatactgctgagattacaataaagtccctgcaaattcaaatatgatgctacctcggcgtacaggggtctttgatagcgagaaccatttgaagaaatgccttccagagatcagaatatgagacgcttcttgaaatcatattatggaaacacctggttactattagattgataatatcaagagctaggatcttgggggttagattagtagaaaggctaatgctcttaaattatcctagaataggatagggctaactcagcataggtccgaaagtgctgcctctgcagaacaaatagcacccaaccaaaaatgagaatttccaatttctctaattttagggttatcatttacatttcactccaaaagtgcttttcttgtttagctcagcaaaagcagtttccttttattcctcatcaaatttggaataaagaacccagaatctggagaagccagtaagttccaaggatttcacagaaatatcagtcatagcaaaggcagagccactcttgatggttggctgtctgatagtctgtaattaaagcggggtttcttttctttctttctttctttctttctttctttctttctttctttctttctttctttctttctttctttctttctttctttctttttgcttccctcatatatgtgattctccttctatcttctgggaaatctttctcttttagctcttcttcataaagctgacctcatattttctgtagtcattgcccaccaagtgtagcctgtgtgtgttctccctccattcaaaaatttaaacacaagctctgaaatctgatttaatgttctcctgggaaacttcagatttgtagttgtaatatttcacggagagatatcacaggcaactcaaagacattattttcctttaaaaatgaatacactcaagtattaaacatcctttttggatggatggtatacgttaactttgccattcaaaaatgaagcccccaaaccaatcacaactagttgatagagatatatcccaagaattactgaaggacaaaggagtgatattgccttaccttggcgcagtggctactctaggggagaaggtctttgactatgatcaagagtacggttttatcaggcagagtaggaggaaacaatacaggcccggttttagcaacatgaaagggattttggattgttcaggattctgttgtggttgaggaagcagagcacattgcagaatatttgggctgacaggtacttggggttttctgaatactgtagaaacgtgcttcgactttgtaggaaatagaagctatcaacagcttataaatagtaattatttgagatctgtgttgtaggaaaataattcttgcagtagatggtttgggaagacaaaattcagtggcacagaggctggagtggggcttaggagacagaggatgaataccctgacaaataaaatggtgaaagagggatgaggtgagatgtacaaggcatatataaagttgaatggatagcgcttggtgaatagatgtggatgtgttgtattcatgaggacaacccataccatttattttaaggttcctgttttagacaatggagtagaagatgtttccaatatctgacacaaagagtaccacattagacactaggtaatatgaccattgctttccttcctccctctagtgctttgacattgttgagtcatgcctcagctatggacaaggcatattatttatgtgatccacttttcagtgttaactttgaaaatctgtgatatgaaccataagattatcaatattatgttttggtgtaatgtagtaccatttctaacttacactttacagaatgttttgatagaactaaactttcagtatgttttatctttttttgttgttttttctcctcccttagtgtattgcccatgaacctttaggaatcctaagatagatcaatgccacattaaaatttaaggaactacttcatcaaaaccacatgcttcatttcctgaggattgtcagcaagccagataaaagaaaacatgtcagaaatctgtattgctgttattgatgcttcttgcttaactgctgcattactgtgatggtggtcctaagtagtttcctttccataaaagctcaaagaatgcatgcagcaatgacaaggaatgggtcaaaatttcattggggacttttgagaagtgaccacagtggtttaagtgcttaagttcttggatcatttctaacatatcaaaaggtattaatgtacttttgtatggctattttttttactgttttaaaattctaaaatggcaggtcagactaggccaagcattgacaggcttttaaaattaatgtttaataagatggggtggctgccagtaccttaaaagaatagtgaatatgacttggataaatgtagcatattctttaaatttggcttctggcttgtagatggatatagaagctgttctcgccttccctctctgtcctttcttctttcctccctttttctctgccatttcttcttcctttctttcaagcatcattgctgcctctttctcactctttgtgccccaaagaaggcttcactcttaaggatgatccttctttaaaacacaatggcagatcataagttctattccattcgataacctcattaaagccatggcaacactactgcttatttatttcaaggacctatattgagtttagaatcataaatattcattacaaatttcgtgaaagggaagcagaactgatagaaagtcagtgtattttgtcatattgtggttaggattctctgggacatggattatatacataaataaaacaaatgcactgaacattcagacagccttggaacagtgccttatgggagtaaacatatgcttttaaaaaatgcatcacagtaatacagtttatcaataatccaccctcggtccaactgagtctccagcatatctagtatattagaagccattctggaacttattcccagcatgctccacttcgggcaataattgacctatgccatcactgtggaaataagaggcaggaggtttcttctttgggggattcacccagaaatggatatgcctcatcaagaaagtctagagattttcaaactacccaatgttgtagaccatgacgcttacaagagggtgtcatctgaggagtcctaggggtcctgtaatctgactattgattaccctcaggaaatttttatcttactttatttttgagacagggtctcgttttgtcacccaggctggagtatagcagcaccatctctgatcactgcagcctagacaaccggggattaagcaatcctcctgcctcagccccccaaatagttgggactactggcgcacaccaccatgcccagctaatttctgtattttttttgtagagacggggttttgccatgctgcccaggctaggaattcttatttttaacttgaatcttcccagtgctactctagatttttctcttatgtttcctgccttttgcagtcaatgtgtatataaacaatgaggatacattttcaccttagtattagaaagatacaaatgcaaagaaagtccacatatttaacccatataaagttacagttaagttcatttttatgtttgtgggtttttaacttatatgtcatttccttgtaaaaagcctgcaaagcaatttacaaacttactatatagtgcttgctttgggccagctattcttttgttttatttaactctcctcacaactttattaaatagatattgcaatttccatttgaaagctaaggcaactgaggttcataaagtttaaggaattttttttccagaatttacaactagtactatacatagtggaagggctgggacacaaacccaagtctctgtctgtaaagactattatttgtttttcaaaaaataccaaaatattcacacatgactttcagtgcatgtttttagaaatctttttggtaaaggtaggtacagaaagagtggtctttgaacagttacctaggtatcatctactcagaaataaaaaataaaaggataattaaagtgaatgtatatttgtgtcattaagcatgaaatattcaatgcatatcttaaatttttaaagttaaaatgttatctcatatattatgcctacaaggccatcaatctacatagacagttgtgcatgcagtacatatctgctgagtacagatcagtgaagagagtagcctgtaggagattactatgtgacagaacatgattcgtattctcaagaaacatacaatctagtatgtgcatagatgtcaattctggaaaacttattggaagacatgtttaggatcaagttgttgaaggagcaatccatgcaatccttataagaggcagagcctagcagttaagaataattaagaacttaggttttgtagttacactgctgatatgtataaagtccagcagcatcatttattagcttgtgatccctggggaggtccttaatctacctctacttctgttgcctcatctataaaatgaggatagcacatataacctacttcatatggttgttggacaaacacaaagcacattctttgtgctgtgcattatcataagcactgtataaataagccattgaatatgcagaagaagtaggtggtactattattgttagttttgagaggataaaaggagttgatgtataaaaagtatttcaggcaatgactatctcaacaaaaattacccttagtaaaggaaaaaaaaatatgttgaaagcagaggaaacgtcatgtgcataagctataaaaacaagaataaatacataatatatgcttgctgaagtaactaccacgagtttggttctggtgattaataaagaaattctcaagtggaatgtggcacaatgagcttctctacttccagtgtcaacatatgaaatatacccagctattcacatttttgtggcttaaaacaatgtcagttacctcattaatagtcttctcttcagttaagaggcagtttcccccatgagaatgcatgtgttcatcatgaaatctaattagagtgataccaaaaaaaaaaggtaatgaaaaaatgtggtttgtaaacctgcatgtttttctgaattgcctcttgtgtgcaaaaaaacataaggctggttactatggttccgagagcatggttctctggttacgttgactcttttaagaattgctcacttttctctactcgcaatatacacattgaatatcatgcctgtgcaattatggctgctgaaggtattttctggtttgtcatttataagactctctacacagtttgcctttaccttggccctgaggttttttttttgttgttgttgttaaacccatgattttaatagtgacagttaatcaatatatttcttaactcatttgcaattgtcatttgactgtgttttataaaagctttaatggtctgtaagccttgtgagttctttttgaatgtggctgttaggacatgttttccttaaagtaaactaacatgaaggtttatgcctgagtttaattcagatctaagccatatacatgtgcagatacacatgtacctgcactttatttcattgcttcatcttttcaaactgtagctgccattcttttgtgtttggttttggaagggaagagcatttgagaaactgatcctgggatttgtgtgtgctgagagagagagaggactctacccagggaaccacattataggcagaaagaatgaaatggttctagatgtataattgaatacttcattccacaagcattaattaaatacctaatgtaaattaaatacatataaatatatgaatatagaaaattgtttgtttaatttcctagttatcaaacaggtagaattcagatttacacaaatgtgatgtaaaattaaatgatatcattcagcagagaagaagttgaggggcagttttagaaattttaccccccaaggctggagggaaaatctctgttaatgaatcagattttgctctttagaagcaaagtgttggtagagaaggtatcagtatatcagtatttagaagcaacagcctgaacccacagatgcagccctatttcatgaagcaattgtcagtggtagctaattgatatccactatcaggtatctaagttgaaatcttaccacatgtcattattttaaacagataagactatgacaatgtcaccaatcctagtaaactgggaggtggggaagaaccagacaatttgcattatccacagtatttagaaatatggctaataaaatgtaggaagctttatcatcttattgcacacagtttgctctaaaatagaagggggatggagaggagttgatgatatgttgttatatggaccactttatagcccgcattcattataatatgacagttgccccattgacaccatgttatttattgaaaagcagagcaaataggctagtaaatcatgattgcacatctagctaatcagaatctgctctggtttcatgcacgttaatttttaaaacttatttattctgcttttcattttattttttattgctctttgtttaatagcaatcttttctttaatagactctcatcttgagacattttaaaatgcactacgtgtcaaatctgattcaactatgatacctaaatgcatattatttaaattaaatatgaatgctttgaaaagtgtatacttatatcataattgcttaaaactgcattttcacattatgtatgttgtagagttgaatcttgttaatgtatgcaagaaccaaagttagtttaaaaaaagtaaaataaattattcacatcacatacatctatacatctgatagtgtaattagcaatcaaaagtactacgtatggtgatgtaataaggacattataatttttgtacatcctgctgatgatggatttagatttcacattttgcatattttctattttattattttagactaaaaaaagatttaaaaaataacatgttttgttattttagttccttttttaatcatccttcacgctccttttgctttccttccgtgtctggctctcatttcctcagtttagataggacttgtttttcttcatttatcttgactctctttcctgctctgcagtgctaacactaataataataatagaaatcttgggcctagatcttgggatttgggaggtcattgtggttacttctttgcttttagttagcttgctagccatttcagaaagaaaatcatttatgcttttctcaacatgcccacagatttcttgcatgtttccagttgtatttgatctcattattccaaaagttttatgtatcataatgttaaacactttagctaaaagattactactccaattctcatttcctcataatgctgccaatgttttaacactttcttctacttcaactcattccactctctccatctttctcttcactaaatgttggacttctctctatttgatataactctagtcacttttaatagagtaaaagcatttcatcaaaaataattttctgaaagtatgggtgtgccgacatcccactagttaacggtttcccacaggtgtattttaattcattcttaggcatttctttaccctcccaggcactgctatctctgcagcatctccatcttgttttctgtgggggttatgatgcttccacatcctctccaactggacagaatttgtccctcatacgcttcgtctatttatgcctggacaattaagaagcatcataactagaattggttcagatgaaatatatttctgttttgtgccaccgtcttgagacccactccagaaaaggagcctgggatatggacttgattaactcaaagaattgggttcaattcatagtcttggcctttactagctatgggacaaaacttccatcaataaaatgagtataacaactatacatagggtaatatcagttttaaactgtattagataacatttgtaaagtcttaggcacaaattctcagataaagtcttgaacatgggtattcaacagatttcacaagcattgcttgttttcattatgtaaatacaccacaaaactattcttagcggattaatacaaaataaaacaaacaaaaaggaaagaaggacctctactcattgtatacaccctctctcatcaggctaactctgaaccaggaagaaatgcattagagtcaaatttagctatagttacccagctaatggtaggatgatataaggcctattttcataccagctactgaaacagaatctcatctgtaaaatgggcataaacccccttttcatagagttattattgatgaatattcaatcatcaataaacttctttgtcatgctctgctagtcaagttttttttcctatgatgagttctgtctctaatattaaagtagcatgaatgatttgtatttaagatattttgtaattttcataattttgcatttttaatgtatggccaccactcattgagatctagccatatatgaatcagtacttaaacgattctcaaaaagtaacactttagaaaagcacagtaactcatacatgactcaatgagatttgttcaatttcttttgaaagaaacacagttcacacctagaagtgagctcagcatcacaggttgagggagacttgtgagctttctcttgctatgggggaatgaaacctggtttcggctagaaaggatgcaacctataataacacaaaaacatcccgtgactccactgttgaagaattttgtctcacttatccattcacatgcagcaggaatggtgcctaatttttagactcctgaagaacttctttatgtctctttttctttcttgcttacttgctttcttgctttctcactgttggatacatctggtatattctgaaactaaatatcttgtaagcatcgacagatttttgaataatgtgatattatattaactgttaacagtgaagcctgttgttctttcattgataaatattcagtgatcagaggctctaatgattagtggttataagcatgaaccagagcttaaatccatttctgtcatcactaatatagtgcctaccttgtaacaatgttgttaggaaaaaaatagaagtaaaaatttatcccctctgtgtgtttgtgcatgcacttgtgctcctgcatgtgcatgtacttaaagatttttctagccattcatccattaatttaagtcaagaaactttgatggtcctgtcatgagccatacactgtctagataccagatatgcagatatgaatgaggacacagttcctctcctccaggcagtccctgtctagtgagtaagatggataaatatattatccattaactaatgtgatcaacgcaataatggagtagtagattcagtgcagcagaaccaatgtggcaggtcgaaatactcagtgtaggtcacagaaggcaggctaattgcactttctactacaatatctctgtagcagaaaggtggaagcctgtttggaatccagtgttaaagtatagactctgctggcttcaagcaataagagcctgctttgtgacagtatttactggacattaaggatgggaatattcaatgctggagggcttatttggaatgtgtttttgtgtgtgtgcatgcatgtgggtacacatgctatgtctgtagacattatagtagcatcctattgctgttctaacaaattgagtgtcttaaaacatctcaaatttatcttacaattttggaggccagaagcaggaaatgggtctcagtgggctaaaatccagatatcagcaggattcctggaggctctaggggaggatatgttttcttgcctctttcagcttctagacattggctgtattccttggcttacagtccccttccatcttcaaagtcagcagtggctggtcatgggagtctcaaattcttatcactctgacactgactcttccgccttctgcttccacatataagagcccttgtgattacattggcccacttagataaaccaagataatcttctattttaaaatcatctggttagcatccttaattccagctgtcgtcttagtcccatccccaccccctgccaccacataacatagtatattcatagggtacatgggtaaggatgtgggcatctttgggaggagagtctttattctgcacaaaggtgcagctaaggattgtatatcagggagaaaatgtagaaaattaacaatacaaggaaagtactttacatctgaacacgagagagatcagaacttgaatcgcttaagaaactgcgttgttacatgcactatgtgccatgatgagacagaaattacgcagataatcaaatggaaaatgtcatataaatgttgtataaagatgacggaaagaacattctgaacactttgtatgaaggaaggacaagagagttgtctgtcaaataagtaagaggtggtgcattttgctgataggatcccaaatccagtgtagctaagaacattgttgcaaactttagaggtcattagaaatttagatctacccagaatctttaaaaatgtgccattttcctttatatttcttacgtgttcagtgaagtcataagctctttgataacaaaagctaaaacatataacaccatgtgccaggcacttttccaactgcttcacaggtagtaatcatttacttatcaccagggcccacttctagggcactggcctagaaagtcacacaggaccttgcactgagaaagatccccacttggtttaatggtttgctgttaccatcttgaaattcttaataatttttgaacaaagggccctgctttttccttttgcacgaggcctcataaattgtatcattgctcctgctcatcacgataaagcaatatatcagatacaattattatcaacattttgtagaagaggaaattgaggcatagaagggttaacttgccaacgtcacacggctgttgcattagagagccaggattttaaactgaggtgctttgaaccacttcactctcctgcttatttgagataatgtcttcttaaatgtgtctgttccccaactatgacacactgtctggtacatggttagctttcagtaagtgcttgttgaacagaattatgtttgatggtctttggtaaaaatgttcatttcagttttcaactaatagagatgaaagtaaaaaaaaaaaaaacctgagtctcttccaagacatttgtgtaaacaagcaaaaatcagctttttccctttgcatagtcatatgtctgaggatgttcccttgttcaaggtatgttatttattatgtattagatttatacagcaaaattttctggagagatctgataaaatgacacaaagcaatatttttccactgtcctaatttatcttgaagaaatttgaactttataaacattggtgttatatatatatatatgtgtatatatatacacacacacacatatatattcatcaataaaattgctataaatgtaaatacatgtgtatgcaataaagtgagaataggagagccatatataataataaaccagaaggatgggagaggtagctgaatttgtcggttgttacaccttaaacaaatttaatgcacatcttctggggtttgctgtgtgccatatgctaggcagtatgagggaaaattcgtaataattgtattagtaagaataataaagtcattcccgggagcgcagagtcagcagattgagacagggatcccaacccccgggccacgaaccggtccaggttcatggcctgttagtaaccgggccacacagcaggaggtgagcacaggcaagcgagcattactgcctgagctctgtctcctgccagacgagcggtggcattagattttcacaggagtgtgaaacctattgtgaactgctcatgtgaaggatctaggtggcatggtctttctgagaatctaactaatgcctgatgatctgaggtaaaagagcttcatccaaaagccatctcccacccaccagccttcgttcgaggaaaaattgtcttccaggaaaccgggtccctgatgccaaaaaggctggggactgctgagctgagagatccaatcatatggaggtctcatcagagagactgtatggcaaagactggaagagagggcatagtaggagcacaagcccagggcttggacattttaatgatgattctatcagttgaaaacatgtaactttgggccgctcacagccattatgtatatttcaccatctgtaaagtggggctaataatatcccttctacctacttccagagatgatgtaattactaaatggatccataaatatgaatgcatgctgaacattttttaaaatgggaggaggaggagggaggcattaaattaaggtgtttttcttgcactaagtattgttccaaataagacataggcaataaaatcacaacatatgaaaaagaagccttatttagcatgaaacactgctatattattttaatccctactttactaccttaccttagataattcatatctggtgattcagatacttgttggaccaaaacaaagagattgaagatgttagcagtgctaatttattttcagctttaattcaccatgttatgtaatccatatttggttgacttggatagctaatggagagggcaaaacatgaagatgttgtaagtactgacttatttgattcatttcattatgttattgagcatttattatttataaggcattatgagtggcacagaaataaacaagataaataagatgtagtctatacccttacagagtgcacagtttactagtgacaatgggaataaaatgtttgcatacaagaccaaatgtattaagtgctgtgagagaatagctgcaaggatccacaggaggaagtgaccatatgaaatagaaaaccacgtaactaacaatctgaatgttgtctttggcaagaaaaaacatagtttaaaataaagcagtgtggaataaatagaaagtgtaggagaaggtattatcattttatggaaatcccctaagttgctttataaagaataaccaatgctgcccaggagattgtatatgttggcaaattttttcatagcaacatttactgtggcttatgaaaatttaaatttctctcctgaaagttttattgcaaagaggaatagttttgaaaacatgaccaggagatctaggagtaaaataatgttatgataaaaacctgtagcctggaggttatcataatgaaaaaaaaaatctcactctagctggttcagatcattccaaaataggattataatatctgcagatttccaacacaagagatgaaaatcccaccacgaatacacccatttacattcttgtgacctggaatgactgtcagagtaactcattgttttatttcaacagccaagccgagtgccttagagttcattatcaccgactcactttaaaccgtactggccagcacagtaggacagttgaggctcctccttgagacacatataaaacatggaacattgagaaaccagcttttggttgtcagtatttttgaaaagagagtaccacatgacagatacacgaagtctagagtggttaagagtgtaagaactgcatcttgtgtctttttaattttttttttacattgaatcaatgattgtatgataagtagtgtaacaaagatttcaggagcaaatatgcaccaaagcactggattagacctgtgcagaaattattaaaattactccgggctaagggctttgttcctgctggccacctgcagtgtgtggtaatgcccttttaacgttctatccagggccctgcatggactgtctgatttgacattggacactactaagaggagacaagcatgcagagagagaatgattaatgtaagcccttctgtaactagccagaggcttaaggaattcttttctgcagcattccagagataattgcctaccactttatctaggagagtgttgtgtcattaaaaaaaaaaaatggcatactgtgacacctaagaggttggttatgttacaaataaggaaggaaattaaaaacaaaatagaaaatagagaaaaaaaaacgagaatagaggggagtatgtagagtgtttgagggaggatgggcattgtctgtttcatttgtttttgagttaataaacgcaaaggtttgataaatttttcctttacgtaccgacaaagtttcatgaattctctgaaaagtcaatgttttgtaagttgaaggcaacagacttgccagctggaaacctttattttacaaattaactctcgctctattattaatgtctctataaatgaaactctaatataagacactaaacagagtacatttctaaaaataattgattttatatatataatcaattattttaaaaatatatatttattatgtatattttatatatatatatatataacattattgtgtttgaatccattaatgtcttatatgagaccaattctgttccaatttggcattagcaatccacaagagcatgttaagttccaaaatattgtagcgaaatatcttcttcatcatgctggggctgggggctaggagagataatcgacttcagttgtgtacagaatgcctgggtgctccatatggcctattttccattggcaagtgagtccttaaaatcttagggaattctgctacatatgcataaatattataaattaatgttctaatgtgctttgaggcccttgctgaatgaatggcaggcaaaatgaaatgaaaaataaaacattttttaaagaaaccataggcatgtggttctccccaggcactggaattaggaatttgatatacattttttttttattttaactcaatgactagatccttccttttctggaatgaactcttgggagatgtacttaaattaggccttttcttgacaccttagcattcagaaggggctgtaatcattccagtcaaatcccttgcctcgttcttaacttatcaatgtttctcaaacacattttaaagggttttttttcccccttttaaaataaacatagacaatgcattaagccacgtggaagtgatctatcagaaagcttatctagaaaaacagcactcaattaagaagccagtccctggctttgctagagcagctcaggcagcccaagaattctttttcttttttttccgtctttgtattttttttctttagtgaagattcagattggttctctctatgcacatcctggaagtggaaagaactgtggatcttattttctgtggcagaacagtgatttacagggaaaatagttcaactgagaaccactaaatgcagaaagtctagcatccaagactataccctcagatcaggggccaacgtttcttagaaatcaactcatccacatgttgaaaaatctaactaatttatggactatagggagaaaagcatctccctactttcttcctaccttccttccttccatccttctttttttaaggtatttactttgaagtattacattagtaggcagagactgagtaaaatcaagtaacaatagagcactagtatgaaagggcatcctgaatttataatattgtttctccaattaataattattaaatatacagtatatatctatgttatatgtagtatatataataatcacaattgctatatataataattgctatgtattatgtagtatactctctctatatatatgtgtgtacataaccaattaataattactaagtattttggacctgaattatcattattcattagtagagataatatagccaaaaggaatgagaaggggacttgtagtcaagctgacttaagttcagtcctcaaatttcttgggcctaatttcttcatatgtaaaacagaagtaacgatagtttttatatagctattgtgtgtaagctgcaaaatatgctaaatacctggaatagtgtctggctcatggaaataataagtggcagcaagtatgatttcgtattatgcaagttgaataataattattggcatcctaggcccatccttatgggggtcacggtaatttttattttttgccatagaacctgtgatgagagaaatgtaacacttaccccaggtcacccaataagtcactctatgtcattaggacttaagggttttcagcttcactgtctgatttcagtccattaggccacaaagtcatcaaaacaaaccagaaaagagcaccatcaaaagcaaaagtaataaaatcaaaggatcctggagcagtattgtactaaaagccatctgctatcttagtctatattctcaaccctcttgaaatgttatttgtaaagctttaaaaggcttgactggaaaccttcatgtctttttaaagatacagtatatctattgctgactcatgcatgctaaattaagaattgtaatatgggtttttgaatatacatcagagaaatgccaatactttttccattgccaaagcccttaggcttttgctgttgagaaagaggctttatgattagctaagcaaatgattagtgcgacagtagcaatgatgatgagtgtgtgtgtgtgtgtgtgtgtgtggttttgtaactgtttggaggagtaggggtagttgaacaaaatatttgcaccactgaaatgataataaatattggtatgcatttcttttcagttattttttttttaatctaatgtccttatctgcctgctaggatttctgtgccataatcaggtaggagaaaaaaaagacacaaaactgctgtcttagcatttccacttgactttggtgccttgtctccctgccttgctctgtcggatgtccttattctttccacttcttttctcatttggacttggcaggaatgccttagctcagtgccagtgtggtaaccttaaactcgcttacttaagtggctgatctcatcgcttcctttatgtggtttgtgggatttttcccctctttgccttattacgtcccttgaccaccttgcagcttcatctatctcatacttccgttattgtattatcctttaaaaataaaacaataaatatttaaaacataaagcatttttatgatagttgtgggggtagatatttttatagaaacaataatgagaaaaaaaatggatttctccaagctttataaagccccaactacgcagagggcaaattctcaagttacaggattctacttgtcctatttctgaggagcagaacaaaattttttttgcagatattttaagagatggcaaaacagggaagcaaaccaaagtcattacaaaagcctcccagtgtagacccagccatctgcatatagttcacagaactcttctgtttatttatgagtcgtggaatgtgtaaagccaacttctagctgtaaaaggacgtacagttgctctcatataatttctttggccctttttttttttctgcaaaaccaagagtttgctttctcatattcaaggaaacactgccatgcataaggacccagtttttgggaattccgattcttttgcaaaagcattttaaatgacaactaaaaaatacacttaaaacgtaagactatggaatttaaataaatgcaactgatcttgatatatatatctcgaagcactgcacctgcctaaaaatactttttcatagttctaatgtactctgtaaaagaaacagaattaaattgaagaaagaaaccttcatttttcagtataatttggttcttttcaagataataaccttagattaagacagtcacaaagaaagacaatgaaaaaaagtcacttattttaccttaagacttcacaatttgcttcctagtaatatatttttccggaggtttttataggggaaatgatttctcaaatttcatcttgatataatgagttcaaggaactaaattgtttagacattaaaaaattaaatatctctgccattcttgttctgtagttctgtgctctatcttttcagttaaaaagaacattatgttttgcagtccagcaacttctttgatatgatgttttagtttaatctatctaaagcattaccctccagacattctaagaaacttgtttttctgacgtgatgtgattttgtgatctctttgaaacattttcagccttaagcattaagcacaaatagatggaaataggtggtagcttgaatgtttgccctgtaaatgtgggtttggagttacccccctgtatatgtgaaaatgtaaaataacacatataccctagaatataaggatataaacaagtactatgctgggcaaggtcagggttatctaaccctgacttatctttgtctccttataatttccagtgcatcttggctaatatctggggatagtgtagttacaaaggggatgttaccaccctaaaaactgaaaatcaaatttaatattctcctgagttgtccattgagacagataatcctctggtttatacatttaagacccttaccactagaataggtgtcagcaggttaatattatatatttttttaggaatgttgagtctgagaacataatttcagagaaagtggaaggaagaaagacaaagaccgttggtcccatgagctgggtatgaggatgagaggagaatctgatgtggaaaacatatttgacattaataaaatctgggctcaagtcttccacctctgctcttagtatcagttccagctatctacaatatgataggcagaggtataaatttattggaaataatttctttattacttgtaatattttatatggtgctctgtatatggggttgggcacccagaaataacttattaaggagcacacaaattaaccgaatgcatagaaatacataactggaacatagtaagataaatttgaataaatgcccagtcatcattttctctggggttcatatctttttatgaattttattgatatcatgttctcttttgaagcacttttcacatttgaaattggcagtctcatggaactggattagtatctgtcttctacaccacattttaagtgcttatagtggaaaggaccaaaaatatttatatgcattattatatccccagaacatataggtatctcaataaatactgtattcagtgagtggatggattggatggatgtgtgaattaatgatgaaagttatacatgatgtgatatgattacacttagtgtggaaggtgaggttggaatgtgaacaggtggggaaggcaggttgtgaaggatctggaacaccataggtattagcttatattctgtaggaggcattgaaagaactttagcagggaagctacaagataagatttacggtttaacagaccactgtgaaggttatatggaggaggaaccacgagagggacagcagcagggggcacgttggatagagtacctgcagtaatttttatagcactcttttattttgctcacagtagtgcttactactctctgatatttgtctacttattctattgttttccatcaagtcctgcttatcattctataagagaagaaacagcgtctgtcttatgcaatgccgcaaccctagcaattactaccggcatatggtagggcctcaatgttattgaataaacaaatgacttttttttttttttttataatttgagcatagttagggaacagtttataagtgtcagttgagctatatattttatcttatttctacgaatcttttttttggacacttcttcacattccatctttcgaatatagaactttattatttatttatttatttacaggcagagtctcactctgttgcccagggtggagtgcagtggtgcaatctgggctcattgtaatctccacctcccggactcaagtgattctcctgcctctgccgctggagtagctgggactacagttgtgcgccctgctaatttttcagttattagtagagacagggtttcgccatgttggccaggctggtcttgaactctctacctcaagtaatctgcccaccttggcctcccaaagtgctgggattacaggcgtgagccactccgcctggcctggaatatagaactttaaagaaaatagacataatgtttccagttgaggatgtagcgattacttgcaaagtctgtcacattttctgatttctgtctttactttgtcagtgtgtttgctattagacataaagcaaacaaaaaaccaaacatctatctgaactaattttaacacttttaaataacaaacttgctcttgcactacctagatttttttttgtggtacatttgggctgagattgcaatttaccttttcatcaagatttggatggcctcttcttatcagtacgaaaatctatttaagtttacatggactgcactttctcttacagacataaatgacttcactgtgcctaggcatttaaaattctttcaaaacctcaggagtacatccacagtgatgatttctctgtgggtttcactggtaaaaaaataaaataaaaataaaaaataaaagaaaaaaaagtcatagtaacaaggagcaaatgtcatgatcttgacaatcaaattctgtttcctattacaaattacttgcactgtatggttctcttgcttccagcgtccagggagtttcttagctgaaaagttgagaatgtcagattatttacataagtggcttattctgaggttattgctacctgctacctgtggatgcttcacaagcactatgttcttgtatgtggcatgcagatgtttctgttaactcctgttaaataaatatataggaagtaagcatcaacaatacgatcccaaactaagagttttcctgtgtcatgtaatgttactaaacaaacaaataaaaactcatcttatcattgcaaaattgcaaaattgtcactgtggaaataacaaatagtataatcagcaatttaaatttttttcttgtatacttagctataattaccagaaaaattagctcttcagatatttgctttttaagtcaatcctctgtgaactctgtggattctaagttagtatcgacttccacatacttctgttgcctgctttctttttcatacttggagcttttctagctttttcaaggaacagcttctatagtcatttctaaggtaggtacagagttaaggtggttagaaaaaatttatggaaagaaataatcgtaaatctcctcctccaaatcaattattcacacaaaccacattatttacaaacatgtatatgttttgctgtagatatagccatctttgtttcaaaaggaatttgagcatactgcaatctgcatattaatgaaataaacttgaggggctgtggtagatattggaaagagagcagattaatgtatgtgatcactaaggtttaacccttctaattacattccacagggttaaaatcaggtgggctagccatgccatctcttttctacattttgagggggacggaggtgagcaatacaccagaagtctttgaaaatctgtgtatgattttgtccatcaaaagtgcatctttgaataagaagggagttttgttttggttttagttttcttttccttctttccccttccactgacaccaaaaccactaatcttcaggggagttttgtcattcctttatcagtgaagttattctaaagagcttaaatacttaagtgatttcctttggagcagtaatggtgaattatgcggtgctctaattgtgctattagtttatctaagctaaaattcaatctacttaatttgagggtcttattacacagtggtttgaaaaggtgaaacacattaaaaggacattggtatttttaacaggaggttttagccttttcagatgttgtatttgatggaaatattctctcttacatttatttctaatgttagtgtgagatgtttattttgatatggaagcataacttggaaaatttgtaggaaatttgcttagtatgcatttatatgttttaacttgtggagttgaagttccagttctagtaaaaccaacccaaccttataatacatctaaatattatgtgaatttgttatggaattataccacttacattgtggtgtgcttgaaacttaaaaacacatgtttttaagttggtgtaaatttggtgtaaagttacaacgcaataggaaataggatggtttactgtgtattctctctttgtctttttgaagacaaggtctacttctgtcatccaggctggagtatgcagtggtgcagtcacagctcactacaaactcaaactcctggactcaagccatcctcactccttagcctcccaagtagctgagactacaagtgtgtgccaccaggttaattttaaaaacttttagagacagagtaacattacattgcccaggctggtcttgaactcctgacctcaagtgatcctcctgcagctgcctcccaaagtgttgggattacaggtgtaaaccaccacacttggcctctctattcttatttgaatgctgtgaaactagaaattgattaactcaatactatgtaaaaagtgcttaagaaattttgaatttttgaaactgaattttcatcttggaattattggtagtctaataatggtagtctaatggtaataatggtagtctaatgagcagctacactatttatccatacattaaaattttacttatagtgatagctataactaaaacatggtctgaatatatctataccagggtttcccaatgttggcactattgatattttggatcagacaattcttgctacggtttgaatgtgtccccaaagttcaatgcaacagtgttgatagttgaggcctttaagaggtgattaggtcatgagggcattgccctcatgaatggattcatgttgctatcacaggaggcagtggattagttattagaatagtggatttctgataaaaggatgaatctggcctccttgctccccctctcttgtactctcttacccttcttcttcctttcatgggaagacacagcaagaaggcccgcaccagatgctggcaacttgatgttatactttccagactccagaactgtgagttttttttttttttaaataaactgcccggtctgtggtattatgttatagtaacacaaaatggactaagacaattattacttgtgggtagctgtcctgtgcaggataaagtgtttaacagcatccttggtgtctacttattaggttccaatagtgccacccaagttgtgaggatcaaaagtatttccagacattgtcaaatatcaactaaaaagaattgcctgttgagaactattgtttctaaggtaaatatgcagttacattttattgttgttcaaaatatttgctatgcatatgtccaggtatgtttagcctccagttctatgtgtagaaatcaggcttttaacagacaggatgcagccaggggcagtggctcatgactataatctcagcattttggaaggccgagacagaaggattgcttgaggccagaagttggagaccagcctgggcaacatgacaagacctcatttctacaagaaattaaaaattagctgggcatggtggcatgttcaagaagttccagctacctgggaggctgaggtgggaggagcacttgagcccaggaggtcaaggatgcagtgagctatgatcataccactgtactccagcctaggcaacagagtgagatcttgtcaataaataaataaataagtaaaaaaaaaagaatgcatttttttaaaaaaggttttaactttattcataatttataatgctactatcagattttgtgcttttacctcttttttatgtggtggattgacagaagacagatgcagatttacaccctgtagctcaaggaatgtgtgagtgagaatccactatgagtagtgttagctttctgcattagagggctgattcaaactagttgtgttgcaggcctccctttgtgcttcacaccagaaggctttagaataaacatttggctgaaacgtctttgcaggactcacccagctgtcctgtgaaggaactgttgcccacatccacatgcattaatgtctgacttgccaaaatgtttgtttgccttcacatagacaaaggcacaatgcaatgtgaatagtatacagttaaattattacttcttcagccaaccaagtgaacatggaattttttcatacataagatagatagtttagtgaaacttttttttaaaaaagaatgatagaaatttttagttgacttttgctgaaatcataattttaagttaattttatagtggattttaataatgtaaagtgttataaacaaattgcagtatgatttttatttcattttagagaattatatattttaccacagcttttcaatcttatcttatttccttgctctttcctcactagcactcttcctttattactttgttcatattggtactactgttgaatctctaaacctagtaatatatcagtgtgaacctagggtttagagttgacacgaataaaggtagactattaactataaaacgattttcaagagaaaagtctaaactttttcattttgcagctattaatatatatttaatgaattgccttgatatatgccttctctgtctttaatgtatatgaagatggattggattatttatgtaaatggattacccatataaatagattatttgtatacactataagcacaagtttatgcagttgtgcaatcacattcccttctctggactaacttctttctgaaatagttttaatgaagatagcatcggcaatctgaaatctttgctagagcctaaaactttgcatgtagctaaactttgactaggtagcaaacaaaaatatattttaaaatttaaggtactctgtgtaaacaattaggtaattcagtaggaaaacaaaaatagttgaggtaatatgtcatcaggtgattctctgcaaaattataattttaatatgtatttaccacagtgctggcatacagcatggcatactaaatggtgattttgagtatttaaaaaattttctatagcaaagaacattccttcctttttcatttagtttttatttatcagatgaggacagatgcaatgagggctgtgtgcctaaatgaatacttttactcttgactaaattagtctggcataaacacaagactgctagctttcagtacaattgaaaataagtgctgtggttcagaggtctttcttttcatagtcctgccaaatcatgcttaaagttcagtttgtattccaacagtagcatttaagacagcatagttaagaatctcttaacatttccatttacaactctcctctccttctaacattttctttattgattttaggatgtttcatggtaacagcttatcagtacttacagccaatgacctaagtatgcaattaaaattgtactatcctagctaggtgatcaactggccctgacggtggggctttggaaatactattttctttcctcaagacctattcttattactaattataaaatggaaaagcacactattgaggttgaaccctttagagaaatcatgcttgtttctttatagatttaaacatgaagatgcttcaatattttttccttgttaataacacttatggcctttaacattccattctaactaaacacattcacttatttgtggtttgtcagtggagaaaaatagcatagggaagtctatttttatgatttaaatgtcagtatggaaaactgccatccaagagagcatactgttggatgaaacttggccttttggtagtcatgggcttgtgtgtaagagaacactgacctccctctcccctccaaaaaccactcttggggaaatcatagattcatagtgagaaaacatgttagctcaactaccttaaagttgagacaacttccacagacaagagcaaattacctgtaagatcacaacatgtgtttactgattctcagaataggcagactgacctttcagggcctttgcccatttcgtgttactttcagtcttcttccctccgatttaccactgtatcacaggacagatcttcagcgatgttaaatataaaaaacatggatgaacaatatgcatgtgtgcatgcctgtgtgtgtctatgagttaggttattatgaatgtgtagcttctgcttactccagagtaatgagctatataattttgtaagtttattttacctttttgggtctcattgtctttgtgtgtaaaatataaacctgctgcttgttctgagagatctattcactaaatttaaagcatcgatcattttcttccactaagaccctcgcattgtcctcttccttctcaagcttcaaattctgtgaggtctcctttcttttctggtatttctttaatttctattcctggaatccaaggcagaataggttctcccattctctgtgagtagagacatatctgtgttagtctgggacttaggtctatactttctagcttcgggtcaaaattcttctcttgaaagatgaaattctgtcaggaccccaatctttgtttataacattactttgcctatagcataattttctttattctgcaaaagaaccagtctgttctgtttcctttggctaaccttttcttctagatcctttatctcttttcttgcctttgtcttcatgtagctcaaaactgtctctctccacagagaccagctactgtctcttatatattcgtattttattacaagtacaactgaattacactttttgtgaagagttcaactgagactgtattcttgatatatgtacatattatttgtggttgaggggcaaggttttagtgtatctcaatgactgtgctcagtcttcatggaataaaggagaatgggcttttaagctgcaacttgatggctaagcgctgagttcgctttcatattgattttcccctccctctaccttcaattttaataactgctcttctcttcattcctctgaccaagccatagactatttgtgctagaaatagctttagggataatttggtttcatctcatattatacatgaaaaaaactgacctccagagaacctaagtgacttaccctgaatccatttaaagtctataaaccagggtttttcttttttattaggtggaggggggagggggttggttttgttgctgatatttctagttctgcatccattccaggtatgtgcccatgcttcacagaagttgtttaactaagttgatacatttggtgtccatatttgaggcatgacccttttctttgtagtcttctgtgtcagggccctattccacggctggacactcactaccagacaccagtctagcctgttgcccactgcctgcttattcctagtccccagaccttgcgtttttggttagctatccacctgataacactatgtcggctccatgaggacttcttgattttctcccaacatcaactgccactgttcttcggataccaggctgatcctccttggctccctgcattttcctcagtggtttgcctgagagaaacattatgtatgcctggtctctattttttttcctcccttattcagactgctggagatattaaaggaagccaagcgattgttctctggaaattctttgtaaaattttataggactacttttggaaatgtgtcttgtttaaggtgagtgacatgttcttcataaccttgcagctttcctgtagaccctgaagctgagaggctcagaaagtaaatgtgtgtgtctgtgtgtgtgtgtgtgtatacacatgcatttgtgttgaggtatcacacaaatgctaaaaacacatgtcattagagggatacatttcatttttggtataatgagatacatttgggcctggaaattagacttacctacttttgaatctagtttctccagttactaaatatgtgatcttgggaaaaattataagttaagtgctagagtcagaattccaaccaaagtttaccaggctcccaaatctatatttttcataaaatgtgacataagacattctctggtcgagtatattcatttaatatcactgaagaaaagagtgtttatggttttctgacttagtgtcaagcaggaaaggcaaatgggcttcatcttacttcaaggtaaatgaatgaagactaaatggttggacaaactatttaacatctctgagcttcagttgcttcatttgtaactgtatgaccaaaattagatcatgtatgtgaaagatgccttttggaaatggcattaatagacctcttattctaccttctcttcatcctaagaaactgagtgtagtaaccactactgagtgtagtaaagaagaagtaaccattacttctttaagtaatggttatcattaatttttcttgaaaatatattgtcaagatggtaaactcgatggaaagtgataatatgagtcagtattgggatatatttacctagaaattataatttacattcatttactcctaaaacctaatgcacatatacacacaaaatcaactcacatatcatggctacatagaagtaatgaaactcagtggcttttttcaaagataacgctagctataacttaggaaaatagatttttcaatggaaagcaatagataaaatatgtagaaggtaccatttaatgttctgtgctatcttatgttattaacctcaacaaagcacctaaaaacagtattttcttatgtaagaaggattgtaatataagcatttctatttatgtctagcaatctgagtgtttttgtaccattttaatgttttatatttaagagactatgacaaaatatagaatatcatgctgaagcactagttaccaagctacagaaacacatcggattcaatgaagtccctttgtttatatgtagatatatacagattcatgtagtataggatttagcaatgtgcctaagtcaagaaagcaaaaggcagtgggggattagaggatagggaaacaattattctagatctgagatagtatcccaggcaattaatggcttcagatatgtcagaggataatgtgtccttcagcaatactatttcatctaatcagccagaatcctaaactatctcttgagactacttgaagtagtcttgagttattaatatgttaaccaaaatggtggcagagtagaaaatctcttggtgatgaaatcaaatggccctacttgacgttcattattgaatcataatggtccttctgaaaaatccctgaaggaggaaggactttaaaactttgcacatgagcctcttatttaataatattgtgccctccaaatttcaatactttcctgacagaattccagcattattggcctcggatgagatgggggttaaggttaagcaattggtagaaattgatgtggagctgtcagaaccagaactcaaactcaggtctatcaagcacaggaaaaaaaaaaaaaaaaaaaaaaaagaaggctctgtttgagaatttgattcggcttcactgaacagcagagaattccttgtctgtgctcccagtgtttatcggagatggtaaatgggtttcattctacctgctgcttcataaagattgattggtaatggctttctggagtgctaccttgagaagggctttacggtagatccatgttattgagaaagtgacatgattgattagagacacctgctttggaatgtgagggggatgggtgcttgccagtatttgccatttctggcttagaaagtgagaaatggggaagaatttctaaaagaaaaaactaggcctttggagtcagagagacataaatttgaatcctgatccatccctcttaactgtgtgaccttgtgggaaactaactttacctagtgttaatttattctctaaaatgtgctaccaatctcccagtctatttccaagatatgaggaatcaaatgtctaggagagtgtgcggtgagtattagatatttaggaaatgctatttctcttccatttaccatttatcaagtcttctaggtgtagccacaagactcttcctacgatgggcctctggcctatactcagcaatgcccaccaggataatttgggaacacagggttataagttgagccagaagctagacatagtcagtgttttaacgtagcaaccctattagatcctaggaggattcattcaagttttatatatttatttttatttttaatcaaacatgttagggtatcactaagaggtggcatattttctggaatatgggaagtcatttgaagctatttgttctcttgtatttattgctctgtcacagcatgcctaagattttcaggacagaagtcaagtgtaaatgatgatatattttgctcttctattagcatcccttttttttctgcttaaagttaaaagtcactttggatgtaaaaatgtaactaccacatcagccaggatttttttaaagccattgtgtactccaaagtctattttccctctgagtagatatggaagaatgagctcctaagagactagcctaatcaaatttaaaagcaaatgtaaatttaaatcaaccatgcagccctgctgtgtggcaattaacatttcaaggtaaaatgaaatgtgatgatagtaaataccagttctacgcagaatcggaaacattctgttccatggtatatttgggcagagaatggaaagttgaaaggaaaaccattattaacacaccaactttgacatttcaagatataattcaaacttgattagaacttccactaaaaataaagtcttctattaaaaaaatcacagtttcccccacctcataggctacatcacagcctctcaaccttggcactctggacattttggactatctaattcttaggggctttcttgtgcattgtgggacgtttaactgcatccctggccctacatactagatgccagtagtaactcaccttcttccatcattgacagctatgaaaatcaaaaatgtctccatataatactgattgaagaatttagggaactgggttactactcactaggcttaccagtccctaactgtgtgttttgtttgtttgtttgttttgggttttttgtggtttcttattcctcccgtatcatatttcaacttaaatatatgaggatttatagtagttttattaagctctaaaatgatctggttgaatcttcctattacttttttaaagggaaaaaacactatttcagagacagaaagtcctcgagggatggtctttgggggataagcagaaggaagtatgatatgaaaaaagggtttaaaattgtttgcagcaaaagcaaaactaccagagccatgcatattttttataagtgtcatccaagagtcggaatttttacagttgttgttggttaccatggatattagtttgaaggacttggaaaagtggaagaggagggttgtgggtagtgggatgatggccataatacatttcctaggagtgttcaagaagtaaaatttacgttctatgtaatttgtataatttttctgaaaagaaaaacttttcaggtaaaacaggtattattatttataccttactgatcaggagctgtatagttctgagttaagtgactcacctaaaattatgatctagcaattacgttggctcaagcttcttttcttctacttagaaagtggaggaaagcatttgccttctgaaggcggaaggctcattgctaattttcagtgttcacaaaatctgctgctgtggtatttctggggcttctgacaaggacaggaagccacacattggtgaagcatccatgcattggcagcactattgctggataatggagattctaatttaatcagcctgagttagggaaagcacaatacaaatgaacactttgtaaagatgcttgatttgtcatgatcagaacagaatatccaggtagacctggtgcttcttcctttattgtgtttgttcatcctggtccttttctaagacatcagttgctcattgcccctttccccagatcatctgatgtgattgtgacatgtacacttggtgtgattgtgattaacaatagctggccagtgggcactgctgctgtttgcggcaaactcatcctttcttcctgatgagaaatcacttttattggacgttatccttaatcaccagtcaaatgagcctctcttgaaatctggcttctctgtaacctgctgctaccacatttactctattggcatcaaacagggtcgtatatcaatgcaagttaatttcttgaaatctgttaaagaggatgatcttttgctctgtagcatgcagattatgttggtaaacttagtaatacatagtaatacattggagttagcacaggaatagggcaattctgttctttttcttgttgcaaagctaggggacaggtaatttattatacacgtattcaccctgaataggtcagaaccatgaaatttaagaatccttcattggaggctatcaagtcattggggagattaaatctacattgtactttaatctgccggatggccattgccatcagtaaaatgtcggatctgtcggcattgttaatgtaaggggcaccgtctgggtaatcatcaactgaatgcagtgacaagtaattttattgaagtaccaagtaagaacttaaccctcttgatttttttcccttgaacccattttcttacttttgatggaatgaggacatttttagaaaatacagtgagttctatgtcagttttaaacaaaatgtttctcacccttacacctaaatttagttcatctgagaggatatgccaagaagaaaagaagaattaacagattaccaaaaaaaaaagtaattttacaaaatttaaagcactctctttttctatctttgctaagtcactatttttatagtaatcctttggagtatttacattttgcttctgaacagagagacaaattcttctcccaccacgtatgtactggagtcgtattaatccttgatattgctggaactaacttttcataatagaatatgttctctttcccttttagactgagaatttagtaggtaaaagaagaaatacagattaaactttgagcttcttaaataattcaagatgataggattttacaaaagcttagaagtcagatattaaaaatggaatctgtattctgcagttgttgtataccagtataagcttgatcacaaatttttctgtttataaaatataaaatcacaatttgatacatacgtgtataggcactctattcatgcttaggaaaatataactgtgaagtgaattgtaagtaattttgtaagtacttactatactgatatcagaaaaaaaaaaaaaaatatatatatatatacatgctttaaacaagtgtaagccagaactaaaagttattcaaataagattgcaaacagaggtgtacatatatgcaaccaactaaaaatatgaatttattgactttcaaaattcacatttttactgtcaaaaagaaatatagatttactttctgaaacctaattgtgaaattgtacactgaacccttcaaataattttggaagcttttttcttttttttttaatcttcaaatgactctactttgtcaggcatttcggttatgagagaacagtggtagtggtggtgactcaacgtggaggttgaaatagagatgtaattaaatacattctgaaattagaaaacaaggttaacgatgatatttgaatgaaatcttttcaaacccactgtcaaaacacaacttcttttccactcttgtttgaatctcatggcaaccttgctaccttttacagtgacttctcttctggggtgtgttttctgaatgcctttcatttaataggcatattttagaaacctaatttctctgtctgcgtcacatcagcaatgctgtagaaacctaaccattttagactgtctggatgctgttcttatcaagtcattaacattattattgagggtgacatagagaagttaactcccctcactcggagcatcttatttgttaaagaccacagccctttaacctttataaaggatgtggtttcagcaagttaacttttaatgtggagctgttttccattataatttcaatttatgtctgtctgcagaacttcctgcaaatcttacaagactttttgtgtaagtaaagctcgtctgggttgtgcataggtgtgttctgaggatcttagttcttggaatgttagaattggagcccagactcctcattttagggatgagagaattgaaactcaggttgtcctgccaaggagcatcaatacaacaaggtctattatgagtatcctgacagttcattaagtgtgttttcctctacctcatactgaccttttgcaccagttctatcttggttaaaactgtattttgagaccctgaaaacaggtaatttatattagccttttttgttctggatcgtttctcctttgtttatgttgaatcaaagtgcagatcccagtcttctgccttgtgctacaattcattttaacagaactcttcacataaacaatgcagttcattggaaaagtagtaatattgcttttgtaaaaatgatatatgctttgtgcacaaatttaagataacacagaattaagtaaagaataaaaataagcagaaactataccaaccacttaaactcatagttaatattttggcaaatttatatccaagtatatctctgtgcaaaaattgtttcttgatacacatatgaacttttgcctacattgattcatatggccatacatcaccagtaatgcttcaagttgccattccttctatcaaagctaatacagacttttgccagtctttttatactcttcccattctgatatacgttgaaaaagtctcttttttttctttatcactaattcagcagaagcctttaaattacctttttgtgtcttttgttctcatttgtgttgagacaaccatgttgtttcttctttccatccttacggatttgtgaaatctctttatctatttgggtattcactgtgacattttacaaataattttctgttttatttccaacttgctatgtcttttttgttgtttttgtttattttgttttgctagcataagtttttctttgtagtgaggataaacttattctaaccggtgcaagtaattaagtaaatttatcactgaagttatattcagaggtaggcctatagctaggcacattaataggataaaataccacaattattttagaaatacctttctgcacatataagttatattgctaatacatctctgtagcaaagagagagtctgttggtaggcaagagtagcaaaagcctgtgtatacataagcaggttaatgagctgtttactgatttcctaccattgggttagcatcccttgagcatttagttcttcatcttgttatcatgctgagattccacatgaagtcttttttttttaaacttaagtgtgtcctgtgtgagaatagtttctgagatgaatatattgagtttctgttttgaattattctaacatgccacatgctattttatcatttggtagtggaaataacaatcagttaccttcaggaattctgcattgtttgacggattgtggccacacatatgtttggccaatagtgttactcttctctagctttcatcctgagcactacagcttatagctacagtatcctgcaaacagcctttccttttttctcccttctctctttgttcttaactattgctactcttattgttgtagtgaagttgttcattttgtttttgttatattgtagtgcatactcatttttaggacaaagtgcctatctaaaactgtggttttcatcctgggctttttcctaggtgaaaaggacattaagggtcaatatatgataaccacacagcattttaaatcgtttatcaatttttaggtataattaggagagcacactgacatcagattaggtcaataatctgtcctaatacttgtatactgccctctgagtgtgtgatattttgaaaacaatagctattaatttcattcccctgtatgtgcatcagagaaagctctaattcttcttttttttttttctttttttttgagacacagttttactctgtctcccaggctggagtgcagtggtgcaatctcgactcactgcaacctccacctccaagatttaagtgattctcatgcctcagcctcccgagtagctgggattacaggcgcccaccacaacgcccagctaatttttgtacttttagtagagaaggagtttcaccatgttggccaggctggtctcgaactcctgacctcaagtgatccaccagcctcgaccccgcaaagtgctgggattacagacgtgagccaccatgccgggccagctctgattctttagaaggcaaaattgtcttagttgagaaaggtaagaatttagctgattggaaggaaactaaaagccaacaggactttgcttctggtagatacaggaaagtgtaaagactgagtgaagcacattaggaagtaagagaaagaagtctctcaacgaattggtaccttgaacagaagttcagaagaaaaatcaataaaagtaaacttttcatgaaaatgtgactgaggctgggaatctttcaggtttcattggtggggaaattccaaaagtagtgaaaaaatgagaatcagtctttgttagagcacctaccgtgtgttcgattcttttcaaacacaaacatcagtaaggcattcaattctcaaacctctgaagggtggctctcattattcccattctacagatgggaaaatttaaggtacaaagaagttaaatactttgcagtgtgtttgctaagtaatggagcaccaggtctctctctgccttcaaaatcatgacctctctctctccagggagggtctaaaaaggagagtttcctaaggggataaaagaattcagtgaactctctgattgtcaaaaaagacaccactgaattagaaaaagtcactttgtactgctctgaggaagtagagcagagaggacattggcaagtgtaaatgaataattaagtctttttttttttggtttctttgttttagcatcagccatattttcaaattggaaagctttaggatttcttaattatggattgtctattcattttacttttcaacttgtgcatcatgtcttacatatttcggcagcctatatgaacaaggacatacctttctgaggttctgcttatctgcccaggatcttctcttcccacatgattaccctcttgccaatcttgccccaagacgaaaaacagcgtcatctgccttttataatgttcaaattttgaggtgatataatctgtattaaaatttttatgtaaaaattaatgtgaaggtactaggattgtatttttgttaatctttccaaatttaacatgtgactcttctaaagagtatgcaggcttatttcagttttggtaattgggtttaaggctcaaggaggaaggaaaacatcttatagttatctttgaatctctagtacccagtatgctgtcatctgcttttgaattgaattttttaactgctgtttacataggacacttttccatatcaaaatcatttttaaaactatttttggatctatatattttataatacattaaaaagagtttgcatggacatttgcagtttatgcaggaagatcttagctacttggcaattaagaaaagatgattgcagaagggagcatgtgcgcaagagagaaatgttcttgggttgtttgctgaatcagctgtattacatgacagccccaccttatacactagaagtactgttctttgtatgtgaggatgatgcctccaacgattcaacatcagcattacaggatcttgagttgtttttccggtagaggtaattactttctctgattcacccccactctcttgcttctgattcctagtgacatactgcatgcaggtataacatgattaaccagggtgatatttgtattttcttaacagtggatctgagcaactaaatgcatgtatgcttgtctgcatgttatagtaaccacatgagtgaaatagttatatgcacaatgtagttgaaaaagcaacacaataacaaagaaatgacctccttaattgttattcattattttctgctgtgtatcccttatttcaacacttgtgaattgagggatttaggatagataatttttaactattctgaagttctaaaatttatgattactaaattcagtatagttaaagtaatgggattaatttccacacacaaatttctagtgtagtactatattacttaatgttttcttaggaagctttgcttttgttgttgctctttttgagactataaacccaatgcttttaccttcatatacaggtacatatcaaagtaacattcaatgaattatttgtagttggtatatgttcaatggtataaaatcatattttggtcagacagaggttgtatataagctacttagaagtagagcaccttgttagccttttatttgactttgttccccccaggttaaatttctggttcattttggccctcattagtttcaaattataagctaggtataaattctatacatgggaaaatataatcctacttagggcatgttaagaagtctggcttatctattagtaaagctgaaagggactacagaaatgatatactttaagtcctcactttatggttgaagaaactgaggtcaagatcaaggttgtatcactagcttccaaaatcctctgaattctggttcttggtcttccagcttacccatgatatatttccttaaactggaatataaacgataataaggtgttgataatgattagaatacaaaccaagtggaaaaattcacagtggtgatgaaaaccaaaaattgtttggtgctctccaggaatttcagagagggatgccaacagtgtgaaattctctgtagctaacatatttcctttacaggaagcagaattgtcagaatcacattattctctccacagaaaactctcttgccattagctgtctacatccacaatgtagaacatcatgctgagaacttggggaatccctattcatatatgcagaggtttgtgttccaatgacttggctattgtgaaatgtagaaatttgtttctaaattggaagtgtgtacatagtgagatattacggaattacatttaagaagtgataacatattctatccagtgtttttaccaagataatatcttatgccaattgcaaatatccttttagggtttgtcgcctatgctgtcttccattgctgcagattttaaataaatgcacagaagaattttgctttttgctttcttttcttagtagcttctctcagttcaacaacaaaagggtcataagtgagaccaagtggagcatcacttgatttagtctttcttacttgaaatgaaaatattttttctcttgacattctgaagtctgcagcactacattattaaagggttactatagtaccatgagactgatttagtgtcgccctgaaccacatgattatggaaacatagttctgattatgagaatgtattgccaaaagtgatttaaaggaattaaaaaaaaaagattttccaactgtatacaacagataagtactaaagtaaattctctcatttttatgaaaggagttttatgtctggacagctttggcattaccaataaatgtgttccctttgcaatttcaaagcactccaaattcgtatgtgttccgggatcagagtaccactaagggaaattggatttttgcctggtggttatggaataacttccctttgcttgaaaatattatggaatgaagaagatattgtattggtttcctgcccagaaaatgatgcctcatttcctgattatgcagttagctattctttcttctgtaatctcaaaccactgaatgtggctataatatagttgttctcaaccagtggtgattttgcctccagggaaacatttggtgatgtctggagatgtttttggttgtcacatggagggtggcatctagtgggtggagggtatggattctgctaagcattctacaacacagaagctaggtccctacaacaaatgatcgtcacgcacaaatgtcaatagtgttgaggccgagaaatcctgatttaatgtttattgctttacgtatgtctaacctctggcttgttaggtttttccagggcaagaattagccttctgcctcctgacgtatcttacagcataaaagctgttccataaatatggaaagaggaaagactctcaaatgtgtctgactaggattgttaacttcttatacttctccatatactcattggtgaggttggaaatcattatttaaacttttgtattgaagtttggcacacacaaaaatttcatccacacaaaaaattctgcattttatttcagaatgcttgtgggttttttccaacccccaagagaataaatttcataattgtgtattctgtgcagaaatatcaacataaatgtgctttcctgaagcatacatctgctgtcagtgaggctgactgtaactcagacatatgctgggtggcagcagataagtttggaattagttgtgataggttattcacaaaatagctagagcgcatgacagtaatcaagaattcactgtaattactttaatctgtgattggctcaatacagtgcacaaaagactggcagaggaattctgcaaccagagaggaagttggttaattattccaagaccatctctttttttttgtattgatttttcaattgtatgaccttttcattcatttatatgtttattcattcagtagaatgtgttaattacactaggagcaattaattacactagaaagaaaaaacagcacaataacatgtctcctgacctctcagtacatcccgaatatgagacagacatgtaaacaaacccataatagcaatattaattgtattccttccttgaaaaaatagggaatttatagactcaaatttaataagcagttattatgagaaagtccttaagtccttcaatttttatcttagaaagaaaaattattggagaacacacacacacacacacacacacacacacacacacattttttgttgccaagggagccagcttaatctaccagtgaaaatagtgaagtttaatttttttgttgttcctaaaatggtaggatatagatgatatactacatttacatggatgacagacttgtttattgcacaataaagtcagtccatacaaattagatgctttggtattctcttcagtggtcctatactgtgaatgaaaaagtttgcactttcaaagttcagctgaggaaacctctgattctgttagatatttctggttactaagacactatggcttggtccaatgtgtaaacatctcagagtaattcagtgcaaaagttctcacaggctggattaggggtggagttttacaaagcacagttgaataaggataataggaaaaaaaatttaaggcaaaattcaaataaaaaaatgaaggagataaacttcaagagcaacatcaatgacaacaaccttcaggagttttatataagttacaacataaattagtactgagtgtggctttcacaacaaaatgagctcatgtgattttagaacacttgattaagatgaagcatatgagaagtaggagctgataaacggtctaacactgatcataccctactagttgcttagtgcttatttttaggcatctcaggtaacaagtgacataacacagtcaaaaactaaaataattttgaagaggaaggaagtcaggatgatgaaaaagccatataaaaaaaggctgaagatttcaataatgtttgacttggagaacataggacttgggatgttcctaaggttttatgttaaaaatttgaaatgtttgaacatttgtcatgcttaagaggaattacattgtagtgttcaggagagtgatcgatatttataggaaggggggcttttaataagtattagaacatctcagtggggcagatccaaaaatgaagtggaaatcctggaagtagtgagttcccatccctaagggttcttcaggagaagctagactatagtctggaaggctgttcactgaatctcatgtggggaatttggacatgtgagcaacattgttccaaccatattaaataccacctcgtaagcttgtagagctctagcagtgcatgacacttaggccctgagatgacagttgaaggtccataatagtttgtaaatattcttaataatttacagtgttttttaaggaaaattaagtacaacgtattttaaggaaaattaccttggaaaacctcataggaaggaactgatagaaatatacataccttctatctctctaacatagccagtcttttctcagttgatgaacagttgactcttaagaaccagtggaagtagctggcatacttatagagtatgttgtatgaaaaccatgtgttttttgacccttgaatcacatttggcacggaaatcctcaaatgctggaaggaagatgcctgagagaatagcagatgcattcttatcctcttgttcgaatttaggggcatacttccgtggagtggaaaactggataaaatggtgtacacaagttaagctccttctgtgtttttgcctgaacctagttgaattcctgtatgttaaatgaacatgaaatgactccactcctgtctttttaaagctctcttattacctgatagtcttgagttatttctgctcattatctcatggctctttctacttccttccattgccctcctttctttacttggcaaaattttaaaaaagctggttctatatcaagaagcttaactttatttacatgttggtaatgaggggagatttgagaagtttaacctggcttgttacttaacaggttactaattacctaacatatctacattatttcattaaattatctaaacttcctccagaaagaagtattgctattaatattgtaaatttaaggaaacagatgcttagtcagcttgtgtagcaaagacttaaacagaggcaaaatgagatctgtttgacctgaagttcatgctctttccattatacacaacagctttccttatttgacttagatctttttaatagaggcatttttgggctgattgctgtaacgttagagcaaatatactccagtttctaacttttctgttcaattttccaggttacattactgtgaaatgaagtgactggatattttgcttacacagctttgctcagcaatcagttgctttctggccatggccataaaaggaaaattctttccacaaatagaatctctggcaaaaaaaaaaaaaaagtattgtccttttgatgtgtttttactcctttctctgcaatccttacatggtaaactggaataagacaatcgtttacagagaaacaggacttgcaaaggaaagatgaaacccttctgcagccattaaagaagtttctgtatgtagccctcattttgataaagcagtaaacctgacgttttgttttcctttttcttttcctttctttttggtttccccccagaacacagagctggactttggttggggtaacaaaaaggaaatgaaaccttattcttaaatgtgaggtagatctaaggttcatggtgtagaaatgggaaaattgttttctacacctttgcttgctaccatctagatggaattagagattgtttgcccagggtgatgagattcaattggtatgtcacctcaggctgtctgtacaggtccatggatcagagctctctgtgacttcccagaaatgtaaaccacagatggagaattattgctggtttgaacttttagttctgatttgatttgtttatcctgtgtagaattagtctctgtatgctaagggagaaaaaggtaagaatggaggtgagggtccgtcttagtatttcccacaggccccctcacagaaattgttggaattttaaagaatatactcaaatcagtaagaaagtatatgttttgtgatgtgctttgtaattatttacaacatttgtcctatacttcagggcacctaatactcaaatcattgttcagcaaggaagaatgaaagcctcttttaagatggtacatgatgtactcactaacttttgcattcctaaccatcatttttttctcctggatctcatcacctaagctgtaggctccttgggggaaaggaaggacaaggatttagacatccgtggattcaactgagagcctggcacacagcctttctctgggtaggagcccacagaaggtttggtgattcactggtgccgccacttccttgcgagaaaggggaaaacagacatgcagtgtgatgtggaatatgtctatttgtccctgtcactcatatggatcacctgaggggaaaatagcattcatttttcattctgatggtagggctattcaaaagagatacttgcattttatcagaggtgatatcctcattttgagaaactaacatatagttctggattaggatgcagtttaaaaattgcacgatatttttaatatacattaaaatgtaggtctgtcaatcatgctggtttttctataagaggatgtcataaaacctttccctaaaagaggctcaaatttgaagccacattagttattattaatagttattatccatcattacatgtcttataaaatccgtcattttcactacttttcagtagtcctgtcagaaatgtattctgacagaaataaaaattcatgcactactaactgggacttcagttaatgataccaactgttatgaatattcactttttaaagctaccctttctggcgaaattcctatatgccaggcatggtgctaagtgttttacatacatcacctcgtttaatccctattatagtgctattttaaagatgaagaaatggtgatttaggttcatttgcatgctagcatcatacaaaatggtacagctgaaattcaagtggtatgtcagattgcaaaaccccaattttaaacattacgctgctgacttaagttccttgctgaattgtctctgccttttcctgagcacttacgagcaggcgttgtgtatgttctgatttagcttctctgacaaggaatgttcagtgccttccattttatgatgtttattcaaagacttctgtttgtaatggcaattccttgtgcttaatttttttcttttttttctactttgtatgatttaaacaatataattaaatgataaactctctgatggaaaaaaaaatctatgtttatgtaagtgtgactgatggaagccaggacctaatatcaagaattcttgacccctggaataggcctgttgttttagaatccaagaaaacaaaagcaatttgttcttttactgaagagcccatccaaagtaaagctgtcagaccctaaagtgttgtgatgcatctgtatagccatatgctgacagatgtttctgtatgtaactctagctttctgatgtacagggtgacttccatgcaaatatttttgtctttacttgttgaagttttatctgcaaaatagttcaaccatatgaaaaagaattagtaaaatgaaaaggggtgaactaaaaatatactatgtcaaaagaaaaccaaaaatgttatcaagcattctttttttcagctggtgatggagaacaacgtgttaatcttggattccttctgtcagatagcacagaaataccacaaggtagtgtgccagttccagggtggcagctaatccactgatcacgcagcagcatgccaccccagaaagataaatcttcagtctcattaggacttcatgtaaaaaagaattttgttaacaagaacaaggaaaacctatcaaaaattaattaagatattgtagtttagcctgtgtaaactcagaaaataattatgttgatttacttttttttaaattgtactttaagttctgggatacatgggcagcacgtgcaggtttgttacataggtatacacgtgccatggtggtttgctgcacccatcaacctgccatctacattaggtatttctcctaatgctatcccttccctaaaccccacccactgaaaggccccagtgtgtgatgttcacctccctgtgtccatgtgttctcattgttcaactcctacttatgaatgagaacatgtggtgttaggttttctgttcttgtgttagtttgctgagaaggatggtttccagcttcatccatgtccctgcaaaggacatgaacccatccttttttatggctgcatagtattccatggtgtatatatgccacagtttctttatccagtctatcattgatgggcatttgggttggtttcaagtctttgctattgggaacagtgctgtaataaacatatgtgtccacgtgtctttatagtagaatgatttataatcctttgggtgtatacccagtaatgggattgctgggtcaaacagtagttctggttctagatccttcaggaattgctatactgtcttccacaatggttgaactaatttacactcccaccaacggtataaaagcgttcctatttctccacatcctctccagcatatgttgttttctgattttttaacgatcgccattctaactggtgtgagatggtatttcactgtggttttgatttgcatttctctaatgaccagttgtgatgagctttttttcatatatctgtggcatgcatatatgtcttattttgagaagtgtctattcatatccttcgcccactttttgaagggattgtttgtttttttcttgtaactttgtttaagtttgttttaggttctgtatattagccctctgtcaagtggatagaatgcaaaaattttctcccattctgtaggttgcctgttcactctgatggtagtttattttgctgtgcagaagctctttagtataattagatcccatttgtcaattttgggttttgttggcattgcttttggtgtttttgtcatgaagtctttgcccatgcctatgtcctgaatggtattgcctaggttttcttccagggattttatgcttttaggtcttatgtaagtctttagatttactttaaaaataaaaaaagaagaaaggaatttttaaaaagaagtttaaaactagaatgtctcatttggaaatttttgtatttgttatctcatcttattttattcaagacaggtaaatgttcctcctaaccatagaaggcttctatggagctgcagctttaaagactatctttgacaaagactgctctctagatgtgttattgcctccaggaagtgcgaaaatagcaccaattggtttccctgttgcacccacagaaagatcacattttggcatcacttggaagccattgtttgcagaaggcaaagctgtcagtgactcatttattctcacctcttgtctaatgctttgcttcaagcacagtcttggctatgcctcagattgatcttcaagctcctttttgtttttcttagaggtccacatctagttattaccactggattttgcacattgcggcacctgtaaacatcttctatgccccaaattctgaggtttactcccttttatgtgcaatacttagcagttgtttggatgttctcttgtcatttattttatttggctcttctgtgaggtttgcgctgatggcaaatgttgtttgagtttggattaaggtgcttgtgaactttacattggtgatgcccttcttcatttgtttttaaaaatttcatagaggaaacataatatgacacctacagggacttcaagttctagagatgatgagaaatttgattttatgcttattagttactgtggttaatgtaattgtagctgacataatataaaatcattccaaggacttacccccagagtttacttttctcttgcatagagaccagttagcagaggatgggtagggagcatagggttttgctccatgtatctgttcagtgttcagacttttttcatcttgtggctccatgacctgtaggacctctgaaccaactgctagatcctgtgcatccagcctgaagaaggcacactgctttcttagtcactttgcccattttgcttccaataatattctgttggtgagcacaagtcacttgggtctgactaagccaatgggggcagggaaaagtagcctctgacagggcagccacttcccgaatacaagtctaccaaaaacaaaacaaaaataaaaacaaagtgtcgatgatcagctggtaacctctgctaactgttcaaaatgagtaacttagtgctaatctctgcctctaaataccctgaattcattgtatttctttcttaggcctgtcataaaaaagtgatacaaaacgggtggcacaaaataatagaaatataggatttcacagttctgaagtcagaagtctgaaatcaaggtgtcagcagagccatggtcactctgagactctggtagcaaccttcgtcaccccatccttgctgatggtggtgacccatcaatccttggcactcattggtttgcagctgcattgctccaaagcctgcctccatcatcttatggcatcattctctctttgcatttttgtccttacatggtgttttcattttcttcggacactagtcatattggattagggtctacatcagtaaatctcctctggcctttattacatctgcatattttttcaaatgaggtcacatttatagttatcaggggttaagacttcaacatatcttttgggagaaggaaacaatttagcccataacagataaattgggttcctctgttttgttttttaagttccttaccaattactgcttattaatagattaaatataaaacgaagcaactataatcatatcagaattcttttaatttctaccaagatgttatttagggacaacttagaccagggatcagaaaactttttctgtaaggatccagagagatacttttggctttgtgggccatactatctgtcacagtttctcaactgtgccattacagcatgaaagcagtcataggcaatagtcaatgagtgagcatggctctgttccaataaaagttttattttattgaatttcatacattttattgaatttgacctgtgggctgtggtattttcagccctgtgctagactatgttccattataacctggatgtgaatattgtgaaatgaaccttgggattggattcaggcataagtaaattcaaattttgaccatcattgggtagctgtgatctcgaatggcttaacctctgtaagtttcaatccctcatcaataaaatgaggacaattcctataaatcatccacacaacgcctagctcattgtaggcattcatatgtagttttttacatagcacttcctttgcagaggcagtgtaacaaattagacgagaacagtatctccttctgatgtttgatcttgggcatgttccttaatatcactgtgcttcattttttctcatcatttaaatagacattataatagtgactaccttttagcttgcttatgaggattcagtaagttaatacatgtcaagaatcagaccagttcctggcactgtgtaagcactcagtaaatgatagctagtcacattgaccattattgttataattggcttcccttattactcagcaaaaggaattactgaattttatttttgctgaatttatgtcaaagagtgaactaaatgaatacaccatgattattcaggcctgagtgttctttttgtgatttatcagtttgattaagatgaaagaacagtttctcttttattatgtatactacttctgctcaactggggagaacaatggcataaaactgtgaaggcaaccactaagtcctctagccacactatacctgaagtcccacccatgttacaataagaattttaaggaaaattgattcaatgaatacaattatgctttagagctaactttggtataaaatatttatgtattatatctggggattctgatgtcattaggcaaatatataaaattggatacaatttaatcatgtataattgagaactttttatggagatatggcagagaaaaacctcttggctacccaatgttatgttaaaatttaatacaaatttaatttgagatctatatacaaatttaatttgagatctatatgtatttctaaataatgagaaattttgcagagaattacaatgatcatctagctagtttctcacttttcttaaattaagagggagtgtaggtcattttccaggaatatgatttgatggttttgcagtctgatattcatggggtcatgagattcaggtcaaaactgagtattttgctgggtatttttacttctatatgttgaatatggcatgcaatatgccccatgttcgtaatgcaaataccacctgacactaatttggataaattcaaatccatagaaatacagttttgtgggtttgttgcttaattatatttggaggcttttatttatttttatttatttatttgtttatttatttataatttaaggactaaaagtctgaatttaatttaaggatcaaaagtctaaataaccctaacagtatttgaaagctctttacaatgtaatggctcagaaagttcctagttgtttcagttgggctatgttaatttttaaatagtgaaattgaatggcaatcattaaaaagtcaggaaacaacaggtgctggagaggatgtggagaaataggaacacttttacactgttggtgggactgtaaactagttcgaccattgtggaagtcagtgtggcaattcctcagggatctagaactagaaataccatttgacccagccatcccattactgggtatatacccaaaggactataaatcatgctgctataaagacacatgcacacgtatgtttattgcggcactattcacaatagcaaagacttggaaccaacccaaacgtccaacaatgatagactggattaagaaaatgtggcacatatacaccatggaatactatgcagccataaaaaatgatgagttcatgtccaatttcatggatgaaattggaaatcatccttctcagtaaactattgcaaggacaaaaaagcaaacactgcatgttctcactcataggtgggaattgaacaatgagaacacatggacacaggaaggggaacaacacactctggggactgttgtggggtggggggtggagggagggatagccttaggagatatacctaatgctaaatgacgagttaatggctgcagcacaccagcatggcacatgtatacatatgtaactaacctgcacattgtgcacatgtaccctaaaacttaaagtataataataataaaataaaaaaatagtgaaattgaaaaaaaaaaagatagcattattattcattttatttagagatgttgtgaattttaaactatcttctcctcattttctaccataccagagaccattacttaactacctctgtctcattaaagtatttaatatttactcttcagcaagactgttggagcttttattattattatttattattcttatttttactgtggctcctgaatatatactggcgcttatgctaactctcagacttggtgtgtcttacaaattctcccaccttcacccatttattgttacagtccttatttcctcacatcatcgtattttcaagttggctaagaccttagagactgtattagtttgctagcactgttataacaaaatactacacacctaaacaacatgaatttattttctcacagtctggaggctagaaatccaaaatcaaggtggttgcaccgttgattccttcaggaaggagctgttccgaacctctcttcttggtttgtttggccatcgtcgtgttcacatcttgttctcccttgtatgcacatctctgtgtccaaattccccccttcttaaggactctagtaatattgaattagggcgtggcctaatgaaccagctcactttacattgattacctctgaacagaccctatctccaaataagatcacattctgaggtagtaggggttaagactttcacgtatggattttggggagacacaattcaatccataacagagactgacttgaaatccatctctttaatgttagagcttagaaatgagagattctaagagaatagtccaagtttacgtagtccgtttgtgtcagaatcagaacaagaatcctaaaattttcaaacactttcaagagtatttagttacctccctctctctagattaatgcatcagtgcattctacctaaatagactgaaagcttctcagccctggactcacttgggtcatgttagaattcatgtggtagtgatttaaggtcatctgattccgtatttgctttgttgggtcttagcttaaggttcttagttaaataagtgaacattattcatccaattttctatgaatcttctgcacatagttaccatttattcacttagcaaagatttattaagaagtcctgatgttggctcgacattaggctattaatttcaacaggatctgtgaacgttttcttctgtcatgtgagatagagtgaaaattaaattcactggttttaagtagtatgctgttaaaaagttatgtaagtagtttctgaggtcatgttggtctccaaggagtatttgttaactgtaaccaagtagatctgtaatatgtctaagtactgatggtgttctgtaatatcagtaaagcattagtcatatgaaatctgaatcagcatttttcctccacctaattcctggccactcacatgtttgtcagctagagaaggtaacaggctgcaatatgcattaagatcaacctatagtgttaatattcttacctgttgtcatctagtgaataggaaaacatatcagaatggaaattatgtacaggcaaagttttagtaaacatatatgaagtaagtgatattaaatgtgtatttatttggggcttaacgtacataaaatgtgagaagttaaaatgactgttcttgtgatattacatttttatacttaagatcaagaaaagttttcaagtaaaaacactgtaaaaatttttaaataaattgatattggtagtaaaaaacaataaaaacatttgtgtaggtggtaatagtacagatgcattcattatacgtgattcatttggaaggatactttgttataatactgtacatttgtattataatatcacatgcaagttttatggtgtgtttattaagacttttagtttaaaaatactttagacctcagggaatgggtatttaatatgtgaaatattataagatcattaggaagtgaagcaaaggtacataaggtggagatgtgagtcatttacctgtaacaaataatttgttttattattattatcattactattattttttactttaagttctggaatacatatgcagaatgtccaggtttgctacataggtatacatgtgccatggtggtttgctgtacctgtcaatctgtcatctaggttttaagccctgcatgcattaggtatttgtcctaatgctctctgtcccctttctacccactcccagacaggccccggtgtgtgatgttcccctccctgtgtccatgtgttctcatcgttatgatgaataatttataatatctcccgcacagtccctgatagggattaatgctttcttgttttcaatttttttcctgcagactaaagtcatcttagtagtgattgagaagcattatgaaagtattttgttaaaatattagtgaatattaaaagaaaaaatacttcttaggatgtaaggacaaagttaaactagggttgatggtttggggagtgtggaaagaataacaacaaaaaaagaaaacaaaagctagacaggccagagctaagcaaaagttggaccaatgtgtggaaggtaaatgcctattagggaggacaagaactctctatctggtatcaaaatccgaaaataattaggacagaaatgtgaaaagtgtcaggaagtggtaaaagtcttataaaaaggaaattactctggcacctcgtagtgtattgattagtgagagatgggcagtaagaagaggaagttgtagctatcaaagaaagacatgcctaaggcaaccgtgcttttgtgtaataaaaataaaataaaatacggtttgaactgaaggaaaggaggcagcaggcccatggtctagacagatcacctatccctctgtctccttccgactggctctctcttcatcatgcaggcaatttccatttctaatatcagtgctcaggaatatgactttcaactgtatcctattcttttttccataatttagttttcctaaaatttcattcttatttttatgctggtaactacatggtattcagtggaaaatttcatacatatagctttaggcagaattttctgttcttaggtaatttacattggaatcaacagatggagatggaaatatgccagtgccaattcttatctggatatggaaatctagttggttagataagtaaaagttttgaggatagttatttgttatttttcttaatgggaactctgaattgccatggtgccttattttattttgtttatagcaaaaataactcactatgagaaaaatgaggtagaagagtttatttatagataggcttatatcagaagaaaagtgtgtgaggaagagcagcaaatactggattgatatggtaattaagatgtggattcagttgtgtgacttagacccaacataacactggcttatacaaaggaggaatgttatttctctcacacattaatagggcaccatgctggtgcaatgggttgactctatgattttaggtgaggcctccttctgtcttaatgcttcaccacccttaaagagttgtgaggtctggatttcagtcagtggagagtaaagggcaagggagtccacttctggactgttggaagcatgatccgattttcacacattacttctgtgcacatgctattgcccagaaattataatcaaatgggtttacctaggtggaaggaaggttaggaagtgtctttctgagcttccatggagttcttgtactaggagggagaatggtagaatgaagattgaggacagccaatggacctttccgaaactgaggttttgaataacgtgatgcaaaaggagaggaagctgggcatccagatggtcatctaaggcagaactgtgctgctagcttggatcactcacccccagtctatgatataaaagaaatatttggggggccaagataggcagatcacctgaggtcaggagttcaagaccagcctggtcaacacggcaaaccccccgtctctactaaaaatacaaaaattgtctgggtttgatggtgggcgcctgtaatcccagctactctggaggctgaggcaggaaaatcgcttgaacctgggaggtggaggttgcagtgagctgagattgtgccattgcactccagcctgggagacaagtgtgaaactctgtctcaaaacaaagagaaaaaaaacaggaaatacctttccattatttcaagccactattttcatgtgttttcttttcgttgttgtttgcagtcttcgttgcagcaacctagctaccagtcacctaactaatatagctagaaggggaaaaaatatccaagtatatcctctaatagtatttattaaaatatatatgtgaaatattataagatcattaagaagtgaagcaaaggtaaagccactgaacttagagggagatggaggtttctctggaaataatcagttaatataaaaaatccaattctttcctcctgttttcctccctccctccctttattcctccttctcctgcttcctccatcttccctccctctctcttttcttctttccttctctctttcctttcttctctactttcttggttctttccttttttcctccaataaacaagttgaaacaattatctgattcttatttctagacaaaaaaaatcaaaagtgattattttccaggattaacaaaactgtgcattaagaggaaattctttagatcagatgattttaaattttagaaccgtgatcacacaagtcatattagagtatttttttttgcaaaatttctctcttaagccccaaattcttaccgtttacgtgacagtatccttgaaactttataaattggccttttacattcaagtctgtctgtactgaacctaattgtcatatcatggagatatgtttcttgcatctaattctcatttggattatgcttcctcacagggaccctgaccactgaacaataaagcaattatcgccatgatgatatgcaatattgagcagattatatcatgcttaattttacatattcataaccctgccacttgcagatactgacatcatactgaagctggttttgattagataaatagaaaatggaaattctgaaaaacacagtagcatcccttgtttcttgattttctctttaaagattaaatttcttctggttgctaccagttaataacattttttggattatagacctctttgataatttgataaaagatagaagccttttcttggggaaaaattaccctgatacatgtttctaaaatattttgcatacttcagtttttaacagattccctaaaccccactcatagtttccacttcataacccaatgtttggaacccccactcttagtcagtataccagattgactcatggaatatttaatggaatgtcctctaggtatttcatagcttaggatgaattttaacttcttgggaaaatgcaatacctaggaacagttgaagagagccaagaggtttaactaactatggtaaaatagtcaatggcaaaaggcaatatatgttgcttcctctaagggtctttaaggtgtaagtggtcattatccatagtactgaaaagcaaagctacaaaagaaaaaaaaaaaaaccctcctcagctttactatagaaagtccatattacaaaggactccttatataaagagcttaattaaaatattctccataaccaaatctgcattgcatagttaaagcagtatgtagaatatgtgtaactgttgtgggacacagaggtatcatagttgtgattcagtgaaaaacaatgaaatcagtattagcacagctcaatataaacacctctgcactgaatttctaataaagttctttatgcactgaggtatcatctactttctgtcatacaacctgaagcaaacaaaacaaaacaaacataaaaacaggagttctatcttcttgcctatttatttccatttttctctcttactgtcctatttatttctttaagctccatcaaaactcaaaaaggccaacctctcctttttggcaaaaatgcaagcaaatagtttcctttttgagaaacaaaaaataatatagagtaacacagataagaacaaggagaagtgaattatggtaaaccaaacacagagagtataaaaatgaattgattggcgtacttaaatgaaagccaagaggcagagtcttgtcaggagtatggctggagctggagactcaaacaatgacatcaagactgggtagcttcttttgttttccttgctttactctgtgttacattcactgtttgtcttctccagtggactccccaaagtcagattttcactttctcaactccaagaccatcagattagctttcattaaatcaaaccagttcacatacatttcctgaatcaaatttgttgaacagtatgagatggacttatagaacatctcctcagtcttgaccaatcactctggcaaggtaaatggggaaacaaaattgatcctgttaccaaccctggagcttttggtgccgtcagcaggtcaccacagagacaaggagtaggacaggagtattttacttaaaaactgtaagtttcaaactgcttgaacccaggaggctgcagtgagctgagattgcatcgctgtactccagcctgggtgatagagcaagactccatctcaaaacaaaacaaaacaaaacaaaacccagaacaaactataagtttccttactacaagaagggaggatgctggtcaaagtcaagaacaactgctcacatctaaagacacatgcataaaaacaaacatgcacatttacagcaaccagagatcattgaggaattcatgtcatctctagcacaaattaggaagcaattttgctgagttctagttgtcttttaccaccgtttctagctttttgactgcagttaggtctcttaacagctttggaatgcagtttttgggtgcctgaaggagccttttcatttaagaaattactttgcccagaaaattgaaaagtgctttcaataagacaccatctgctgctctcatattaagttaaaactggcgaaaatggaaatcttcctttatgtgacttgcaggttccaccttcacatttttagcagcgttctaaacgaacccttcagaaatagtccttgaattgatgggtttggagttctgtgcctattccttaatctgaagtatttttttcaatttaattatttattttagcaaagctgagatataaatgtggattatatataaagtaacagataacaactggctaaaaagcagaggggcacccttaaaggctaccaagtgtgaaacatgagtcttattgtagatgtcacaatttggagctagtaattctgagaagtcctttctcttcctcctcctcttcctacctctcatcctcctcctcccctgcttcctccccctcctccccctcctcctcctcccgtttctctccctcttcctccccctccttttcctctccttcctccctctcttccccttcctctttcccctccccttcctcctcctcttccttttaactcctcctcctcctcctcttcttcttcatctttgtcttcatcttcatctttgtcttcttcttggagaaagggtcttgttctgtagcttaggttggagtgcaatggggcggtcataggtcactgctgcctcaaactcctgggctaaagcagttctaccccagcctcccaagtagttgggatgacagacgcacaaccatgcctggctaatatgttttgttctttgtagagacaggatctcactgtgctgcccaggcaggtctccagctcctggtttcaagcctgtcttatcctcccaaagtgctgggattacaagtgtgagctactgcacctggactgagcatgcttttctagtgtttcagaggatgttaaatacaaggttattttcttcgtaccagttggtaaaataaatacaatatgcacttggtgtttctatcatctctatgtgttagtcatgtggggaaataaatctttcattgcatgctttactctttgaagagttgaaagaagataaaaacaaagtcatacttttgcttagggaagtcactgccttagcaatagctgcaattacttgagaatgaccccatgccaaaagttagtagtatatgcttcttatacttcccaatatcttcatatatccaaatatcttcatagatctgtgttaaccttactccattttcaagctcttcataatttccattttatcacttgagactcttattgacccagccacataataaaggttatcccatggtctcaaagagcggcaatttccctttcagtgtgatacatattttgccttcttctctgacactgtgccatatcttttgttggcattggattctgtcaagtgtgtgcacatgtgcacacatgtgcacgggcacacacacccacttatcctttccctggactatttctctaaatcactacactgacttttgcctaaatggctcagaatcccacggaggtaattcgagagaaagaaatgttatcttctcttttatagaggaaaaaacctaggaacataaaatttaattgatatgtcaactcattcagcttgttagtgatggtataaccattaccaagccaaattctcccagtacttactgagaatgtgataaagaatagaaagctgcacactgcctcgcttacatgtataactttttttgttttccttgaaatatgtgtaggtccaagaaatcatgacctcagtggttcagtgaatcagtatgtatttgtttgactatcacaccagcatgacgaatgtaacgtggtacttactttgtttctaacatttttgctgctacagacattaagaaatacaatttccatggcaaccccaaagacccatggatacccacatgcacaatatgactgtaacactttcatccaatagtatttgcttttacttcacgtgatgtacactgatattttctcctctcttctccttttttaatttttgcaaaggctaggttaaaatccactaaaatgatttcatgacttgctaaattttgtaacctataatatgttgaacactgatgtaatggaaaagtaagagctattgtgtcagggaggtatcatttcaggtcctcttggttttgccatttcctgactgtgcaaatttgaatgatcaacatgactcagtttttctgactgtgatgtgggaaaacacttcttgtggagttgaagtgaacattgaggtaactgtggcagcagccagtattccttcctctttattgacaaattggttcctttaacattttcctctccttttgtaacttttaattcctatgggaggcaagaggaaaagtactttttcctggttgccctattttctatttattttaatattacatattaaataaggaggcttccttcattcagaacaaattctaaataccatgaccaataatttgggcacataatgataaagttaatagctgaaatttttgagcaccttattactcgccaaacactgtacacaccatttttgtgaatcctaacagcatctatgtgtggtaggcatttttggcactgatattttataaacagaaaaaagcaggaagtattttgcacaaggttatggtcccagaattcaagctgaggcaatgtgatttccagctttgcgtgttgacggtgaagctggagtgctttttccctgagttatcctggggaggggactggtttacaagaccagattattgaattatactacaagggcattttcatttaggtagtttattttcaattagggtagtgcatagtatgagagtgaggatagtagagaagtacataatggatgctgtctgtccgatggtaataaaagagcattcggctgactgccctctgatttatgtgaatgtaaacagggcagccactaagattcagaataggcattgacttaatggcccgaatattacactttgttgtttagacatgtgacgtatgggaataactgctaaaatgagaatggagaatacaagggccagaacgcctcctagtttgttagggatggatcttaagattgcatatgcaaacaaaaagtctcaccctggtttaatgtggggtggggtattgagggggttggctaaactgtaattatctgggtcactcaggaggtcaggcaaaaatagtactagagttattaaggaggaggaggaaaatgaaacctagaatatctttagttgtagggtaggagtggaaagtgatttttatgggggtctgatgaaacccttaaagggttattagatcctgtttcatgtaagaataaaacgtaaataattgctagagctgtaatgatgaagggtaagatgaaatggaaggggaattatcttgtaagggtggctttgtcaactgagaatctgcctcacattcattgtacaaggtcagttccaatatatgggatggctgatagtagatttttaattactctagtgcctcagaatgatatttggactcatgggagcacccttgctttccacacaatcaactgtttgtcctttgttacattttgattaagagacagggtaccatagtgattaaaacacagactctgcagccacgttgcctcagttccacttctggctctgtcacttgttagtgtgaaatatcagaagagtctctgaaactgttttatcctatgtggtaatttctgatatgatatatgttgagtgttgggtgaatcaaatgaattaataagggcaaaacactaatattggcacatggttcctaatgagcacgatgtgagtgttagttatttcttcagtctctttcaagataacctttatttcttctcacgatactgtctctctgtgtgtgtgtgtgcatgtgtgtgcagtttaaaagctctgcaatgccatccccatcaagctaccaatgactttcttcaaagaattggaaaaaactactttaaagttcatatggaaccaaaaaagagcctgcatcgccaagtcaatcctaagccaaaagaacaaagctggaggcatcactctacctgacttcaaactatactacaaggctacagtaaccaaaacagcatggtactggtaccaaaacagagatatagatcaatggaacagaacagagccctcagaaataatgccacatatctacaactatctgatctttgacaaacctgagaaaaacaagcaatgggcaaaggattccctatttaataagtggtgctgggaaaactggctggccatatgtagaaagctgaaactggatcccttccttacaccttatacaaaaatcaattcaagatggattaaagacttaaacgttagacctaaaaccataaaaactctagaagaaaacctaggcattaccattcaggacataggcatgggcaaggacttcatgtctaaaacaccaaaagcaatgtcaacaaaagccaaaattgacaaatgggatctaattaaactaaagagcttctgcacagcaaaagaaactaccatcagagtgaacaggcaacctacaaaatgggagaaaattttcacaacctactcatctgacaaagggctaatatccagaatctacaatgaactccaacaaatttacaagaaaaaaacaaacaaccccatcaaaaagtgggcgaaggacatgaacagacacttctcaaaagaagacatttatgcagccaaaaaacacatgaaaaaatgttcatcatcactggccatcagagaaatgcaaatcaaaaccacaatgagataccatctcacaccagttagaatggcaatcattaaaaagtcaggaaacaacaggtgctggagaggatgtggagaaataggaacccttttacactgttggtgggactgtaaactagttcaaccattgtggaagtcagtgtggcgattcctcagggatctagaagtagaaataccatttgacccagccatcccattactgggtatatacccaaaggactataaatcatgctgctataaagacacatgcacacgtatgtttattgcggcattattcacaatagcaaagacttggaaccaactcaaacgtccaacaatgatagactggattaagaaaatgtggcacatatacaccatggaatactatgcagccataaaaaatgatgagttcatgtcctttgcagggacatggatgaaattggaaatcatcattctcagtaaactattgcaagaacaaaaaaccaaacactgcatattctcactcataggtgggaattgaacaatgagatcacatggacacaggaaggggaacatcacactctggggactgttgtggagtggggggtggggggaggggggagggatagcattgggagatatacctaatgctagatgacgagttagtgggtgcagcgcaccagcatggcacatgtatacatatgtaactaacctgcacaatgtgcaggttatatactaaaacttaaagtataataataataaaaaaaagctatgtatagggacaatcttgttcttggcaaacatagcagtagtatgctaaggtagctatgactaaataataatcccctgttgatagtaaggatatttgatttttttgaaataaccattgtttctttcaacttgaattcttaaagctgggattgctataagcacacttatagcacattaagaccaaagcagaaatcatctgtgtgtatatgtatctcttctgtattatactgcttagttttcacttgaaacatctttatatcctaagagttcagactcaaacatagtaggcactcaataaatggttattgaactgtctataatacaatggaccacattatcaagccctccaaatggaatggagggctacagcaaaaggtagacacacattcagtacatagagaagataatacttgataaaatacataaaaaatacatttcttctaatttttagaactttttttctctgtgaaacagtaaacaagtgtgattacaattaggtctaaaataattttgttgatttattagtttaggtatgaagtaaactacaaaggcatgcaaattcagttttacgtgtgaaggttcatacatcaggacatgtagaacaattaacttagactcaatgaagtttatgagttttgcattcacacggcattgatcagattttcataagagaagaaacaatgagccaagtatggtcatagcccatttcttttttctttttggttttttttttttcttttttttggagatggtgtcttgctatgttgtccaggctggagtgcagtggtgctatctctgctcactgcaacctctgcctcccgggtgcaagcaattcttctgcctcagcctcccgagtagctgggactacaggcatgagccaccaagcccgactaatttttgtatttttagtagagacggggtttcaccatgttggtcagtctggtctcgaacccctgacctcattatctgcccacctctgcctcccaaagttctaggattacaggcgtgagccactgtgcccagccggcccatttctttttaaaatggatttgtgtaatggatcgatcataattgtaaaatccaaagcatgaccatactttaggcactttctatgaagtagtcttatgaaacacacacacacatacacacacacacagaatctgataagcctatatattcacataatagaagggcaggttgaacttgaccacaagaaagtaatcaacaatatccaaactgtgagattatgcaaaacatttgttttattcctcaacaaataagctgcaaggcagaaatagattgagaaagagaggatatttatagactagaagagatatagcaatcaaatattttatcatgtatggaacttatacagactctaaaaacagaacaaattattttatgtatgaaacaattacaaatgtgaacactggatattttatagtattaagggattattgttaatattttactttgataacagggctgtggtttggttaatatagttcattttttatagatgtacatagtaaaatatggattgaatgaagtgatatctgagatttgtttcccggtaactgggaagagaagaaattggactggagagtggtttgacagacttgttcttaggatgatagatgtaggaactggccaatgtatatgagtacttacactattttattggattttggatatgtttaaaattctccatagtaaaacaagtttgttaataatatatatatttacttttgaccaagtgtggtggctcatgcctgtaattccagcaatttgggaagccaaggcaggaagattgcttgagtccaggagttcaagagcaacctgggcaatacagtgagacctcatccctacaacaaattaaaaacttatccaggcttggcggtgcatgcctttagtcccagccactccagaggctgaggtgggtggattgcttcagcctgggaggcagaggttgtggtgagcagatatctcaaaaaaaaaaaaaaaaaaagcaaaagaaaatactgtatatttactttagaactcttctttaagttaccaagagttaacaaattagaaagcggaaacactttaattaagcatttatgacgtagtttgaaagtaactgcaggcagttaactatggtttggaatatataatggcaatatattctcctactggttttgttacaaaaataataataataactattattatccttattattataagctatggcaaattgatcgttgtcaacattataacattttcagaatgtaaaacaccaaatgaactttcatagtgatgctcagcagcatgagacaataatattgcaataaatttcacaatgttatagtaaaacaatatatatacaaaatcttctatgtggtcagcatctgtcttcaactgtttgagctaccataacaaaatactataaactggtggtttataaacccatcagagttctagaggctggaaaattcaagatcaagacactggcagattccatgtctgttgaggacctgttcttcatagatcttgctttcttacactgtggtctcatatggtgtaaggagcaaggcggctcccttgtgcctcttttataaggatgctcaacccatcctcgtgacctaatcatctcccaatggttccatctcttaataccatcacattagtgattaggttccaatatacaaatttgggagggacacagacataacattcagaccatagcagcatcatactgggcattgcagagacagaaattgatcctaatatgctagaatgaaaagtctttgtaggcagacaaatacataattaaggaattgccagacaattggataagtgcaatattagagctgtgtagtgaacacacagggattatggtcagttcggcttaggtgtcagtatagacatcaaataaagtattgctagaggtttctaccatgttctatgtacagcatttatttacagtgacttaaggagatattattagtaggctttcagaaatataaactgtagagtaaactttgccattgaccagtatttataggtatctcctttaaaacacagaaaatgaaatcactgtcaaagcgaactgtaatttgcatgccaagtgtgtctgactttcatttaatgcaattcatactcacttaatttgaaggattctgaagttgaggtgatagaaaaaataccttacacacttaatatactttcattttttcattttaattgcatgcttaacataaataccttagagtagtacatcatttttaatgcactttgttttatgtgtctgctaaaagatggaattgcactagatttcatcgtttatttttcttgatctttgtatagtcattctcaactgctgaaaatcaaatgttttgaatatttaagcccaaatatatgatcatctttgtttatgttcatatttaagaatattttcaaagagttaattcattttgatgcacattaatacagttcagatcactagtttgtttttatagttttcagggttagagggaagacagaatcaataatctgatagatatcttgggaaatggaatgcataagatatttatggagaggtgcttcatatcagcattcttttgaaaataaatcctattatttctaagggtatatttaaaaccttatatttacctagcgtagtaaattatatcagtaatgatttcttgatatccaagtgaaataactaatattactaagatagggaatgtgtccttttaagttattgtagcaatccagttaagtgggggcctttgtgttattaaacatgatcaagtaacatgaacagaaactttctcaagtttaggaataggctcaaactagatgctccataaatgcttgaaaaatgaaactctcatgatgataccagtttatggtttgtacattctctatctgaatttttatcaccttctcttgctcagtttaaatgaaggaatggtctctaattgcccctctcattttggatcatctagcaagccccactttagtcattaaaatagttaattgggtttctaagttagtctaatttaatggtatagtgaacaattaggtatattttaccaggaataggagaatacattggtcacattttggaattgcattgacttgtcaatcactaagcaaatgagagtaagagcttcattaaatggactgaaagtgttgcttttctttggaagaatctcgatagagatgctgtaatttcagtgttttgtttttttatacattatgtagaaatattaagcctgagttttactgaagccagagtgtcatttactgtatataaatatgtagaataatgtctataattaggataccaggttacattagatcaagtgaatagttggttaggatcttgttatcctttaagactttctcttccccttaatggggaaatgattgctcctggtgaatgaacttatcagtgtgtctgatccaaatccactatttttctcttttagctgaattaaagaatggcagcaacaacaaactccatcatgggaagggcagggaaatgaccaaagatcacttattgattaatataaaactgctagttaattacatgttgcaactaactggttgattctctgagggttgtttttttgttttttttttttctctgttaagagttaaactgtactctccagggtgtccattgtataagttactccagaaaacatgggggtgatgcctttttgtgctcacatgatatgtcagactttcaactaatttggtaaggggatcgtgtttgcaagaatttttgtgaacggacatggattttacatagtatagataggaaaaagagagatactctgtcaaaaaagaatgaatgttaaatatgttaatcgccttgtatatagataaaaagcctatttctaaccttgaggaaatttctgtttatgttgcttgatcatgtttaataacagaaaggcccccacttaactgggttgttgcagtaaatcagaaggatgcatttcctatttcagtaatgtaagttatttcattcggatttcactgagacattactgatataatttattatactaggtaaatataaggtacctgtagaaataatatgatttattttcaaaagaatgctggtatgaagcacctctctataaatatattcttagaaaaataaagaagaaagttgttagaatttataatcttttgttagtaaagtagaccacgtggagagatggattctctaaactgaatattggtgtactacataggaaaaaaaggaagaaagttcagaagaattattctatatccagtgattcttaaattaactgagaaggcattaagacttattggaatatttcatggtgaaatagaaactgaatcaaacaatgctaagagagaaaaagttactcttaaacagaattctaaagtggagcctttttcatgcaatgaattatactgcataggtttgtgaaaaatgatatatgcttagtacatcgggtgctttttccttgatgaatttaaatagtgaatcattagtaaattaagaatcttttttgtgagatgaatgatggcataataatatgttaatatgaattgtcttattttggggtattgaatgtcatgcttgtaggaagtgaaataacaaagaaggaatctaataattgtattctctttcccaaaataggggaaaaataaatctgatgaatgctttcatggattagggatactcaacagttgtcagttaaatagtatgtactggcccctcccatcagtttatcacttcctgtttacctaggccacttcctgttaccactgttaaataggccacatttctttccacaactgtttactccaaaccatacaacagctgcctctgcatcaagtctgactgtcatattggagtgtgactatcattgtttaaaatgttatagaagtattgtagggtcatttttctgaatacattttatatggtctttataagaaattctgttacactctatttgttctgtgtcacatactatattatctcaaaattggaagcatcaaaaacaaattagctattttccatggcaaaataagcagacaatatatttctttaaccgttaaaataagatactattttcagtaatcaacttttccaagctaccattgttgttgtttttctgggcttgtggtaacttaataagtaggtttagttttactttccaacaaattcacattcctctctcctgagaagagaagttacagaactatatatatggtgaaattcttcttgattatgattaaatttcaaagtatcaccaaatatcagtattcaatatactgctataaagataacaatgtctgtcttcttatttctgaaactcacttatggctattaccactttgaatatgaagtcagaagtttagcacatattcaagtttgcaggtatatgagctaatacttctgcagaaatgtgaattgctacatgtgaggtctgaaagattttatctcctagtgttatggcttattttgttgaatattagtatgtggcaaagacacctataactgtgtttctaggtaaatccctttgtgtgtaacaccaggagtgacttttacttgcaacaaaatctattatttacttcactaattgttccttattatactatttttcattgaaggaccacatgccttccatatgaaaaattgactctgctgcttacacaggcctgcatgtatcatcttggctaaatttgctagattaaatgtctagggagcagtgaatgttagattatcctcacaaaggatttgtctgtcaaatatggtacagggaggccaccaatggctaaagccattcatacttctctagatgaacctgcagggtaccagacagatactggagaactgaatgtagaatcttgcaaacttccccaaattttctgataataaattattattgcctgggctattatattttgttcttaagaaattatttctgtaggaatatgaaccttgtattctgaaggattatctccagtgaaactgtgggacctccagtgcttgaagtttgctttccagacagcttaggcaggctttgaattctattaaaccagacaatagcacccagaagaaaacacttatcccaaagaacagctttgctacttttaaagtcctattaagtcggggagttgttagaagaaaatagtatcactgtctgtggcaaagggtacactagtgaatgatattaatcagcctccctgtaattgtagctttccagataagctcagttgattggaaagtggtattgatgaggccaaggccctggtctggagaccagtttcattcaggaaaaaaaaaaaaaaaaaaaaaaaaaaaatatatatatatatatatatatatatacacacacacacacacacacacacacacacacacacacacacatatatacatatacacacacatatatacacacacacacatatatatatatatatatatgttttgagtttataaattcatagtttaatccaggtaaatgatcttttaaatgtaagcattggtcatgagtaatatttgatgagaaaattcagatgtttttatatgaccatgtgactaccatgagatggataaggaactccaggagtaaaaagatcaggaacctgattttacgttgtggctttgccccttctgcttgattgctggaagtttagtcaacctatccgaaaatcagattcattctctataaaactgaaataataattcagatgccatattgttcttgtgagaaataagcaacatatgcaaaacctctagcatgttatttagcaaatttgtaagtgctaaatcaattatacttattattattatgttatttttatcatagtattatgtcatgcattagttttatcttcttataccaagggtggcatctatcctttctttacgaaattttaaatgaatatctttttttatttatttaaacagttccattttcattatgaacatgacaatttcagcaaaaaaaaaataataataataaatgagtaccagttttgttcccatagcagtggagaatgcaaaggaggacaaaatctagtgtgctggaaaatcttccaatttaatcaggaaaacaggcagcatgtaaccgcatgtatgtttaagtattttactataggtctatagcattcatgatgtgatctcagctaaatagggaaataggaatagtttaagtatcttcaggtaaaataaccagaagatgtaagtgatctccaaaatatcaacttaatagaaagcttctgagcagtgtggctataggaacatatgatgtatttctaatgtagggtaggacaaaacgggattttataattgggtttgtctcaccattgcccctacctgcactctcatcatgaatgttattttcccctattcatttcttgctaccaccagtgcatgcagagtagcacttcttctgtcagctggccagtggtaaaagttagagcaggacattattttttttcagctaccttgcagctaccttgcaaagaatcccaggatatgaaaaaaatctccttcttacccctcccccaaatacaggaacactgatgccagttgctagcaggatggactttgctgtggcccagtgcttgtggcaaattttctttacattctaccttactcagattgtgtttataagacaagtgaatctaaacaactgcaaaccaattcaaagtgaagctaagcacaggagggaatgtgagaaatgaagatatatgctttctccaatgaacatatcaataattcaggactctattgatgctttacttcttccgcttcatctaatgcaccatacgtggaactctggttcaatgtcaaaggtatttggagagttccatccaatcttataagcaggaataattttgactacataaaccctgaggaggtggaggggttattgtttctttctgaactccatgacataactacatattctaatggcattttttattttcctttcactttctaatgaacaacttctggctaaatccagttatatttccattttggaccgtaaatttggtgtgtctagagagcatataatttataatttagttacatagatttgaacaggcactaaattcttgctgtgaagttgaaaactaagcaaaatataaaatgttgtttgttgaaattttatatttctcctaaaacagcttaattgcttttctagatttgggtagctatttcaatgctgaactggctctcagtggtctgtttctgcaaatgtgtttctacccccaccttgggctctaatccaccatgaatgataaccataaaaaattgcatttttataaaagttataaagtatcttatactttgaatatacagtacaaacctcatcactagaacaagaaatgatttataaccttttttcttttttagtcttacatctgatgagtgatttaaacagtaatttaactaattaggtaaaataaaaccacaccaattcagactaattgtatggaaaattttaaggaggaagtggaaaatctgataaagaatttttaaataaaattttattccttcaaaatatttactatatcttgtactaataattgtgtcattatacttctttcgtatattactttttaaagaaaaaacacacaaattatttgcaatttgcacgtatctttgcacatacatggacaccagcctgcttttgaattggtagctaaaccctttccacttgtcttgtgcccctcctagttctttgctttttttttttttttttttttttttttttttttgaggtggagtcttgctctgtcacccaggctggagtgcagtggcaggatctcggctcactgcaagctctgcctcccgagttcatgccattctcctgcctcagcctcccgcgtagctgggactacaggcgcccaccaccatgcttggctaattttttgtatttttagtagacacacggtttcactgtgttagccaggttgttcttgatctcctgacctcgtcatcctcccgcctcggcctcccaaagtgctgggattacaggcgtgagccaccgcgcccggcctcccagttctttgtttacaacactaaattgcttcacaaactcctttgtcagagactatacaaacattgaaagtgcttcgaagatacgaggtttaaacatcattctgtcatttgttacgtcactcatttaaccatatttagtaaatgctatggtttactaaatcataaataagtggctcactaacttgaaatattttccacattcatgccaaagtgtttgtggaagttttttttaaggttttcctaaagaaattcccagtataaaatatttcttaagctacatgacaattgcctttgttaatataaaataagggattaatatctatgttttaattaaaataaggtaaaggtatttgatttagatattagttgcttatattttattgattacaagtttttcgaagaggaatagagttctataattcctaaatttcttaacagaagttatgtgaatgaataattctattattgatggtagagagtaaatgtaatcaggttagccgaactaattaaagcacacatagctgtttatctctttgaaataaattatacaggttaatattgtaaaccaatgaaataggttgtacttttttgtagtgatatcctgggaatgcaagcaaaattgcttttagttttatttgagaaatcatttcaaattttggccaactagtacaatatatatgattctttggcaataatggaaaatatctgtacagcttggtataatcagctctctgccttgtaatggtctgctttactgatccaactccagagttcactggaaatgtttttctttcctcccaaaggtacatttgtagttgaaccccgataagaaaattgagaagttaagttttccaatttgcagtaagataaattatacattaaaaagtagagttcagtcaaattggtttaacatgtttctattttctatccataaaagtagcctcagggggaaaaactgcatgaactaataaaaccacagattgcatttgaggggcctttatttttttatttgtggttgttgttgacttgaactctgccatcggtataaaacctgaaggaattttaaaacccgaaggagtttaagtgtagggctggcactcaccctttcagagccttagtttattcttctgttaaattgcggcaggcatcagattgaatcttatctaaggctggctccacttctggtagatagtcgaggaggatacaaaaacaggaatgtgaaagacatcaagagaaggtgaaagcagctccatccgaatgtaatttttaactccgcagatcacattatttctagagatcagaataatctagattgcttgtaaaaggcacattcctgattcctcccctagaattactaaacgcacatcttgaggtgtagatggagctgaaatcccaatttttttgaaaggaaatcttgctctgtcgcccaggctggagtgcagtggcgcgatctaagctcactgcaagctccacctcccgggttcacaccagtgtcctgcgtgagcctcccgagtagctgggactacaggcgcccgccaccacgcccggctaatttttttgtatttttagtagagacggggtttcactgtgttagccaggatggtcttgatctcctaacctcgtgatccgcccgcctcggcctcccaaagtgctgggattacaggcgtgagccacggcgcctggcctgaaatccctattttttagcaaatgccttttttttttcatactgtgattgagacctagtaatgggtcataaagtcaatttagtggatcttaaccagcattttaaaattaaagacaagaatggaatggaatatggaaaaaaaaagtaactgaactttatgaagtaatggacaatgttgtttcatgaagttttcctttggtgtgtgtgtttataggataggaatgcaaaattgatttgttactgttggttgtgattaaaaaaaattgaaagtcactgccccagggtttttttacgctacagattttgagaatgactgtccagaacaatgcaaattctaaaatattcctatcctgctcacattgaatataccaaagttcactttatgaatgagaggcccgtaaggtattgctgtattccaggttttgaaggataaaattgcccttttttgacttccctgacatgaatattttgtgtatctggaaatttttgttatattcttgtttaataatcatcccttgtctaatttcctatctaggtcccagctccttaaagctgtgctactacctgtagctccctcctgtaaggctaatcttatttgagcctgccctatatgaggtggaatatactatatcatctgctgctggtttcatttaagcctgtcagccaataggaagcagtagcctgtctgccagaactaggctaagtcatctgataatctctaagagatccttttgggtttccgtttactgttcactccatcttttgaaatcagtcttaattttcctcactatccttatagaataggaaccacttgactatgacactaatattttttttttcatcttttatcaattcttcaccacatatgtgtgtttgtggggtgggggtgaggtgggctgggaatggctgcaatcctacgcattgggtcttgccataactaaacttcctgataaggggtggacctgactcccactttatcacctgctataagcaacatctcaatagtagtcataaaaatgatgatgttgataataacaataataataataaaacaaataatgtggtccatattttacatagtttatatcagtgattctcaaaacttggtgtgcatcatgatcatctgtttgttttcctaaaaccatatcgtctgatgtttggctaaaggacttctgagtattgaacagtttcccaagagatcaccagacacacaaagattgggatttactgggttgtctaacttaaatctttttgctatactgtgatgtaagtattcccattttccccccatattagagattaggaaactgaagtttagaggggttgtcttatatcatagagcaaacgaatggtaaaactagaacacaaaaacatatggtgtgagcaaagaatagaaccaatacatttttttaaattgctgttgaaatgggaaagttcaattatcagctccaagtctggtgctatttccagttgaaggaagaataggtggagtgcttgtgatttaaggagttgaatctcctccctcagtcttcctcaaatatctctcaactttgagataaaatttatattcttgaaatatatactacttatgaaagattttcttaaagcaccagggattttaattgggctaagacacaggagcaacacatcatctaaaaggtaatacatcaatactcttcttatcatcaccatgggtatttacaaatcagtgcatggaagtcccaggacagagaaagggtaatttgtcctagatggttctgatgcagtatgtcagtagaatgacttgagtaaaatatagacataaaaaatgctaaaaggcagaagagatggtaaagacatagatatagaaatgcttcatagtgctgtctagtgatggcattatatatggggagttcctgggcttaaagaaggaacttgcatttgatcacatggaaataaagtcaggaatggcactctatatttgcaatatgatgataaaaaatagggctagcaccagtcttacaagactaattgctaattgaggggcaacatatgtctttcatgtcttatgacaagtgttagataactctatgaagatgaattttctggtttttgatgtcatcttcattgttcatatagtatctaataaataaaactctattactcatcctgtttctgaacaaactcccaaatatgattgattccaattacaaattacttttactagaatgtacgatagctttaaaaaacaacacccagccattttcacagagtaaataaagtgaatgagaagaaatactcatttaagtttttctataatcattttcaaaatgaaggctaccagcttccaaaaagatgtgaggtattttataataagtcacatttacattaagactattaacatagaaatagtaaacagaaaaaccagatagagagaggaataagtatatataccaatcctacttagtttataaatcatatggtgatggagtgctgacatccctagcagccaaggcagattaaaattaggatgatttcccattttattttagggccagagtagatttttcaaccttgctgacatagatactgagctgtatgcaaaaataatgttaggatgtggttcagacatcaatatttttttaagtttcccaggtaattcaaatgtgcagccagagtggagaacagctgacttgtgtaaaacacggcagggaatttactgggctgtaagaaaatgactacaacccacatgatggaaggtgaactacataccttttcccttacaattggcttaaatgtaaccaactgcagataatgtctggtggagttcaaactggatgtctaatttttcagcctaaggaactcatgaaaaactcttatcagaagtggctagaataattgacttcattctcctgaggactggttttcttgtatagttcaagttctaccgacctttacttttaaataaactgggctatgctgaaatgtggtttagttatatcagtgctcttatcaatatattcagaagtctcagtgcctgtttatcaacttcttaaggttcagtcaaggccatgacattgcctgatgaataagaaccaacctgtggatcagttagcaactatgctatgtaactgtgggcaagtttcctccacgggcattggttttcttctctataaaatgcagaataacacgagtaattacccatagtactactgtgacaaacgataagtattagggaatgtcactatgcattttaagtacaaacactttatcaactcaattactaagaaggctttgcctttcttctttcgttatgttctgggaaatgtctgctacccgttaatcattatccactggaaaggatgatctttctattggtcagttgttgcagtatgtaagtctgtggcccagccctgtatctctgtgtttttttacttcagcgttctttgtcaaactgagtgcaggtaataaatgtcatccctagttaattcatgatctgccaatgtaagcagttgtcatttaaaaaaaactgaagctaaacgtttttaaaaatgccgacactatcttgttccttcccccagaatgagttagcttaattacatgctttattattaatgctatttcttaatacgtgcgatgcatataatgagatccagggagcagaaacactggtgaatcaaacattttaataggctataataaatttaacagattatgggtcccaaagtgttatcattttagtgcttctgaagtgaaaattaagatattagtgaagtaatgtgtagaaaatgcccatatctataaacttttgtggaaaaaaaagagacttgaaaaagtcataaggaaaaaagtttaaaaaaataaggaataaaacccttttattttagatatggctcaccaagtcttcaaatatgaaatgtaaacaggcttagaaagccaagtagtagtagtaataaaatatgattgttctactattgcctcatagatttgttttgccctcctgtttaaaaatatcccttttctacaagcttaagaattcaaaccatttttctcaagaaaaggataaatgaaataagttgctcttgtggcatttactattggataatacatggagaacactggaaaatttaggttatattatcaaattgtgctttaaaattaaactccggatggccaaaagtacatctgacaactttgcccttctgaataagaatgacttctgtgaccctgggttatggccaggttgtgaatattctcattttcctaaagaatcatgaaaatatcataacttaatattatttagtgaatttatttttctcatttcttctgaaaagcttaagtttttatataaataactcatcctcttaatatttttttaactcaagtataaaacagaaacaagaaagaaggaaggaagcaaaagacaatagctacagagatggttaactccaattaggctccaatcaggattcaataactctctccagtgaaaattaggccaatcctgaaaataaagacgtttattatcagttattttttattcttacaagtgtggaaaaaaactcatttctttcaagttcctggattttttttttgtcttagtgtatataacagttccctaaaatcttcatcctgtggacacaattctgggcttaattcagtcatttatagagcactctacagtgtaaatctgtttcacttataaagatctcatcagatcttcattgcatctttaaaatggaaagattatcctttatattttccaaagatgaatcatgactcagaaattgagtggccaaagattgctcaatttatagttgatgtcacagaagaagttctggattcctgacttgaaactccatgaatttccctaaatacaatattagttatctgaaaagagagaaccaaaatgtaaatttgcagtgtttatgccttacaagggattccagagacctagcctacttcattttttttgtttttggtgtttttttgtattaaaaggatactacatgtaaaagtaagactataaagactattttgatgattttacacttattaagctaacatttttaaacacaaaatatacaacacaatatattgagtgttttataaaataagtgtaattgttagaatgacatgtgatttgcagtgccctacaggtgaacccaacagggaacacccatttaaatttcaatgatgactatagcctctttcataagtatgaaacccaagcccaactctgtcacttccatctactccccaccataaccaggatctacaacctactatataagttttctattgctttgtaagaaactaccaggagcatatggcttaaaacaatgcacatttgttaccttatatttcttgatgtcagaaatgcaaaatcggcctcactagactaaaatcaagggggctggcaaatcaatgtttgttatggaggctctcttgcctttcacagctcttggcatgcagcccactccctccctcttcaaaactacccatggtgaatagaatcctcacagtgcatcccctgaccttcttttctgtctcccccatctccttttaagaaactttgtgattataatgggcccacccagatgattcaatagacaatttacccattttaaagtcagttgattaacaaactgcatttcgtctgcaaccttaattcccctttgcatgtgaaacatgtctccgcttccattcattaagacttggaccttgttgggagtctatttttctacttagcacactcaccttcaattatttccctgcagtcatctgacttgtactaagtaataaaaattaacatatgctcggcgttgaatatatttttccttatggtcactggtagctttcctttctaacaaagtgcagataaggaagttaaaacaaatgagtgatgggagtggcagaggaaataagttcacctgtgtagtaaaaggtttgggtgccaaagtcaggtttcagttcagcttaataatttaatgcttaactaacacttcagaaactgactctatttgtctgtcttgattcctgtgagacattttaattcatcttgaccaggaaaaggtatttaaggacacaaaccttcattccacagaatatgaaaacccaaggattttaaatgtatgtagtttcctaaacagatttcaccaggtgcagtttatgtgaaatgtctaagatagaaaaagaaaaaaaagaaaaagaaaatggagcatctgtttgagtggatcttaacatgcacgtttcattttcattcatttcattatgggacaattgattccaatgctcatgatgcaggcccctatctgtgcttctgtgtattttaggaggtagctttttaaagttggttttttgtccttgtttatttgttcatttttagtgttttacatactactggagttccacttggctcttcagcattgctcccttgaactgctgcagactaactccaactgtgtaatttaccatgtaggtttatcgacctcattcagctgcgtctggaactccatggttctatagggtagtcatgcaaagcaacagagcagcatgtgaactgagcttttgatgattatcacaatgagaaaatgaaaaacaaaaaaaaaccacaaaaataaaagaaacctttgcttgtattctgtgaatgcttttgtacgattaatccacactttgcccaactgggtttaatgcctgactttgcagcatgtagatttttcagcacagtggtaggcacaaagcaagtgcttaataagtctctgttggattgcatgtcattgtgaagatagtatttttcgcattagttgcttgtcaatatctcttttcctgactaggactccctctgtcttcctgtctttctgtgggtgtaatcatagagccttacaagggcttgactcaaataaattggaaggtgaaatccagctgtagtccagcatgctttctctgttctattttacaccagccttgctatcctctgctattagaattatacattttagataaatgagatcttgcagccttttacacacagtaggaattcaatatttttatgaggctaagaagaaatcacagaagagatggtttcagaggtagggaagatttaaacaaacatattccaaggaacttatctttgggaatgtctttgcttttccacaaagatattaagcttaaggaaaccttgccatttctgtgctttccgttaagttaattaactaagatgtttgattagtatgcatattttgtgatattccaagatacattaacattttcaaagccaggcagtatgctaaggaatttctcaataagtgaacaaagtctaccctgaaatcattgatttcagtcatttagtcactgatccaacccatatactcttacggtttcaaagtcatatggtttaagagaattaaacaactgaaaagaatagtaaatatcacctattaaaattccctcattttaaagttgaaggtattaatgctgaaagattaggtattgtcccatatttcacacaacatcaaaaccactatttgaatccaagtcccccaaacccctaattcagttatttccaaaagaacaagacatattaaaacatgttaatatgtagcaattggtaaaaacaatttttaagatactgtcattgaaacagagctataatggataaatgctgcctataaaggctatacagtatagttgaaaagtccagaatagtgtgtaaacattttaatacaattgaagaactataaatgttgaaacaatgagatatatttggttcaatagcagctacactttccagtaatttgatatattagaaaagtgctgttatatagcatcttgaatattgcatttcaaggaattaaaaataagtagattatggaccaggcactgtgactcacacctgtaatcccagcagttagggaggccgaggcaggaggatcacctgaggtcaggagtttgacaccaggttggccaacatggtgaaaccctgtacctactaaaaatacaaaaattagctgggcgtggtggcgggtgcctgtaatcccagctacttgggaggctgaggcaggagaatcgtttgaacctaggaggtggaggttgcagtgacccaagatcatgccactgcactctagcctgggtgacagagtgagactcagtctcaaaaataaaataaaataaagcagattatggtcccagcaataatttttaaaatgtgcattgttgaggatccagatgcaaggaaaaatattattaaaccaagattcaagctgatgacctgtctatggacttctcagcaactgtgtatgaagatgaagaacactgggctatggagacctccagcaggggagttaaagaaatgggcttccttggcaacaaaagccaaaatagacaaatgggatctgattacctaaagagcttctgcacagcaaaagaaactatcatcagagtgaacaggcaacctacagaatgcgagaaaatttttgcaatctacccatcgacaaagggctaatatccagaatctacaaggaacttaaacaaatttacaagaaaaaacaaccccatcaaaaagtgggcaaagaatatgaacggacacttctcaaaagaagacatttactcagccaatgtcatatgcaaaaatgcttatcatcactggtcatcagagaaatgcaaattaaaaccacaatgagataccatctcacaccagttagaatggtgatcattaaaaagtcaggaaacaacagatgctggagaggatgtagagaaataggaatgcttttacactgttggtgggggtgtaaattagttcaaccactgtggaagacagtgtggcgattcctcaaggatctggaactagaattaccatttgacacagcaatcccattattgggcatatacccaaagcattataaatcatgctactataaagacacatgcacacgtatgtttattgcggcactactcacaatagcaaagacttgaaaccaatccaaatgtccagcaatgataaactagattaagaaaatgtggcacatatacaccatggaatactatgcagccataaaaagaatgagttcatgtcctttgtggggacatggatgaagctggaaaccatcattctaagcaaactattacaaggacagaaaaccattcactgcatgttctcacttgtaggtgggagttaaacaattagaacacatggacacagggcagggaacaccacacaccagggccggttcgggggtgaggggctaggggagggatagcattaggagaaatacctaaattacgagttgatgggtgcagcaaaccagcatggcacatgtatgcctatgtaacaaacctgcacattgtgcacatgtaccctagaacttaaagaataataaaaaaaaaaaagaagaaaagaaaagagaaaaaagaaatgggcttcctaattaaagagtcccctatggagtacattgattaaaaattgcaatgaagaaaaaagtgaaagcacaaatgcccaatgctaaggtgatatagattaattagagaatgtacagagataagaaattaggatagcatcctttagtataattggccataaggtggaaaaatgtgggaatgaggagtttacagtatttttgtctctcagaatgtcacacaacaaagattaaatcaactagaaaatctagaagaaaccggtaaatttctggacacatacacactcccaagattaaaccaggaagaagttgaatccctgaatagaccaataacaagttctgaaattgaggcagtaattaattgcctaccaaccaaaaaaatcccaggaccagaaggattcacagccaaattctaccagaggtacaaagaggagctggtaccatttcttctgaaactattccaaacaatagaaaaagaggatctggtaccatttcttctgaaactattccaaacaatagaaaaagagggcctcctccctaactcattttgtgaggccagcatcatcctgataccaaaagctggcagagacacagaaaaaagaaaatttcaggccaatatccctgatgaacatccatgtgaaaatcctcgataaaatactggcaaagcaaatgcagtagcatatcaaaaagcttatgtaccacgatcaagtcagcttcatccctgggatgcaaggctggttcaacatatgcaaatcaataaacatagtccatcagataaacagaaccaatgacgaaaatgacatgattatctcaatggatgcaaaaaagaccttagataaaattcaacaccccttcatgctaaaaacactcaataaactaggtattgatggaacatatctcaaaataataagaactatgtatgacaaacctacagtcaatatcatactgaatgggccaaagctggaagcattctgtttgaaaaacggcacaagacaaggatgccctctctcaccattcctattcaacatagaatctgaagttctggccagggcaatcaggcaagagaaagaaataaatggtattcaaatagaaagagaggaagtcaaattatctctgtttgcagatgacatgattgtatatttagaaaacccatcttctcagcccaaaaactctttaagctgataagcaatttcagcaaagtctcaggatacaaaatcaatgtgcaaaaatcacaagcattcctatacaccagtaatagaaaaacagccaaattatgagcaaactcccatttgcaattgctacaaagagaataaaatacttaggaatacaacttacaaaggatgtgaaggacctcttcaaggagaactacaaaccactgctcaaggaaataagagaggacacaaacagatggaaaacattccatgctcatgggtaggatgaatcaatatcgtgaacatggccatactgaccaaagtaatttatagattcaatgctattcccatcaagctaccattgactttcttcacagcattagaaaaaaatactttaaatttcattcggagccaaaaaagagcccatatagccaagaaaatcttaagccaaaagaacaaagatggaggcatcacgctacttgacttcaaactatactacaaggctacagtaaccaaaacctagtggtactagtaccaaaacaaatatgtagaccaatggaacagaatggaggcctcagaaataacaccacacatctacaaccatctgatctttggcaagcctgacaaaaacaagcaatggagaaaggattccctgtttaataaatggtgttgggaaaactggctagccatatgcagaaaactgaaactggaccccttccttacaccttatacaaaaattaactcaagatggattaaagatttatatgaaagacctaaaaccataaaaaccctagaagaaaacctaggcaataccattcaggacataggcatgggcaaagacttcatgactaaaacaccaaaagcaattgcaacaaaagccaaaattgacatatggaatctaattaaagagcttctgcacagcaaaagaatctatcagagtgaacaggcaaactacagaatgggagaaaatttttgcattctatccatctgacaaagggctaatatccagaatccacaagaaacttaacaaatttacgagaaaatgcaaccccgttaaaaagtgggcaaaggatatggacagccaaaagaagacatttttaagcatccaacaaacatatgaaaaaaagcccatcatcaccagtcatcagagaaattcaaatcaaaaccacaatgagataccctctcataccagttagaatggtgatcattaaaaagtcaggaaacaacagatgctggagaggatgtggagaaatgggaatgcttttacactgttcttgggagcataaattagttcaaccattctggaagacagggtggtgattcctcaaggatctagaactagaaataccatttgacccagcaatctcatgactgggtatatacccaaaggattataaatcatgctactataaagacacatgcacacgtatgtttactgtaacactattcacaagagtgaagacttggaaccaacccaaatgcccatcaatattagactggataaagaaactgtggcacatacacaccatggaatactatgcagccataaaaaagaatgagttcatgttgtttgcatggacatggatgaagttggaaaccatccttgtcagcaaactaacacaggaacagaaagccaaacaccacatgttctcactcataagtgggagttgaacaatgaaaacacatgggcacagggagaggaacatcacctaccagggcctgttggaggttgtgggggcaaggggagggagagcattaggagaaatacctaatgtaggtgatgggttgatgggtgcagcgaaccaccagggcatctgtatacctatgtaacaaacctgcacattctacacatgtatccagaacttaaggtatattaaaaaaaaaatcacccccccccccaaaaaaaagaactactagaacatagccatgtccatttatttacagatgttctatggctgtttttacactccgttggcaaagccgagtagctgtggcagagacctatggcccacaaaacctaaaatatttactttctggcatattacagaaaaagtttgccagacccttgactaggtttaaaataacgcagcaataaagagcaaaacctaaattgaatgattgtgttaacaatatagaggaaccacaatttgtgttttaaaatataatatcttttttagaagtttttagaaaaacaattgcctacattaactaagagttttaggctttggctattctgtttcctgacatttttcattagtggcggaaaaaacccgagaagctgacttgcacttttaggctagagtagttcttgcattagtctgaatattgaaattcattattttcttctcatttgcaaaatcagaatattaatctgatccacatagggatggcacgaaaagtgacaacataaatgaaatgaatagcattttcctggcacagagtagctgctttttttaaaaaaaaaattaatatcattgttttgttgcaataattaaatagtttgtaatcactggactaagaattataataagcacctacactcataatttctaaagtacagatataaacaataatgtcaaatatgtaattgcattcaagtcaaaggaaatatagttatttaacttctgccccaaatgagagttttaattaatgaatccaaatgtctcaacatgtttcttgttaatatcctttcatctgctattgacttgaaagaaagaaaggcagtttgaagtatggaggcatcttgaaatgttagcaaaagaaaacacccctaaaaagtttaaaggcctaactaaagtttgtttcagagttctgccagatatagtccaactaatgcactatggaatcctaaatatgtttgttcaatagccactgacactggttgagactgtttgcagattaatcagtgcctgttcatttgcaaggaaagatctcacagccttagcccctctttaaaaatgaaatgcagcactccttataataatgcaatgttctgctccatgactgtttcagtgctttttgactgacaaaaagagtcattagaattctgtttgatggacataactaagtgaattggaaaaaataaaaaagccttttcagcccattcagaaataattgatgtgactgagacagctgtatgtgagttccagataaggagacgatttatggagaaactactgaagctaaaaaggaaggtgcagatttaaagttcccaataaagttgtctgtaagacaaagagcagtattcaataaggaaagagatttaacctgaggttctttccaatagatggcatccttagggtcctatccttttgccaataaaatccccataaaggtagtgtcactaggttataaaaaatggactccaaggggaaagcatctgcactcttagccttgtgctatattttctgttttactgtaactattgtgtacaggttgtaacttagaaaattttgcttagtagatgaaaggcacttatttttaatacgtccgattgtgggacataatatttgcttttatgatgtgatggttactttctaattaatctaaccaggatggataaaaataaagtttttaatattattattatatatatatttgttaatattcttctggtctctattgcttttcttggaaactatacaggaacttttggacaaatatttttccaaataggtaacacctgtgaatgttacacatattttgcaatcattgtattctgaaagcagaatacattaataatataatattgataacattaatagtcatgtgaatttcaaaattaacttcctcaaatgtgcagattataagtagtaaatgttactacatcagtactgtcaaaaaggtagggtggttatatagttctctaaaattaaaaaaataataaaaatgaagtcacaaaacaaaataaaaaataaagaagttattatagtacaattttgacttctgctttctagagatttaaaaatatggacttttttgaaaattgtttcagtcttctagtgaatttgaaatatgtggacttaactttccttgaactctctgtgtggagagcgggatagaatttggctgctagtttattttttgaaaaaaaggtacagtttttgagagcttttcatgtcatctctaaatctgtcaactgcctacatttagggtgactgttaggtgctttatgttatcaatcatagagatgcaattttacgaaagggaataatgaatcaaatgctcacgtcattttcccttcatgagtgccttatcctttgcaataatatcattagaacagaagccttctttctgcaatccagatggattctaattcttctctttacctaagaaggcagtctttctcttgatcccagtttcaccaatatgcccattttagcatctgtttatatttttcagaaaacaaaactacccagtgcaaatgcatttactggatatgtcacatagtacaccccacagcagtcaatttaataaatcctaatttgctatgtttgtccttttaagtctctgagattagtttcattcagaaatgatcactgtaatcgcacaccccttcctctgatctcacccacattttagggcagaggggaggatatgaaaaggccaccatgttcaggcctcccaacagcagaagagcaagcatggcagatagaggacctctcccttaacacttttgcctactcgtgtggcctctagatttccagaaaataaagtgaataaaattaaataaggagagaacaatgttcattataagtatatggtagtttaaaaaagtgtcagctctaatgcatttccatcagctggaggcttagagggagaatgatggtacgtacaatgctgcaggaattgtacattatctgggttttgcctttgaatatatttgtaacaaactctaaaatgtctgagtagtacctataggagggtatgtccttaagtgaaagtctctagtatgtcataatggaaacaaaaatagttgataaataccattccaaaataactgaatagagaaatattcatgcttaatgaatgattagattcaaatagcttttaaaaatgttgagtattattgtatgtacatatttgcattacaaataatttgcatttaggaaaataaaattttagcactttaataggataattaggtttgaaattttttgtggattttagaaattctatttagaagctttacttggccagctctatattttcttaaaaagcatcaaaacaatgggccataactctagttatatagctgtggcctgaggtatactaccgtttatagtatatgtctttgagggagcttaaggctctttttataaactatctcattaattctgagagaatgtaagttagcaaggggcagttactattgtctccattatacataccctgagcctaaggcacaacaaccaaaaatcaggtaacttgtcctctaggtcacgtaaggtttcttggaatagaattcttttcttgttctgttattttttgtgtactgtttctttcccattaaacacacatacacacacataccccattaataaaattcctcaaaatattttactgtttttataattattctgattttatttctctcttaattctagctagcttgtcttctttgctctctttcattctgctcccaccttatcttgttgagcacccctttttgcttacatctccaaatgtttattttaaagcaaaacttcttcagtgccaatgaagaaagacacaaatgtagatcaataaatcaaacactttacagaaatctttgttttaacttctaccctatttctctcttttttcatacttttaagggtagtagtacattcccactttctctatttctccattgattgacaagccaatcttctacttcttttggtccaacctacaattgttccccagagtttagagatactgtagccacagtggccttctaaaggataaatccaatgggcatgtggtagtcagcatccttcttaatgtctctgatgcttttgatcacataggattgcctttctggaaatgttacgcttccttgacttctgagttttgaaagtgacctgcttttcattctcacctctgttgttgttgttgttgttgtttttgagatggagtctcgctctgtcaccaggctagagtgcggtggcgcgatctcggctcactgcaacctttgcctcccgggttcaagcgattctcctgcctcaacctcccaagtagctgggattatagacatgtaccaccacgtccagctaatttttgtagttttggtagagacggggtttcaccatgttggccaggatggtctcaatctcttgaccgcatgatccgcccacctcagcctcccaaaagtgctgggattacaggtgtgagccactgagcctggccctcaccctttttttcaaattgcttgcttctagcaatatggagtatggaatccataatcaactcccaaatatgtattatctatccaatttcttttagagatctcaaccaacaaaccactgcctttgcactgcctgtcctaaattcctgagtgttacagcatgttgtttatgcctccattttgctggaaacttgatcacattatatttttgtgcttttatgtactgataaggttttgagtttcttaaatgtgtagaatcattgttggagcaccctcgaaaccctggaaaataatgggcataaaaataaatggaggtctagtgaattaatgactcaatccaatcagctacatgggctttcttcataatggccttgctgtccgttttcactgccactaccttctctcagccttacctctcgctaggtaaatatttcattatactttatcttctagcataatcttctgccttcaacatttcttcttcctcctctttcataaggaactgtcagaaaatgtcttcattattggccttttatttagataattcacttacctaaagaaattctttgattttcactctcttgttttaattcattcacatacctcatccacaggttttggaataattttctttaagatctctgtcttgcagtacttattcaagtctgtagcttgtcttcataatttcaaagagctggcagactgtcactcttcctcaagctcttttgctttctcttctattagatagaccaatttacatttacaagacacaaaatcgtttatcaccccagacagaaaaatgcaaagttcagacactgcaatttactaaatgtctttatgaccatacttttaagtctcaagatggaaccaggagtctactgactctccctggaaactattttatacccttaaagaaccagctaattgcctggagcacattgctttttgaacctctacctatgttcttcctgacaataaagtttctcattcctttctgtgcctcttcatcagctggggatttttaaaaactcccgatctctgagtcccgccctgaatgctgattcactgggtttaagttgggaccagatattggcatttgtttttttcacaagttctctgggtgatactaagtcacatctaggttgaagaattatcacgtaagctattctacttcagagtatcagtaattaacaaagtgacagttacatatataatgcaaattcattctctgtcaggagttgacactctgctttacatttctgctttagtcaatctttctggaatatataaataatatgaatattgtgtcataacctttgcggtaaaactgaactatcttttcaagactcaattgtctgcctctctctcttgctgtttctctctctgtctctctctcatttcatctaactctgtatgtctgatatactacttaaattaaatcttaactcttgcatcaatgggagctctttcagaattttcacttctgtattaatttggttcacactgccaacttaaatacttggccacaaaaaatttattattcaaaactgtcaaaatgaatctgaagagctagtgatataatgctgataccatactatagcattctaattaaaatattttaaaatatgaataaaaatgataggtgtgatatattataatccattgtatgatacattttattttgaatatttattgtgagttatgtttttataaattcagatattattttaaatgcaaaaagcattttatacaagaaagaattgatggatctaagtattttctaatatataaatagataaaaatattttaaaattatgccatttttacttctaaaataatttatagagattaaaatatgcacagtcaaaatagggtaggaaatcaagaaaacaaaatgcatagattcatagcagtcattacatagtacattacagataaatcattattttattgttaacatttttcattataaacatagctatcaccggtttctctgctagcctatccactttttgtggaataaacatttaagcacagattccaaaatttttccaaaattattccaaacttcacccaaatgtcactctttttttctacttttatatcaaaatgaaacaccatttctaatcatttcttattttctgtttctaagtttattggtatgtcttatgtatttctgtattcattttgagttttctttttgtgttaatgaaggtattctaaaagatttgaaagtcattaaaatagaattaagaacagcagttgaccctcctttctctttttatgtaagtgtttgtttttaaacccattgctatgtctttaaatggtaatatgtctgcatgacccttggcattcttagctaaattcaacattgtcattaaaatttcattgcccagaagtgtttactgattattttgtgtgtgtagaacaatgtggttttaggagactgtcagtggtctcatttccaaggtgagaccaaaaacattaaacagtcacaggtgtgagaagtggggtggatggggtgggtgagggttgggagaaaagaaaatatgcacacacaggtaaaaatgagagtacaaattgatttctttatttttttaaatacagggtatttacatttctttattttttttaaaatacagggtaaaatatcacaactatattaccatcaagaaatatgagaatcattagtgaaataagaataatgtttctagaaagtttattgtcagtaaatttaaatccataacatacatgctatgtatactgaaaatatttgtaattgtttataaatactgcagttccaattcagtgaaacattataaagaagagaacatgaattaaatgttttccttttgtattaagattcaactattctgattttgactttgaattagaataaaaaggaaactttgtaaagattgtacacttcaaataagtacatgaattgtgagctactgggttaaaaataccaataattcacaatgttttcagctagtcttccatctatgacaaaataaagggtaattttatggaagcatgtgtttgtctttagcaaaactaatttataaattagggggagatgttataactcttcttagctttcccattaataacctaccatgtgcatataatccttaatatttctaaaattctactggtccaggtcgtaattagtaatttgtatcatgaacattcaagttataaaggtgcaaaaaagattttgtaaactttcattattttctagcaacattaattttttactttgtagtagaaagaaacagtctgagttataagtttaaaaatatgtacacttctgacattttcaaattcatgcagcagctttatggatacaactattgccaaaaataatctcagactgacattacagaacatttttatatgtttttccaaattattattatgtagcactgtcaatacatggcattggtttgttcctttaatgagcctaatttattttaatttattttattttgtggttaaccaagataatctgcaaataccttccatagtaaatcttcagtccagccattgtcagtaacatagtaaattgtggagttcaactggatagtttcataaaattttttaaaaacaaattaaaggctgtacatgattttactttattgaacgaatcacaaacagtaatattaagaacatacaattaaactttatagtttatttcctactcactgtttagggatacttttatctattattgcaatatgactcttacaatttcaaggtccataggcaatatttttataggaatgatgtaataaacatatttgtgtttcctagcactgcatctaaattcctatttgtcagctgtactttgaacagtttaagtcaactgccaacccatttgattttatagctttgtatgatatggacaaagtatttaaaaattgagtcttcttacaatggattagttcaatatttactgccttcacaaatcactgaccttgtttttttagaggccatttctggaaagcatatctgaagtgaatactatagaatagaaaaaggttgaatatgtggaactaacatatcagatttaaatgtatgttttagtgaaattactgtttttttatctctgtttctgaaagggaatttccagtttttccataataaaatctaagctctagacattgccttagataatacatagttaactaatgcagtttcaacatatctattcattttgtattgaattagttgccagtagaccttaatgtatgtaatttatgtattttttaaaataagatcatttacaatcttacatcgtagtgacattcagaatcttttcttttgcagccatttcgtagagtgacgttttctgttgtgagtcagcctcaggacccacatcaggggtcactgcagagttgctatgacagcgggctggaggagtcagaaacaccaagcagtaagagttcatcagggccaagactgggtgcgcttccactcccagaggacaactatgaaaggaccacgccggatggcagtgttggtgaggcagagcatatggaaaatggtaggggcaaacacaacatccacacacataatcacgctagtgagccgtaataagtagactcgcgaaggtcagtctaaaaccaaaataaaatagctgacattaaaaccattttattttaagtgataaatatttgctaaaatacagaaatgccaaataaaggaacataactctgtagataaaattcacccaaattgcaccatcattttaaaacatcctgtcagaaataaacgcacttataaataaatcagaacagggcccactatgaaggaagctaaataagtgcagaattcctaaacaatagtcaccaagaaaggtcttgtctaattgttttcttctattcatttttgtcatgcaactatttcttcaattgcagctgtccagtcttagtgaaaggaaatgaaagaaacataccttgctctaccttttcttgtcctagatgtttagaaaagcattttcaaacctctcctttcctatgatcactgaatagggtcaaaagagaacagtactactttgttctccatagtatgcaataaatgctattagaatttccctcctattcaagtataaggtttttttttatttttatgtgagagaaaggaaggaaaataaatcataatactccatatttttatactgttttgaggtgattctcataattaccacaattggccttgtatacattttcttttaagttatacatttagattgcaaatagcacttataaaactttccacatttgtttatattcccagagataatttggtgatttattttctggattttgagtcataagtaaatgcctgaggaataggtttgtgtcaaataatggaatggtaaaattcatcctaacttcattattctttcaaatatgaagagagagatggttaaacagagagaaaggaaaggaatcacacacattttatccctagtaaaacttgcagtggatttatgtcttttgccatctcaacccccgagtgacataagacgctctaactttttgttatatatccgtttctttagtgctgatatatatgcaagtagagcatattaatgcaggagaaagactgattttcttctgtaagtttacctatgaatattaaaatccaatattagaatataatatattataaaggaccccaaatgaaagtattgctaaattatattatgctaaataattatttatccacattgttcttggttaagaaaatatgatatcagggtctgatgattgacgtccctcttgattaattttgcagagttaaaatggcattttgccttatggctataaaagcatgcttatctgtgtgtatggtggtgtgtgcttatgtggatgggagtctggtgtggtttctaagagttacattttttttagtaatttttttaatgggcatataattttggtatgaattgcaatgctgatgaatatatatttaaggcagatatgtttaaaattatttggaaaaagaaattaaactaaaaatactgtaattacatacatactatgtaattacatatgtaatttggatgtcagctttattaaaaaaggactttgtacccctggcattataatcatttttcaatgttagtttctgttttatgagtttatggggattcatcacctttaaaataagaaataagtgatgaataattaaaagataattatgtaattacatgtatgtagccacatgtaattgcatgtatgtagtcacatgtactatagtgtattacgttacatatgtgtaacgtgtaattacgtatgtgtgatatatgtaatatataatatgtatatagtacatataattacttatatgtacatatgtatgtaattacagtatttttaatatagatagatgataaatagagcatacctaggaaggcaggattaatttaatttaggggtattactacatctgagattacctgttcatgagaacatataattttgtttgtgtttttaaaagtgcttattcttactgtaaagcacagaatgtacaattaaatctttattttttggatgtcagctttattaaaaaaggactttgcaccactggcattataatcattttttaatgttagtttctgttttatgagtttatggggattcatcacctttaaaataagaaagaaatgatgaataattaaaagataattatatatgacaaacacatatcggttaccttttaggaaacacacatgtcatggaaaacttaacaggtgagcttgttaataaaatataaagtatactgagaaagagttccaaaaaacgacttttaattcttttttagaaccaagtttttaaggcctgtcaaaagcaagggtcatgataatgtaacggatctttcctgattttgtatgtgaccaacacttgaaagtcagagtttatatgaccatttgtcatctactggctgtgattcatgttagccttgatctataggtaatgacaaaatgagatgcgatgcactgtggctgatctaaatgtagcagttgacctttgagtaacaaatttgttgggtccgtgttttcagactactcatctagccataaagtgcaattgtgttgcttaaattctggtaatttcatcttcagtattaatggatcattctgacataaatagaattggaattgaaacctgtcaagtattcatttgtcacatttaattggaatccaggtaatctgtagttttttgcttggctaggttttaatcaggatttgtattggattttcatttggattttccattaaaataccattttggatgctgtgctagttcctaattattattacctcaaacatttttcttgaattttaacctatgtgaaacaatgcagttatcagcaagtgtttgggattaactttcattgtaaagtttagaagataatttctagtgcaataacaagtaaaattccaatgtcatgctaacaaaccaggaataagttaggatagctaatgataaaaatacattttcacaaatgcagagaaggaacagaaacaagaaaatttaagtgaaatgtacttacattttacaaaagcgttatcttccttctgtactgtagtatgatgaatacaatttcattcaaagggcctgtgtattaattccctgtttaacaagctttacgctatattctaaaacacattaccgccaaatgtagaatgaggttttattctcttattagctaaggaaaaagaatataccataagaataaatataatttcttaccaccggaatctaataatgtagaatgagatccaccattttaaagttccaaatctgtagaatgccacaggtccctggaaagtaacactagaaattaccccatttaaaaaatattttaagaaaaccttattagttatacatttatttgtgacaaagattactaatatatatttctttgcctttaattatcatcattatgataatttcatgctaatcttttaatatcaatctaatcaaagattgaggaaattggttatttgtttcattaaaatacatttagcaataaagtaataattcatatagagtttatgggggaaataggtaatacaaacatttgacaatgaaaatgttagaataattgatgcatattgcaatggattggtaattcaagttaaaaaccaaacattaggcttaaaagcaccatctcattcaaggcaagcattgactgtgcaagagtttgctcttattttaattacgcagtagtcttcagactttctcttggagtggtatacaatggtttctttaggtctattgtatttatcctggtccctaccttcatgccatgacctacttgatctttccaaagccccctctaaattatctttgcaaagccagtttgcctttgctatgtaagtctttatgataattagtgtttaataagctcagatatagaaaacaccttgcttggcttctcatctcaattttgccatcagcattgggtaggctactgtctaaggaaattgataaatcaactctgaaatcttactcggttccaggtccaataatctgtgattctcttacattcaatttttcttgtatcttttatgctatagaatggagacatttgtctcatagtaagatagtgagtgaatttgacaatgtatgttaatgtgggcaggccagtagtgattctagggcctttctctgaacccacacagcaagtgcattttaatagtagaaaatgcatttattacataaatcaaaggagtggactgaatcaaatggtgtgatttctggccaggtgggtggaaatgttggcaccatagtaggccagtgtgggagacagctgtggagcctccttcagatcccactatgcaagaaccatctgtagatctgatcaagccctgggtgcaatgcccttgaaatacatgaattatgattaagacatttcacaatagaataagcacatgtgttttcttacttaacaatgtgaactttggtcagagtacaaatgaaaaaaaaaaggtaggaaataatatatatttttctgtaggtagactttcttaaatatcacaccataaaaataaattaaaaaaaaaacagcagatgatccataaaccaggtttataacaagttaaatgaggttcgaaatttggccactctaaatccctaattcattttatgcctcttgattttctcagatctttaaataatacttttgactttatacatgaatatttttgaactttccctttccaaacttccttactttgtcacacttatataagctaagctcaactgtttgattcattccatttccttcatctcttcattctacatgcattataccttgtccttgattatttaaacatgctgcagtaaaacatggacttttcatattgcttttagacagtgtatttgaaatatcattgagaataagccactaattttaaatggccaagtgtaatgagcatagagaccaaaggcatatctttgtatgagataaaggacctcctctttctctctccttttctcctgtctcccaattttcaagcaggcatctgtcaggcaaagttgtctagttattggtttgtgctgatttcacgtagattgagcaaacttctctagcaaggctgcctcttccatctttccaaagatcctcatatactttttaatggcataagcacaatacctaaaataccaaatacctgtcataccttttttcgtcttctgcagaaagagactaacatgacttgctaaggattcattttcacagttttgcatttctctgtgccaccctagttgccagtgtctgactgaggctgcaattgttttcacctttcctgtcaattgtgacatggctctatacctcccaagtatcccccaaaagtctgtatgccaccactttgggagggtgctattcactttgaatttcttcatagtaatatatagagagatggattatagagactgtctctaagccagaactcaactaattaaaatgtgtgctatagtggcttctcagctgtctagtaaaatgagcagtacaatctaaaagagtctaaagaaggtactgtcctagagaagaattggcagtgctgtaagtagaatctactggtttacaaaacaagctttgaaatctgatgacctcagtttgaatcctggctttacctcctacaaggagtattattttctaacccctcttagcttcagtttgttcaattgcaaatcataggattgcagaaggaactaaatgagacaataatatgcaataatttataaataagtaataagttgtattttcactatattaattgataaaatgttttaccattattatttaaataacaatgataaatagttgggattattattaactttaggtcgttttttttttttgagatggagtctcactctgccacccaggctggagtgcagtggcacaatctcggctcaccgcaagttccgcctcctgcgttcaaaccattctgctgcctcagcctccagagtagctgggactataggcgcccgccaccacactcggctaattttttgtatttttagtagagacagggtttcaccatgttagctaggatggtctccaactcctgacttcgtgatctgcctgcctcagcctcccaaagtgctgggattacaggcgtgagccaccacacccagccaactttaggtaaatttgatataatacaatggcttagtcatgaggacttcataaaatgctcagcctcacaaatttagcatttttaaattaccagtataaattatattctcaccttaaatattttccagttagttttttttcttttgtttcgagtaccatagggtagtactcatgactagtgacttataaatatagcaaggacctaaaatgaggggaaggaagtcttctatctcttggcatcaaaccaaccgactctttgtgttctttgtcattcaaggtagggagatgtcattatggtctttctacattcttttctctttttttaagtgttctagttgaatgcattatttttcaggtgtacacctccctttaaagtgctgcaaattattcacattaacagggaaaattagctgaaaataatgtccaattagtatgcttaccagattctcagtcctttcttttctaatctcaatattaataattaactctgataaaatgtgtggccgtattacccttttattctaatttggtccttttaaactagatcactttgctgaacccttatgacatttgaggagggaatgagcgctcatcaaatctcaaagtgactttggaggtcagttagtggttttgttacctccagactcccaaagcttttgcttgtgtgaatttcagcacttgttgataatacatttgattgttttagttccttatttagttaaggtgttatctcagtctttcctgtgaattctttttgcttatagattacatataattctattcttcctctgatgttattgccagatttatgtataaaaaaaccttgtgctgtgaggagcccgtctgcccggccaccaccccgtctgggaggtgtacccaacagctcattgagaacgggccatgatgacaatggcggttttgtggaatagaaaagggggaaaggtggggaaaagattgagaaatcggatggttgctgtgtctgtgtagaaagaagtagacatgggagacttttcattttgttctgtactaagaaaaattcttctgccttgggatcctgttgatctatgaccttacccccaaccctgtgctctctgaaacatgtgctgtgcccactcagggttaaatggattaagggcggtgcaagatgtgctttgttaaacagatgcttgaaggcagcatgctcgttaagagtcatcaccactctctaatctcaagtacccagggacacaaacactgtggaaggccgcagggtcctctgcctaggaaaaccagagacctttgttcacttgtttatctgctgaccttccctccactattgtcctatgaccctgccaaatccccctctgcgagaaacacccaagaatgatcaataaaaaaaaccaaaaaacaaaaaaaccttgtgctgctaaaatataacactcttaagcatcttctatttggtaaaggaactgtggatcttgactgtttaagtatatttaagtttagtagtcttttttttatttttattttttaatgtaaggtcttgctctgtagccctggccagagtgcagtggcacattcttggctcactacagcctcgacctcctgggctcaagcgattctctcaccttatcctactaagtaactgggattacagtcatgcacctgttcaaggctgttctcaaactcctggaatcaggggatccttccatcttggccctccaaagtgctaggatcatagacatgagccaccctgcccagcaagttagtactctcaacctcagaggttagacgacctattgagaaaccattttatctcaatattcctcttctaaggtaaaatactttccattgttacctcttctcttgcaggtttttaataagtaaagtattttttgctttgctaataaagcaaagtagaacaataggtgtctcttgtttcatggggcaattatatagtgtcaaagctgtgtttattcattttgattcaacaaaccaatactgaaaataaaatatgaccaaggctttctgaggaaatttaagtaaaggagaaagaatctcggcctttaagatggaagtttttatgctcaagagatacaaccttgatcacagtaacttaattataatgaaaaaatagtaagctcattagagaagttcagagtggtgtgaggtacagaggagggaatggaaaattatacggaagaaacaattatagacgcaagttttgaaaatttttattttataaatcaaatgttggacaggaagaaggccatgaaatgttctttggctgcacatcctctctctttatctactcatctttgatatatttaaaaacaattattatactggcctggaggcttcatttgaagccaaataaattcagattatttgttttatttttctaattgagttactgttacctttttatgtcttcttttttccttttttcattttttaatgctaaacacaattagttcaaaaactctaaaatttatccttgatgaaattggcagcagaaactaaatccagatctaaactataaaatagattaattttgtgtctttcttttctctctgcttataaacatggataattactaaaaatatgtgtgctgtaaataaggcctttcaaactcaataataacccgtaaataatcttttgaagtcattgttatttattttcagaagaccagttgtattactcaaattaaatagatgattaaattacattagagtagagtagattggattacattatatttatttttaagaaaacccatttcttctgtggcagttgcaaattgtttttgtaattgttatttcaagattcaagttaagcatacaggtatttatattacaatccctttatactgaaatatagacaataggttgctttgtttttaaatcttgtctctgataaattttacttaatatacgcaggtagattttttggcattaagtctcattatcatgtatgtcttctcattattgtccagaaaatataattgtaagttcgttataagaatgagaaaatatctgaaatgcatgcaaatttaaatgcctcctctggaacagagtttcaactactaacatatgataatgttaaaggaaattaatttttgatactatatgtataaataaaatctgtgattagtggtatgttttggaagtaaacagacaataggatagtatccagctatttaaaaatcttcttcatttctgcttgaaaatatatctcccatggttttatttctgatcctcaatgcttagcgtctacattaatgaagttgttaggaagccctatatgatctgagagcggtatgcatttctgaggttgcattcctcagaaccccagtgcccaatgctgaattgtgtccattgtttcagttccttatgaggccacatttcaccaaggcagcatttgtagccaaaggtcctagcagctatagctgaaattttatacagtgaacagagaatgtagagtgttataagaatccattgagtaaaattcaatgaccatttgttgagtatttattttatgcaaatttttatggactcaaaggtgaatgacacaggctctgtttgctaagcatttaaatattgtcagagagaaaggcgtgtacagatttgatgtttaaaagtaaaggcatgagaggcattatatggagagactgattatatgctacaagaagtagaggaggacttgagtgtgggttacaaaaaatcatagccgtggtttgaagggtggaaaagtagggatttgctaagcagaaatgtggataaggctatggagaacagtgggagataccaaagatacctacccgagagggtgaggaaaaagtggtgccatttgccaaccttggaaaagtggaaagagcagcacattttccttggaatgattctggttaagatatcctgtacttaaggtatctttgaaaaatgcaagtgatatttaacaggatatagatctgaaatttgtgagtatagataagcagaagaatgtagctttaggagtcagaacactggtaatgctgaattcctgggaatagatcagactacgatttaagtatttggcaccagataagtgacgttatccaaacagaatgttgaaaagtactgaaatataagagaataagggagaagtaagtttcagcgaatgtgactgtgaaatatattaaaaacaaaatcaggctgggcaaggtggctaatgcctgtaattgcagcactttgagaggctgaggtgggtggattgcttgtgcccgggagttccagactcgcctgggcaacagagtgagaccctgtctctgcaaaaaaaaaaaagtttaaaaatttgccagatgtggtggcacatgcctgtagtcctagccactttggaggttgatgcgtgaggagggtttgtgcccagaagtcccaggctgcagtgagctttttgtgtgccagtgcactccagcctgagtgacagactgagaccctgtctctaaaaaaaacagaacacaaacaaacaaaaaaataaaaactgaaacaaacaaaatatgacaggataaatgaagaagttagcattgggaaagtagtaactatcaaatatctagtcctgcagagatgaagataaagaagtagacctgtgggatcatgtagatattgattaatgaagagagttaggacatttgcatgggaggtattttgtgtttttaccaccccttttccccactataccataaactgcttaaagacaggacctgtgccttggctaccgttgcatgatacttctggaattatccttccatagacatgtccaaaagaaaaaaagaagttgaattaaagttaatatgtactggtcgggcatggcggctcgcacctgtaatcccagcactttgggaggcccaggctggtggatcacctgaggtcaggagttcaagaccagcctgaccaacatggagaaaccctgtttgtattaaaaatacaaaattagctggtcgtggtggcacatgcttgtaatcccagctacgcgggaggctgagacaggagaatcgcttgaacccgggaggtggaggttgcagtgagtgagatcatgccattgcactccagcctgggcaacgagagcgaaactccatctcaaaaaaatatatatataaatatatatatgtagtaagtaagggcccaatgttgctgatacagatttaacagaattgagacaactcagaaaactggagaccagaaaatggaattaagaacacacttgagaacttctttctcaggtcaccaagtccattgtaacatcattatcagaggccggggcatagtggcatcccttgatatcagtcttaaagaatttctaatcaccttatgcttctatttttcaggacttttttttttttttttttacaaaattttcagaacgtaccatgagtgtgacatttctgtgtaatagcttttgctgtcttttcttgagtgatataatactgattcattaaattagttttgtcctctagtatgacttttatattttattttatactatgcaattatttgaccattttacttacttaaaattaaaagaatatgtgactaactacatttatggtgagatctaataatttataacatttcctggtcatcatacaaaattattttgtgattttaagattcttgacattgtaacagtactatcagttgtcagtaatactatgtaagtaggtgtgcttcaaaacataaatcacggaaatagaatctgaatgagaaataaattcaaattgtatagtaaaaggactaattccagtccatttgatgtttgcatagcaccacagaaatgtcacgtcactgatgtctaccacagctagtgcaccatccaaggaaagaaatgcttccaaatatgttgtatgcaaagtcatactaataatgatttgtcaggaagatatcacttttaatgttgtttttaacctaaagaaatgaaaccaccaatgtcacataaatttattatttctttgtgttcatttttgctttataggagttatgtataagcactatatcgataaaaagtcttccagttcaagataatctaaacaattgctacaaaataatttccaagtaaaaaatgcaactcccatttaatcactcatatgtatatttgtttcatggaaaatctctactaatgtccattttttgacatgtgtatgcactccccattgtcctggaacattaaatagaatgtatgtaaatgtggtatgtgacaagagcaggctacctggctgattacagagtggcctctgggtggtatctgtaaactgctttctagatccataaaacacaattttatcacggcctcagaattgtacagagccaagcatgataaccaagtctcgacaatattacaagatcctaatgtcaaactgtaacaacggtttattgaacttagaacaggagaatatcccattcagtagataagaaagtctctgcctcctcttcaaagcaataccctttctttaaggagagccaaggaaaatcagagtagctcttaaaatgttgcctaaagaggaggatggaatcagaggaggagtttctttctttctttctttcttttttttttttgagacagagtcttgctctgtcgccaggctggagtgcagtggcctgatctcggctcactgcaacctccgcttcctgggttcaggcaattctcctgcctcaggctcccaagtagctgggactacaggcgcatgctaccacacccagctaatttttgtatttttagtagagacagggtttcaccgtgttagccaggatggtctcgatcccctgacctcgtgatctgcctgccttggcctcccaaagtgctgggagtacaggtgtgagccactgcacctggccaggagtttcttaatccacacactgaggcctgatgaggcttgcagaaacaaaactatctttgaggtcatctgaaaaacacattgcttttgctccctagattcagtgcttctttcagtgtccgctactaaccacaatcttgtgtctctaacttacgcttgttgttattgtttgtttgttttctcttgtctttagggtcatctattaaggattttgcatattctttcttaaaatatataaaggatttttttcaataatagctttaggcctgcttatataaccacacttcatttctctccttgcttctggtccattctataaagtgtctttccactctctaaacattcaccaactatctatcaattttttagttgtttacttggtagttacctgctgttactcttgtgtaggtggtatctgacactcacaactgtgtgcataagaaacaattccagatttatgtgtaatttcaaaaatcattaattaaatgctcataattctcaggtaattctcacctaaaacaagctcaatctttaattatatgaatactcgaggaaatggagttttagggcccagtccttacgatttcccttcactgtgggtgaagcaatctaaccatacataatctttcaataggtaactgcaaacaacgtgttcacacggaaccatattttatcagtttttccccgtaagcttactgccctttattcagtgtgatcaattgtattcagccttcactagctctttgagaattcaattttgagaggcatttctagtttcctggacaacattggtccatctctttctcccagaataatgaagatctaaaatctaattcttgcctatttcagccccaaacttttcatcctcttttgtgaaatcaagccagtatgctttttctttcgctgcctacgtctgagtattatctatgtccccgggatcaagtagctatcaaattagttctgtcaattgctcatgggtttagagatccctgtgtgtgtgttttttaagtaaccacattttattttagaacacaaagtacaggacttctgacttgattatttagcttcttaaactttttctgaagttttttgaaaatagcagagaaaatacattattactcttctttaccttaatgaaaattctcagttcctctgtcatttcatttttgaaggagaattagaggactcttccacaaattgactctcgggcttcatattttctttatttctccattctaataatctattcctttgcctttcctaaactcaccatctcatgcacagtttcttctttataataccttatctatgaccttttggagattaaataattcagtttctctaccaaaagtcattatatttgagtcatttttgactatcaagtttctcttttcctttgggataccttctggaagagtctatttaatattttcagttttaaaaagtccttcttaaatataacaattctactgtattgtaatgtatcatataacatgtacatttgcaaagaattggagccagatatcttgggttctagttcaagctccatcacatttccagaaagagaacctgggtcaattcatgtattatctccttcacttacacaatgggaacaataattatgataataactgccctatcttcctcaaaggtttatgtgcagttggacatatattttttggaagttagcattaataaaagatgctaaagtattactgaagtattactttactatattcagttatttatagatacattattactgaagtattgctgaagtattactttactatatttagtgaagtatttagtatatttagttatttatagaagtattgaattctgaagtattactttactatattgagttatttatagataccttaaaattgctgataactagttctacaacaatctttttccacattaaatcagacttgcaatgttcataatatttattaaatgcatgattattttcttacctccagaaatgtttactggcctcatatttagctgtaaaggtaagtagtttcttggcaccttttgaattcgctattggtttccaattctctagactaagagtacatgggtctctaactaccatgaacaagttccagtatttataacaaatataattctatgaaactatagaaaaagaaaacatgaatagtatcacatctgttttctacaagctaaatggctctgtctttaagaaacctgcatatattttcctggatttattgctaaggaataataaatgacagaaaccagtaactcacagagatattaatcaagtaattactaaagatcattcagtgagcagtggcagaatagttccaaaaaggctgagattacagacaaccgtcaaatattcagagcagtgagcaaaaccttgtaaagattatcaccgatcacagagtgtggatagaatctgccaattaggcaccaattcctagcccttattcacgtctccatttaaactgctaattatgccaaataaatttataaatgtagaaatcaacttttatgggctatttgagataattttctgagcacagtgcaaaacaccccaattgcaatacaattggagcacaaaaggcttcatgaagtaatctaaaggcaccacgtcatcacagtgtcagagataaataaattataattatattggtattcactccctcttataaatacacataaaatgaaagaagcactaaaaaagaacaacgtgaagtggataacctatccatcaaaaatatttactagaatgataaaatagtatccttattaaacatacaaaaagaaaagataaatagagcaaggaataattgaattagtaaattaattattttatagtatattggtgtctacctgagggttctacataatcatttgctttacagtatcactcaaagcaaggtaatatcgacattttacagatgatgaaggtgagaagaagatatggaaagttgtagttaatacctgaaaactcttagtgtttaatacatggtagcttttattatttattatttgccactattaactccaaagggctatatttgagttattgcattcaaagcttatgaaaacctattgtagccattataattatttatattttaaaaactaatttaagtagaaaaacatttagtttttgtttgatatttaatagaagcactgatttattgcgtagttttaagcaaatcccttagccttttattgtctcattgtttaaggccggcaataaactttgctctgcctatctttcaggtaatttctctttctatctgtgtattataaaccacaatgcattttttttttgttttttgcataaagcaatatttatgttatcatcaagaaccactgtaaattgtagctttgatgttggtacctggtattataactcagacggtcaaatatttacttcacaaaaattgggaagagactaatagattttggtgggaggtgcttttatttgcttgtttgtttcagaataacagaataataactcagtatcatgagccaattaaagaaatatacccaaaataaggtaagaagaatcaataccagatgctttatttatggttcaacttgatagttatatcgcttttgactgtaattcattggcagttcattcagaacacacacacacacagacatacacacacctgcattgtatccttctaccaaggtagggaggatgcttaactcaatgggaagaggcataagaaaatattgcattaagagcctgattctggagttggtcccatgactcccaaagattgtggaaacaaagcaattaacttttttaattatgcaaaccattcagtaaagtaagcagtaaaatatattaaataatttatttaatacttctaatattctcagtaatgttggaaatttccaaataagcaaaaaaactttagctaaatgtgtaaactcagatttttccttcaaatttttctctctgctgaatataggaaaatatttccatatccatatcactgctttcaaaactgctagataatccattttaaataataagatttttataatatgtgattcaattagaaaatatcttagctattttgagtcttggtcacaaatatttttaactgcaacacaagtcacaacctttcctcctgcctccctagggaatatttattttaattatgcctgccaattgatctaaattattgaacttgctcaaacttgcttaagaattagaagcttccttggatacagtaacaaattaaaataaaatggaaaataattttgaaattaccagcatgacagaaataaaagggaatttatattatgcacactaacacattttcaagtttccttgttctcaagcatatctcattaaatctttttatgttcaggagaggatatgccttacaaaagtggatcaatgactcagctggagctagcatttaaaatattgtaaatttcctattctaatataagggtattatgggatttttatttgacatatggaatcatgtcatctatttaggaacacacatgcagaaaagatgcatatttcaaagtagaattaagtaaaaatatctgtttccaccgagaagatggcgtgtgtagtttgctaataattgacctcgtcattaagcaactttcagccctcatctgccaattctgctcctttgtaattatcatatatattttacaatcagtggtaaggctttcatttccttcctaagaataaggtagggcatttctgaagtggttaggacaattctcttgtagcaataggggaaaaaaagaacaaaaaatgtaatatagctacatggagagatgtatgcctctgagctcttttcattttagcagcttgagaaatattgctccacattattgctcagacacacattctttctaaacgaagtttactgccattgattcccaagagctaaaggattcattttaatatttttgtacttcatttagctagtctccttattgattggactttatgaactatctacttgtacgtgatatgcatttctaaacaaattttaggacaaatatttcctggatcaacatgtagagaatttgacttccaagttaatgtatatttgggatactcattctgaaatttatgagcaaactttaggatgaactggcactgctcactggggaaaaacatacacacacacacacacacacacacgcacacactcacacacaccagccttgataggctaggccaagcaggtttgagacacctcttggaaatattttgagtaataaattatcctttccaaaagattttattttggacatgttctattaaattaaaatcaattgtttcatacattacaaacttgacagtctcttaatatattgagatatttttatattgtaaaatcaagtaatatttttataatacagtaagctttaataaatggccagtataaaatttgtaacatatgtgccttaaaatttgggttattttcttttattactcaacatgccaacctgaaatttaatgtaatcttttaagtaaaatactgacagagaaaccctgtaaggtgaacttaagattttagtttcctaattgccttctaatgcctttttcccctccagagcaaagtgtgtccttatatttttgtaatactgaggtaaaaatatacaaatatattttagagtatttcaaaatactgctttaaggctatttcagtggactgctcaagtacttcatcatttctaaatgtcctttacacctaaagctctaattttccatacaagggatattgttttttaatgcaagcctgaaaatccctgggagcacttaggcctgccactgccaatgcacaacaacaggtctcaacaagaaaccccaagccctgggactggtgctgacagttggtattttaagtttctgttgaaaacttatgataatccaatgtaaatgtgcctgttatttataataaccatttcagtattgtggtatattaggcttttcatgcactttctctcagcactggaatccagccataattctgtccttggcttctgtattgcttgctataataaagtccttgtgatactactggtaataaactttcatggatgcaatccaagatagaccctactgataactgaattctctttcatagtgaattgtattgttgtgagactccagcatagttactttcttttagagctaagggttttacgttgaaatagtatttatttatttatttatatcattgaacagtctcactgccatgactaagaaaattgctccataaaatacttggtaatgtaaatgtgagaatgaaagttatatatctgatgatttgtcaaatttatggcttgtaccaacacaactgtctctataaaggaatttaatacgcacattggagaatattcctgtaatgcctagtaaaattgaatgctgttatgctatgagatctcaaaagcaggaatcactctagaattatgcctttgacatttctaatcatgcatggcctggctttacgagtctaaatttgatgtaggaaaacttaaaataagcatttattacagaagtacctgccctcccacagaggatagcattccatgtacagggcctgcttttgatgtatttctttacctgtttcttttattggcaagaaatggaagagtcgattaaaggtaggaagtttaactggattcacattagaggaaaaacaggtcaaagttgatgagcacgtgcctgaaatctaagatcaatgattaccccagattgaagagtaatgatgtggtaggcaaaaaaacaaacaaacaaaaaaaaaacctcagggttatactaatagcctgaaaatgcattaacatattgaaatatgtttagcctctttctttgtcttccaagaattaggttttaaaaagtattggtccccattttaaagagtagattgctttttttgtcttgaatttaaaaaaaattatcacactttctgaactgattttgattgaaattctattgacaaattcagtgtatttggtcagtgaaatttaaattttataaaatggtaattttagaattctttttataataaacttccattgattgatatatgttcattgatatttgaaaaatcccaacattatagccacttaatattttatataattatatttttgcaaaccaaaataatacactagcatagtacaaaaatattttttgtgcattatgtataaatagagtacactaagacaaagatttagtttcttcttatacagtattcttaaaataaacttagccatcatttttacaatgaaattcttgtggcatatggcttattctcaagtttaccctcccttcaaccaggaaatgtattacttaactgagacataaaagagcatagatggtaggggagagaaggaacaggtcctttacgtataatagcaggctcttatgctgtttattaagtttgatgatagttaaccaattcaggcagctgattgaaataagaagaaatcagcaattttgtagaagtgtgaaaacatgtgcacatgtacctcgctcctgcagttttatcttctgtcagatttctcaagagtataccatattttttttcggcttgaaataaaacattgagaatatatacatacataatgaaatgagatatatgctttgagggaatagcactgcccaaagttaacagatagttcgtgtgatttaaatgattgtatttggaagggtattctcatgtataaactgaattccaacttagagcactgcttatctttttagttgtacatgaatgtggtgagcagaaaataattttaaaaaaattttagtaagtgtctgggatgctttattgtcaaagaacaacttgtattttaaaaataaattaaaatacattaactaagaacagtgtgcaaagtatttcaagtagatagggtgaacagactgttttacttttcttccattctacatgtctgtgaataaccattccttgaagtttaagattataaataacagtgcaaaatggtgttatttctactttacgagggaaatcatccattttgttttcattttcatttgggtaaactcaaaatggttttgtatagcttccgctaatcttattcaagactgaagcgtttttgacaaaagaatgtttcccaattttgagtagattattacatttatgtggctaaattgactcagaattgacaactgttgtttgacttggcaaagttagaatacagtagttgatagtaagaggagggaggtaacaagttgtaaaaacaagaaatttcaaagaagaacctataagcaaattgtgctttagtagtgaatggttgaataagggtattttattttattctactgtttaaagtggaaatatagaaattctcactctgtgttgattactccacaacctgccctcccatacctggacatatacatgagaccaaaaaatgaggtaaaatttactatctaatactaagtttagctattcagacagtcctttgtaaatcctagatatgtgtgctaggtggagttagaaacctgtctaggtggatataacctttgctctcagtatttacaaggtcaggatgtgagaagttataaaataaagagcttggtttaagttttaagatatgtaatttttaaaacaaaattcttttgaaaataatttatagaattatttgtaacacattgggtgaggtggaggcctgtatttatttatttatttaatatcctaccttactagactttatgctacttgatgacatgagtttggagaccatgttttcttgtttaccataatatatccagcgaaactaggacagggtcttgcatatagtagagtctcaataaatttttgaattaattaatgaataaatgaatattcgaatcaaggatctactcacaatttccattattacacatgctttaatattttatttattttttgcttgctcttcttataacttaatctacattgaattgtgttagtaaagaaattagtcaaaattattgattagtataaaacatactgtataaaaaagaaattcaatttgcgaatcctaaattctttatagagccttgatgaagtgtgctttatatttcaaaatcatgcttctctacaaggtataaatttttaccttcagtgtcctaattggcagaactaaggtacatcagtggaaaatctttattttgtagttgagaaattgtttttctaaatgttctatccctcaaggatctgaggacctcaaagacttgaagatcaaagatggcatgatgatggtgcattcctagcatggagaaaagtcctaacattctctgtgtactttgcccttaaaaaaattattttctagataagttggtattgattagtaaactttatgagtaacccaggttaagaacatcacaattgcaaatttgaattcttactacattggtgatacacgttgaagtatgtatttatttacatattcattcattaatttacttattactaaaatattgttgaaatctaatttcaaagacagctgcaagattcaggtatagacaacctacctaagcaatggaagaggtaggttaaatttctgtcttgagtaagtgttttttttttttttcctgactatgctactctttacacatttcattctatttttatgaatatcctggaatactttttgaaaattacagtttgtttttcctttttccctgggagaacatagggtgacactgggtggaaatcaagatttgctatgggtttgcaaaaacctgcataagaaataattctctgagtttccaaggtagtttattggatattatcatatttctatttttaaatcactttcattcatcttgaacctccatatcaattctgcttcattgctgcccttttcacccttgtttataacttcagttataaacttcagtcctctcttcaccacctcactgcaccctaagctctcagcatgataaccaattcactctctttaaatatgcaacaaaatcaatatattactggtgtgctaattaactgtcacgtgaaaatactttgcatatttcatctcacttaattctcactgcatttttattatgtaggttttattatttcaccagtgagcaaactaaggattacagtatttaagtgacttgcttaaagtcatgcagccagtgagtggctgaaatgcagtttgaacaaaatctgtcaaaacaaaacaaaaccaaaccatgttcttcccattacatcatgctatatctagccatgcctttctttcatcagagtggtcttaacctctttcgcctgcatctcttcactgctggccaactcttcctttaaaccaaacttgtccaactcgtggcccaggatgactttgagtgtggtccaaaacacatttgtaaactttcttaaaacattatgagatttttttttgctgtttttttttttttagctcatcagctatcattactgttagtgtattttatgtgtggcccaagacaattttttttccagtgtggcccagggaagccaaaagattggacacctctgctttaaactttactgcaagtttggtctcttttgtggaactgttgctcaccacctcttccatagctctttgcataacacatcttggtactagcatatgtcatattagggtcttaaaaatttatgtatcactcttcttgctccagtgtggcctccgtgagggcaggattattattttttttattccactcaatattgaaggagcttaagctggcagttcttaaagccaagtgatctcaaaactccaggactcaaaatcatttcctgacaatattaggatatcatttgctctttcaattctcattctcataagtgcacaaaagaattttcctgaggctacatgctctgtgtcagtgcaacagattgaattcagagcggataggataatccagatatcctctagtaagataatcattcaagagatgtgcaaaagtgtcaaataatgtcattcttctcactttttttaaatatagtaattttctattaaaatatattatttttgtcagcatataatgaatttattgtgactattttcaaacatatatataactaattattttaaaagtgtttttattttaatgttgaatatgatgaatatcagcagatataccccacataagcaaaagctctttagggtcctctataatttttaaagtgtaaaggaggcttgaaaaccaaacacataggaccactgactaaattaacctctggcacccattaaatatttgattgacaaaactgaataatcaaactaataaaccaatccagtgggggagactgtaaatgttctagtgaggacttaggttttccgttattttacaaacttattctaacaaacaactgtaagtcaggaagataatgagcaaaactcattgcacatatattagttagaataaaagtaaacttagaatattcattatgtccattgtgtaaaatcatgtattaattaaaattaaattgtaagcaaatattactcaatacaatagtcaacagttaactaggtatccaggtaggttattagcttttataaaggacatagtgggttatgctattgtggttatacattgtgagatttttagggagcaggcttgtgaaatttagaaatttgaaatcaattaagcaaaatattatacatttgccgatagtgttttacaatgtttttaatgcaactaaatcttgaaattttaataaagttgtcacctaagaaaaatatatctcagctccagttatggaaagcaacattctaattgtcatgaaaattaaattaacttttaaaaagaagcatgtcatattaaataagattaatgagcatcttcagttagaaggaaaaataaaataatattttatgtatttactctagatttaagaaattttaaacatatgctactattaatacagcatacttcaacttttcatatatgtgtgtgcatgtatattatctcaaatccaattgtaatataattcagtagcttagatttacacctaatttttaaatattactcacaaatttcttcattgtataattgcttattaaagctggtaattttaaacacttttaaaatttaaaattttactcagttgatttttactgccattaagctatgcaacttattcttttaaatctcaggaatactagaaacactattaatgcctaataaatgagctgtatatagaattcataattattcttttaactcatttataattcttactaattttcaaaaaatgcttcaggtcatgcctacacaacgctttttttttaaacaagtattctctatttattttttttaatgtggtctcatttatgtcctgactgataagctcacccagggtttacatgattatgcactttgtaatttgaaaatactgtttgttcttcactttaaaaggaaatcaggcactagcatatctgcagtttcctgattcctgtgaaaacatgtgacattcctcctttgcaaaggtttccagattccttctctccgtgttgccaatcctgccgccacccaaggctgatcttaattccatcgggccacagttagtgccaacaatcaaggtgacctctccacactccagccctgcctataacattatggacattatgattattaaaatgccctttttgacgattattcagccactactagcaagaaaatctgaaatgtctctgcctaaagcatggcctcccctgaggaatatgctagactatctatggttgcagaagccctgagtataaccatgacagactgtgggaaagttcgagagtcagacccagaatgaaaatctctgatttttccaattgtaagagaaaatttacttttaagacagaccttactgataggataaggaaaacaatactgtcatcaggaatatttatgcagcaggggaataatctcttctcctgtatccttacaccagacacaccaggttttgacaaatgtttaataacgtaagcagagaacaggggtcccactgcctaactaaactccctgtaatatattaacatattgcatattaatgtttaatatgtctctcctacctatcaaggatgtgttctgttgtttttctcaacatctattgttttttccaccacaaaatccaccctgtttgaacaaacttcgctgactctccagctctcacccacctccctcccaccacactgccttaggatgttttaacttccctttccataaacttttttttttcttttctgcagcaactctttttttgctgccattcttttatacacatcctatccagtctgtgaaaagcagtctctctcttgtgaataacatttactcctcttgtatctttgattttaatccccaattacctcagtatttaacgccttatctcttttgtgtgtgtgtgtgtgtgtgtgtgtgtgtgtgtgtgtgacagagtcctgctctgtcacccaggctggagtgcagtggcacgatcttggctcactgcaacctccacctcctgtgttcaagcatttctctcctgcctcagcctcccaagtagctgggattacaggcgcccaccaccatgcttggataatttttttgtgcttttagtagggatggggttttcccatgttagccagactgttctcaaactcctgacctcaggtgatctgcccacctcggcctcccaaattgctgggattacaggcgtgagccactgcgcccagccttaccccttattcttttatcccagctaaagaactcattccttgaggacatgaaccaatgccttctctgcttacagttgcacatggtctctgggcttattttactaagtcccacagccttgtgttatcagcctcttaatatctgtacttctaccatgatcatacatttttccaagaatggaaactagaagaagccgactctagagtggtcagaccaatagtgttttccatgcgattcatattgtttcattgctgtgacagatgattcctgtcgttttgggaaaaaaaacttattacaaactctttatcgtcagtgcacttaataataaccacaaactgtctctccatctactacttatttttataaatcatagggatcattttccctttgttattgttaccaggtgaaaatctaactcatatcgttgtccataccaaatgcctcatggggatgagggatgcttttattatcctggtctctacctttcaaatacatcaaatgtatatttccttcacccagaaattgcagttctctactctatcaattcttgtattttatttcatttcttaattgtcatataataatttatagtgtacctagcgatgattcaatgcatatagtatatagtaatcacatcagagtaattagcatatgtccatcatctcaaacatttatcatttctttgtgttgggaacattcagtgtccttcttctagctatgtgaaactatataatataatagtgctatctgtagtcattctgcagtggtagagaacactagaacctatttctttcctcctatctaactataattctgcatcctttaacaaattttttcctatcccctcctctgcctacccttcccaacctctagtatcctctgttctactttttacttccatgatttcaactttttttagcttctacatgtgagtgagaacatgcggtgtttaactttctattcctggtttattagacgctttaagattccagcttcattttttggagttatccttctatgttgttttggttatttataaactctgctatttatgaaatcattttatattgcttattacatcttaataaattatcagtgtttttctgtgttttctgtgtatatatttactttttatagtttctcataagtatacttttcattacttttaatctctcccagtgcactgctaattcattatcccataataatctacccttcttaaagccaaaggaagaattttctatacataaaagtcttagcatattagcaactcatatgcaaaaaaaaaaaaaagctatatttcatgctagatgcaagatctggccacaaattaagagcatgtggattctcctcctttttggtttttggcttatgagattcccacatttgcttcttccaaagacaaaattctgatcccaaaataatcactgaggaatatttaaatgtacaaaaaattaggtttaattttttcaactttattttactgaaatgcagaggttttaactttgaaggggaattcaaactttaaaatattacatgcaatatcaattaatgttttaagttaaatacaaaattatagaaatttatagaatcccaagcaatggtgcaaaaagtatatgctcaataatatcagtttaaaattaagtttgctactttgagttgtttcttttacatcagagggcctagatgctacatatgccttcagaattctttgatgttaatctcttatgacaaccaattagtttccaaatttctcaactcaagggctgactaatactattgcctaagccttaggtgggtcatgttattttaactagatacgatggctaatcataaggagtgtgtcaaagaccagaggagttgaaaactgggaaatttggagacaccctgtctaaacaggattaaggctaaacgaaaagaattattgttttccaaaccctaatgatccttgtgatagctgctttcccaaacattgggattaaaggttagattcacatttagaaacaagaatgcaaacacgtattcatgaatagccctgtctttagagaaaaattcatcaatgtcctagcccttgtgtatctaatacactaagaaacatatttgtgtatgaagtcacacacaggaaaattaattctctcctatatttcatttttttacattacttttcttcataaaatacacatctatttttgcaagtttatcttcactgtgtataaaagcttttctaaagaaacagtttaagagaaacattttttatatatgatttgcatttaaatataaacatacaaagttaaatatttcttttaaaataaattctaagagaaaaaaattgtaccagtgtttgttttgcagtggtagtattgcagaggttattaaaacaactaatctttattaaaattcaaataatttactgccatcaactgtttggtatacaatttaatttatttttataaaattctgtgcatttatactttttgaaagtatacatagtccagattaaaccatgtccacaaaaatataattaaaacatgaacattttaaaaacttttattagtttgacctcctccagtatatagggattctgttaaattaattttttttattaagttaataagttgaagttgttttcatgtcaaaattacatgtccttaggaggacatgaaaaggaaggtgcattgtgagacagttatataacagctaggtagagacagaatgagatgataatcctactgtatgttagaaagaaaatacatatctatttggtattagagtcatcttatagtttttttctgttgtaaaaaaaagttatgcccatatgtgaaggtcctgcctagttaaaaaatgaggataaaatggtggctcattttgtagcagccaactgggtccctggatttggagaatcatagttgaaagactgttcaaattaacacatttcaaaatactaatttgtttagattgtctttgaaatttatatagattctttttttaaagaaagcaaacaaactcagggtttttggaaattgttttattggcgaggtctatggatggacaccattgtataggggctgctgattttccctttacatatttccccatctcccttccccaggtgttgctgccatcactacctttcccttcctcccctttcctcatggcaagacgcatggaagaagagtgctgttaaggcctctccattaatcaacaggtatggtggttctcatgaaacagtgtagctgcccctcttctgcattctccattaatagtctgtctcttacatttacaaggtgcattcattcactacacagagccttctatatggaagaattgttcaacttgagtttatatgtttcaccgtgttatgtattacctaaatccctatacagtggtagatttttctcaatgtatagagtttagaagaattaatgatattattctcagggaaagttgctatgcagtttcctcaacaaaatatgtataaaataaatggaacttgtatgtatgaatatgccactttcaacattctacaaacaatcgttatataacacatctttgaaagtataaaacaggaatatttctgtgaattttatttcaaaatttaatagcatttgcatcttcaaaagcattgcacaaaattttatgcacataattataatactcatctggttatagaaaattaggtataagctagtttaataaatctaaataccctacaaagctatgccattcagatgtgaaagctgaatgcatgctaattactttctgcaactttctttcgtcaactcagctggtggcatttgagggagacagaggggactagggactgtttgttcagtccaagatatccttcattcagggtgctatattttgaaaggagctaggccctcagggctcaaactccagcagagtcataacctataaaacatgaacactcagtcatcaccaggaagcacccgccttcttgacttcttttttcactagtgaaacgagtcctcccagctcctgcaggggcttgttttgatgtatcaggctttgcttatagtcttgtgactctctcaggttctttgagacacatgactaaaatgctacctttgggctaggaagattcctggcagatgacttagaaaaatagtgtgtctatgggtgtgtatgtgtatagcagcattatttgtagtattctttaaaacggtagcagaattaagacttgtctgtgtacataaacaaagcaaaccatttcaatttacatacattttcaccgaacattaaaagatcatattccatttttctactgtatttgaatgcattggaatacgggagaaattgaaaagggaatggatgttagtctggaccattaatcttcatttagaaatgtatggctttctattagataaagctctgatcattgagtatctttcatgatctcacttctacccatattccttgcctttatattttgttttaaccttgagcacacactgcactctgtgctctgcatctttcccagagggtgcaatctttcatgtccacaggtcttcgcacggttaggtccctccgtctggaaggcactttactcatggctgtttggaaaattcacatacaaaaaataataacagcaaccatgtactgaggatttattttgtatgggcacaatgttaatgagtttcacttccattttcttgattcatccacacaaagaaacaatgagttagaaattattattcattttatgtaataggtaagaaaactgagaggtggcgaagttgagaggggacaagatcactcaggattgactcaagtgggacatgccttatacagcttctcctcatttctccccaggaaagcagtactctcgttcatgctcacctcttgagttactagagggcaatgattccaccttatgttttatgagctcttcaatgtccacagtatttgttactcactaaatgttgattaaatgaatgaatgttcacaaaacagccttttgtcttcttctcctgaacatgggcccttcccttcacccatacttctctctattctgtttttattccctacttagcttgttgctcttggccattattagcttcatagactactcaatatattttctataagaaataatttattacttttcctaaaataatttaggacctgtaactacaaactgaatcaatataaaataatttcatccccagaaaaggaaattggtaattcaaatcctgtaacatttatcaaatctaatggcaggaaaggaagcacagaaacacttgtaactcacacagaaagaagaaaatttaaccaaatttttttaaagatttgaggaaaggaaattatgaaaattatacatgggattataggaaaataaagaggctatgcttgaataggaaaacagttgtatcaatttaccactaaaggaaaacagtggataagtaaaaagacagataggaaaagaggccaaattaaggagaaaaaaaaaatctttgagaaaaaagaagcaaaataattttggaaaggtgaattaggagtaacaaaatgaaggaaacatgtcattaaaaaccacagacactgaaaggatgttaaaagaatatgaattaaattgggagggaaaaaatcaatgcaggtagagaaaaagaagtttatttaagagtttgtgtttccttattcttagaaaagcctttgaggtaaaatgactgagaagaaaaagggtaatttaagatgcattgatttgtgtacactgtatgtttttaggactttttctgtgacaacagtttttttgagagcaagatacgggcttatgcattaatttggagctatgcatttagaactaaaatagttgtgcctagagaatacggttgagacagggcttgctgggaaattaggattcaagtccaaatatccctctccaccacattctctaccaagatactcataacactaattaatctgttagttttacacataaaagtatcaccttatatctgtttttctttatgtagagtgcctgaagcgtagaataaatatttgctgaattagtcatgaaattttaagagtggatagagattaatggttaacaaatcccgtcttagattgtgcatgcaccccttaacaccatttataagacttgcttatctccacttgaataattccagggacacaaagtctagaggttgctcctattttgggacatctttaactttccagctttttctagcttcctgtaacttgaatccaattatcccagttttcccttttggaagcacaaaataatttctattttttttaaatgaaagtatttctagacttaaattcagacagacactatgtcataatgtctagatatctaatgtctatctattttcttttttggtttatagccccagtctttctaatttttctatattacttgattgcaaatctttttagtattctggttattttcattttctcatttggtgaaaaatggtcttgcctaaaacaagcaattcagcatgggcttccacagtttatgttcttatatttagtcagcttgaagaaactagcaatttcatttgaacaccttcaaggaaaaaaaaaaagaggtacagattaaagctgcatatggctttgacattaatttgttaaaggtgtggtttgtataggatgcagtatataaataaaataaacatgagtatgtgttaaataattaattttaaaaatagcatttgaagaaagattttcagtctttactttttactttgtaatttaatacatattttagtttgtgttggttgcctgaggtgaatctttgcctaagaagtccattcatcattctaacaaatttcacactacaaaatataatgtccttaagtggataataacattggtggaagtaaaagacaagcacaacaaaacaaaaattattttttcattgcaagtaattgacttgattgactgataatatggtctcatatataacaatatattatattgttacatggagggcaaaacaagattaaaagatgtgtaaagcaagagctgtcagatctgcgctttccctaacataatttattgcaaagtaaattcttcatttatgggaactgttacaaatgccaaattgctgtcaatatcccttggtgaagcctatttatggatagattatggcacactctgcaaggccctgcacatctgactttcagtgagtgtctatgcagaatatatggccttttccagaactaggaaatttaattaattttttggcagagaacactttttatgccacatgcctttttgctgaccctacccaagacttccattttcaaatgtgcttcatatattatgaacctatataatcttaatgaaagtcttccatatggtaattatattgtgtgactttgtacaatattctcaagagttccagtgctgacataaattttttctctgtggtactgaacatttctttgtacattgtatgaatatatgcacctccctctgctttttgacattcagttaccaaagcgataccctttaggtattagattatctataagattcttaggccatattcttaaaacaacagggaacatgtatctgctttgctatcactgctgttgaaggggtatgccatgtgcaacatgacaatttgataccttttactctgtcttttagtgtcatagaaagacgagtgaaaagcaggacacagggattaatcacttaacctctcaagacctcatcaatgccattaaaatgggggatttggactagttcatttttaaagtgaattccaactttctacagaatatggaagactaggaattttataaattgagattttgttctaggtttgccaggaaactatatttaacctccctggagcatggtttcctcagctgcaaaataaggagactgagctaaatcacggatgtaatctttagtgataacatgtgttgacttatttttctttctgaagctatctcttgagaaggattctgagagcttgctttgactgagtggcatggagtgctgtgatcatgtattccattacctctatgtcacaaacttgcatcataaattctgagaatgcttctcattcaaaaagaaaaattttgaatgattattataatttttaaatttctattttttttcttgtttgaggtatacacagatgattcttgtgcttaaaaatgtgtgaatccaggaaattgtttggtgctcttaaggaagacaggttgaggagaggacagcctctttagatacttagaatactttaactcagaagacagatgagggattcaactcattctttgtgcttcttagcagcagattgaaagccaattggataacatggggaaaaaactgactcacataagcataaaatgtattactatagaaaatgctcaataaaggttgatacatagaatagtctgtgttgtgaaatctgcatcagtaaagatgttaaaatttagattgcttgacaatttctcgaggccactatttttatttattttattttattattgtattttattttattttattttatttcattttattttatttcattttattttattttttgagacagagtctcagtctctgtcgcccaggctggagtgcagtgagcagtggcgcaatctcagctcactgcaacctccgcctcatgggttcaagggattctcctgcctcagcctctccagtagctgggattacaggcatttaccaccacacctggctaatttttttatttttagtggagacagggtttcaccatgttgaccaggctggtctcaaactcctgatctcaagtgatcgtcccgccccggcctctcaaagtcctgggattacaggcataagccaccgtgctcggccaaggccattgttaaaggacctcataagatagcaagttagataaaatgaattacaggctggacgcagtggctcacgcctgtaatcccagcactttgggaggccgaggcgggtggatcaagaggtcaggagatcgagaccatcctggctaacacggtgaaaccctgtctctactgaaaatacaaaaacaaacaaaaaaaaaaagcaaaaaaaaaacaattagccaggcaaggtggtgcacgcctgtagtcccagctattagggaggctgaggcaggagaatggcatgaacccaggaggcggagcttgcagtgagccgagatcatgccactgcactccagcctgggcactccagcctgggcaacagagtgagactgcatctcaaaaaaaaaaaaaagtgaattccaatgctaatggtctgttgttctataataactatcagacataataataccaataactttgtacctggatttggtgataaaattatcaaatattttatcggaattgatgatttagaattttaacataagccatctacttgttagccaatgctgtagtgttctagtaaagtgctttatattatcaaagctgcttttttgaaggaaaagttactaattctcatttgtggaattcacttcttctgttatctgtagactacactttgtatcttcattttgaatgctacttctttattgaagtataactgactataataaaagttaaaataaagatcatttgcaaaagtaatttaattattttcaacttaataagatatagaacataaagcattcacatagaatcataaagtattttacctggaagggattatgaaaatttccttttgaaatctcgttaactttttcaaggtcatttagttagtgagacacttgtgatccagattttctgaatctcaattcagagtaaccaaatttactgtagtagtttgctgaaaagtacagatcttggtgagttgaggctttcttttgcatccttggatgcactacttgtcttgaatcagccagatgaaataggaaagcaaacaaaaaattttgtatagaagaaacagaaaaacactaggtagcataggctgctgtgttcctggaggaacgtggaggtcggcatccctttgtaaagcttgacattacaaatattctttgtaatctactaacaactcttgccagaagtaaaaacagtaaaaaacaatatatattccaacttaaaatcagcagctgcgtaatatgagcttatcaccaccatctcatggctctggtcacgagagtttaacaccactagagtttataacaaaagaaacagagcaaattaccgaagatgtccaatcacaaacgttaaccagacttaaccatcattatttaagcttgcctgtccactctaatcaggataacagacatcaattaaataaaaagaattataaacacaagcacattagctgattgtaatggaatattatttatttgacaggggaaaaatgtcttcagacaccagtaggacatattgctcaggattttaattctttgtggtcttagctgagtataatagcaacataagccagtgtgttcaaataatgaagaagatgcaggaaaatattttaaaaacaaccaggaaatgtggatctaattttgaaattgtgacactttggtgaggataagcttggccgaaatgcaagttttactgatctttctctatatttataataggagcaaaaattgacattgggtggggtgattgttttaaaaggtgttttggatcatttattttaaagatttgttccccaataaggcactatactatcaatgacttttcttcttatatctgaactagttctcaaaaggacactgcatatcgaatgtctttaaatacattaaataggctttacattgtaagagtcttttagtatatatccataagaaattttcttccagggaactgaagttctgattttatcatggaaatcaatggaaaaagttactttcggctaacgcattaatttgctttactgctaactctgctgggtcatattaagttagtggataatttccaagtatttttggcctcagtatgagggagacaagaggcactattcaaatcatttgaatatgttttatgacacttgaacttaagaaaattgtcattatgctttagagaccgaaaatatctgctaaactgtgatagacagagggtatttatagaagagaggaaagagtggaaaagatagatcaaaactaggcagaacaaactatatatacatggaaagaatcagtgaggaaggaggttacagttttttaaaaatactcttaacttttagttaattagtaagatagtttgctggtggaatggaaacacaagaaattaagtgtactgaaggaggaaagacaccaagggcccatctgtaatgtctcatatagttaactgggcagataagctcttctttacatttccggaatatatttcgtggatatatgagtggcatgtaatcataacattatatccaatacttatcaaagaaaacataatctattctcatcattgatgttgcctcaatggtgttataagtatactataatagcaaaagaaatacacccttatatatttaaatgataattaataacttaaggtgattcaaataataacattagaaaataaaatatatttcacctaataaaactcttaacaatccacttttagtttttagaataacaatatcataagaaaaaaatcttcacgtatttttggcaaaacattttaaagttttaataatattttaacaaaattaatttaatctggaaattgaagtagtttgcaactgaaataaatgattatggtacataatgtagcattttgtttctttttaagaattttgatatttatctaaattaaccaagaaaaagcaaaccagtcatttcataaataaactattgctattattgaaatagtgaccagaaaaaacaaaatcaaattatcttattataaatttaagattaagtttttaagaaaataaaaagtattatgaacaaataaagcataaaagcattttacttagtagataataccatactttttaagcatagctatatttgctagccctttggtaggggtggaggagccagcttgtcttttcaatagtgtgaggctcaaagcaccagattagcaaaattagatggttctgaaagtttaagaaagtatggaatcatctacaacttggtatagaaatcactagattttccaaagatgttacaattcaagcgttccagggacgctttaatatatgtttgcttttacctgcaattgtatttatgagattcactgatgagaatgactgtttttgaaatttgcttataaattgaggggtgcaaaaaggaacattttagcaattggaaagtctttttttttttttaagccaaacatttattgtaaataagtgcaaaatttcagagtagtttgctctaaggaaatatgtgatttacacagtaccattagcaattaaagttatgaactattttctgggctctcataaagtccaaatatcagagatacatattatcttgtcttgttggatgaattatatctttttagaaaaaaagtacaattaaaaagtataacctcttatcactgagcattttggcaaaagtaaaacatgaactattattattacatattatggattttactttgacatgactatagtttgcacagaagtatgtttcctgcagttgcatgaatataatacttataagtaaaatgtgtaggctactttttcttccagaagcctgatggcattaaatcaattttaaagtgccacgttaggccctgtgaccatgacatctaaggatttagtttataaaataaagtaataaaacttagatacttaaactgcaaatgaagttgccttttatcttagtttacagtactataaatgtgtgccttcatctattttggtaggtagttgttatttatttgtctcttccactttgaattaataattgagagcttccattttatttagcacaagtcctaaatgaaagaggatatatacttaatcaatgagtaagcgtctgggagagccaagcacttacactggattgccatttgttaaattttgatagtctaaccactctgtattctattttctcacctgtgaaattataatacagtaacctacattaggttcccaatggttcatgcagaaattatatagatagttagaaaaggaggggaggaaggaaggaaggaaggaagaaaggaaggagggaaggaaggaaggaaggaaggaaggaaggaaggaaggaagggagggagggagggagggaggaagaaagatttcctactgatttataaaaggatcagtcccccagtgcaatttggagatgctacatccaagtagggagcatggataatgggtgcaatagaatattttgccattaaaataggattatctcttcgagacatgcttttgggaatgaattcgaaaatgagaattggctgtggctaggtcatgtaaggaaacagtgaatcagacatcccagtaaaccaggtagtttatgaatgagcaaaatgctaccctgttttatcacttcctactgcttattgagggtggaattcctttggcatagccatgtttttagaataatcatctagagaactcttacacagtagtcacaataatcatggaaaagatctggggaggaaattataggatatattttatgctaactgttagagaaacaatcacagtgtaaacatcagattaaaaattaagtgagagctattaattctaaaatattagttaaccaaaatattatttaccttcttttgagtctcattttttgtttcaggcttttcctgggtattacagatgcaaatcaattctagctgttaagaaggccttttccatttctcatgagaacctcagtttcattcacctgatgttatgcaatatgagatgagaaaataacactaggactataaaagagaccaaaaataaatctactgagttgaggaaatgtgaaataaaatttagttttaagatgttttatgttttaatctgagtaaactttgttagctctctctctgaatatagaatgtaaaacattggagttgatttcattaaagagtctaggtgactaaaatatgtgaattatgaagaaaagacgttgttgttatttgacctcaaaatgaagatatgtggatttatagatctttaaaagactattttctctctcagcagatcttctcttgccaaatgaatacagtcacttattatttcttttatgggaatgtgtgtaaagtgcttattatattcttaataatactttttaaaattaatgagtttcattaatattatatcttacaaaaatttatttaaagtagcttataaaaatatgttataaaaccttggcacgccgggcacggtggctcatgcctgtaatcccagcactttgggaggccgaggcgggtggatcatgaagtcaggacatcaacaccatcctggctaacacagtgaaatcctgtctctactaaaaatacaaaaaaaaaaaaaatttgccaggtgtggtagcgggtgcctgtagtcccacctactggggaggctaaggcaggagagtggcgtgaacctgggaggtggaggttgcagtgagccgagatcgtgccactgcactccagcctgggcaacagagtgagactccatctcaaaaacaaaaaacaaaaaacaaaaaaaaaccttggcacctagtcatagtttgattataatcaaaacatatctaaatatatcaaaagtatagccctcttttccctgacttcttgtttttattatttaaaaatgcaatattggtgtttgctttctacatatgattattgccaattaatacagacttcatttgcataaaacttttctgtgggtcttctgaactggtaccacctcattgtttttactgccatctttaagctgcaaacagagtcaattcatctcacctgttgtagcaaatatggataaattgtctgcttttgtttgggtcaaacagaatatgcccatagggtggtatttgaaattttgtctcaataacttccaagcttttaattttactaatgctaatctctcccactcatctcttaattacaaagtaatatttttttcattgttggtaatctacttctccctttccttagtcaacacttaaatttatttaatgcacctctttggagcttaataacaagagcaacagactccagttgagcaaaagtgcatttatttatgaatgacttgaattgctcttggaggaaacacactgtttgaattgaattctttcttatctatgaaagaccattaaggtcctaaaacacagatttctgcagttaaataaatgtttaataagcaaatgactctcgaattgatagaagttcaggaaatatgacaaaatgatggcaaaactcctgccattgtaattggggagttattacagagcacatgccaagatgtatcagctagacttgttcaagttggaccgcctatgtaatacttttcctaaatttctaacctttaagttatttaaagcctatgtgtactgtgtatgcatgcaataaagtaagtatgtatgtatgtttctaattgaagtggaaagatggttagttaaaagtgtaattctaggatgggcatggtggcttgtgtttataatcccagcattttggaaaacccaagtgggaggattacttgagcccaggagtttgagaccatcctgggcagcataaggagactccatctctacaaaaaattaaaaatagcaaggtatggtggtgctctgtagtggcagctattctggaggctgaggcaggaagatcacttgagcctgggaggttgaggctgcagtgagccatgatcacgccactgcagcctgggggtcagaatgagacccagtcttaaaaaaaaaaaaaaaaaaaaaaaaaaaaacagtggtaattctatataagtgaagtgttgatacacttgagactacagtaagagccttgacttaatattagtacgtatcttgataactgtccctgttgttctttatttctgctgaagtggcaacatctcaactgggctttcaccaggaaggtaacaagcctgaggaataagtcacattgtcatcagtgttatttgccaatcagaggaagtgtgggaggtaaagttcattacagttgctgttagagtgagaaagacagaagaggtatgccattggtagacaactgaagccatcatatgaaactcaaaccttggctaatagtaactgtaatcaggaagatgtgataagggctgactcacagattcctctggcttttggcctaaatctaatcaatcaaaaagaagccttctaagtataaaataacatgctgtatgttgactaagcatatgttttgaggcttaaaagtcattggagattttatagttcttcctacctttggtaagttgtcttcctgaattatactatcttctcagtgtctgtatacatgcttcctctcactgttggagagccctaaattatgaagttttccaagctctccatgattatttaagaccaagtatatatttgcatcattataatatgatatacttttataaaaatagtggtaattaatttcacctaacaatgagtattcaatactacagaatacctcctttgtgcctgaccctgtgctaaatgttagattgaatttatagaacttaacctgctagttatgttttttctctttttttcttattacaatgcaaatggtgtggctacatatccctgcatttttcatagctcatagagagtaagatggtataggctgtgcattttagaatgtatgatatctgccaaatctgagtggaatgccagaaaggagaaaaagaggaaacagcacaaccaagtgaactacccctttttctcatttccaaaataacttttcaagccgagggaaattttgacatgagttaaagccttccccaactctaagaacaagactgaattcagaagatcactctgagtctgatggctattggcagtctcagaggggccatatttttacatggatgaaccattccgggacaatttctacaatatattaagcacaaacatattatctttctatttcaaacacatatgtcttatcttgctcctttgatgtatcttcaggaaatacatataatttggctttgtaaaaaatattgcattgtctattggcattgaactgtctttatattatcttattccaataatggcatacagcggaacccactgggtgcttcagagttcattttctttgggaaatgtcttattcatagctttagtttgctataggggaagtgatagggtatattaagcttcctcagcagtagtagttttatttatttatttatttatttatttatttttttttgagatgaaatctggctctgtctcccaggctggagtgcagtggcctgatctcggctcactgcaagctctgcctcttgggttcacgacattatcctgcctcagcctcccgagtagctgggactacaggcgtccgccacctcgccccactaattttttgtatttttagtagagacggggtttcaccgtgttagccaggatggtgtcaatctcctgatctcatgatccgcctgcctcggcctcccaaagtgctgggattacaggcgtgagccaccgcacccggcccagtagttttatttatttggggacttactgaattttatttttcatatcgttgcatatgaggagcacaaatggactttttttttttttttaacctccctgagggcagaaatagtagcagcagatgtacagtttcagagctttggacaacagaagtagaagtactagaagtactggcacgtaatagatggaaatgaaattgttctacatccatttccactcattcaggcaattcatgtacaaactaaaaagtcctttcccttttccacattttacaggtgaactacttaggttttgttggtttgttttttgtatgctgttcttaattttggtgaatagagaggtgctttctattccattgactaagattttcttttagagaaagtaagcaatattcagagttattgctgtaagttttgcttgagtgcttacgctttaattcatattttatgccatgctttttcacacaaagcacttatggcatgctctagaatccataagaaatgaatatatgttaattagcttgcattcagttattttacattcagcagctctttatttctgttggtttatattctaatacgatttgcaattctagtgtagtatatttagtacacggtctttaaggtatagtaatttacattttaatcatacattaatttataaagaataataaaatgtgataaatgttttcttctatgtaaatttatgtttacatcctgactcacaactgggagataaagcaatttggatcaagcaaggcatgcagatatatgaattggttaaaaaatctgtagttttataattctagttacataagatgacaatttaaaaattgatggctaattttagagaacaagaaatttattttttccagccttttataaagtacaatgaatcactgttatcaaaacaattttatgttaaatttgtttgactagagtatttatcaagcctccactttttcttcaagcttttccctctatagatcacatgataagatatcaaatcaccttacaccaatcaagcaaagcaaaagattttaacaattctaagcatttatctttcatgagagatgttatctcatgctgttgaatcttccagtgcaaattaggtttctttctcattctatgccatcatttaaagaaataaaaaagagtacaaaacttgtcaactggaaatggtcatgttaaatattttttccttctctgttcttgcatctgtatctttccatcaaaaacaaaataatacctgaagttttatagtatttcaagcagaaaaggtttaaaatattatttttttaaaaaagtagcattttcctatgtgcagaagcagatccagccaagttattatggataatcttcaagcagtatccggacaggatggccattttcatctaaaagtatttctgcagagtgaaaatgcatttttcttttggaattttcaggataattaatcttcagtgcacataagatgatttaggtagataacctggccttgttaaacatgctatgctgtttctgaccatcaacattataactcatcagatttccaaagcaagggctgcttaaatcaaaggattttcattgcggattcttgactgctgctggttagatgtcagagcttggaagttactctccaagtaattgtaaagcactgttctccaatcagcatatattattgcaagcaagaacgacactgtcagaatttctatttaagttataactcagtcatttcaactttgagtcacacatgcttaaatgtctcaactggattaaaagcatgttacattcttttcctatccataattgtgttctggacaaaaatatattcttttgatttttctaattattcattagggatgggtgtcattgttttgtgacaagatttactatccataaagtgtttcatgtcagttttaatgtgttagccccaaattacagagtaatagctcttaaattgcaggaaaaatgtggggtgcctttgggtatgaaagtaaaggaagagaaacacatttttattttggggttttgactgtcatttttttgtttgaggggagtgggatatgaattgagtaagcagggatgtgtttagtttcaagaaaaactgtaaggagggagtcaccaactttagcccaaaggttccatattgtcagttgttgaaacaaaacaggaggcactctatgttgagacttggccttgttgcaaatagggaacaaaactctcctcagaccatgcatcaaattagtgttaaagctgaaatgaaaatgtaacttatcaaaattggtttaaaggacaaaatcctattattcttgtgagagaacataatttagtaagaagagcatcaaaatggaaactgagagtctccattttaatttcttcttaggaaataaattaagcaatgcatcaacttctctatgcctcagtttccttattgcaaaattgtggaattgtgctaaagacttttaacatcttagctagttttaaatttgttttctttctatgtgctggatatttaaaattagtcaatataaataaaatgtggatatttaaagtgaaaataatttaccacaaaaattgtaacttaaaaagttgttttaaatccatataagaattgtggctaagaagaatgatgaattgcaagaaggaaaagcaatgattgacattgcaaaaagaaaaaaaaatcagtcataaacacaattgatttttatccgtttggttatttggtttgtatgaattgtaatgccagactgtattttcaagactaattataaaagagcctaatagctagcaatagatagcttctaaaattgggccaaatagaattttctacatatttagaatcaagcaattctcgtggttgatattattttcttcaatggatagtctgcatacgatgtctttcttactctgctgtctctctttatttaaaattatagtttatacttttgcatgaaaactacatagactctgattggtggcaaacatagacaattgtataaactgaagtgcgctctcaacagtagaaatcactggatcttattaggaaaagcactgggtcctatagaagctcttgggatcctagaagtattcttattttcttctctcgctcccatgaaatttatgttacattcaaactaagcatgttgacctacgtaagccttctgagccaaatgttttgagtagcattttccaaacctcatacaggaatcaaagaatttaagaaatgaggtatccatagtctctgtgtctgaacatttagtacccaatctatagtacacccccaattaagacaaatcattgccaacttttgccctggaattgagtaatgggaactggctgaggtgtatttcatgcatacttctagcagagctgatatcataactcagacaaaaattgatttgtgtgcctcactcttccaagagactaagccttgtgagtagaggaaccagtattcccaactcagtgtcatctactgaaaagtgtctcaatatatttttaaagaatagatgtagttccttgatttcattaaaaatatatccctaaaaactaggtcataaacacaaggacactatgtcgtctccactgttactccttgactttattttgcaaatatttgttgagcagacactgttccaagtactgtttagcttccagtaataaaaacaaaattaaccatatggagtcctcaccctacacaaattcaagatgcagtgagaaggacataaaaattgatcaaagaaaaaaattactctctctctctctctatatatatatatacactatatatatatatacacacactatatatatatacacacactatatatatacacacactatatatatatatatatatatatatatatatatatatatgggatattatgtcagaattaaaaaacaaaagacaagacagctcagccttcaaaccaaggttggagacttcttgagcagagcacatgatcagaatcttctttttaatctaaaatcatccctgaactccatgcttctcatcccttaaccttctaaagacattattgtgcatacttttttgcacaaataactttctaatattttaatcattgaattttgaaagattaattcagttcacttgccagttattttgaatccagctttaataaagaactgcctaacaatttgtagttttcatgtctctgtgtgaacaagaatgtcacctaagttagcacaagtctcattaaatattgaaaaacagaaactggcataggatgctctatagtggcataggatgctctatagtggcataggataactccaggttctgaaccatacatgtgcctgtatacatcttgtttctttaccctgttacaatttttctgtcttctctttctggacaactcattcatacattaacctccacaaacattatcactttctatgaacttatgtaacagcttcaggatcctgcataaaattgtaatcttttcttccccttataacattttgtacgtactctcggtcagagaatatttactgagagcctgttttgtttaaagcactgcaccaggaacaaagagccatttcagctcctgagacagggctgttttaggccggaatgcagaacctagacttactggttatttgcagccaacgtccatcctgaatgttccatgcccttgccgtaccagctagttaaagattttgaatgtcacccctatacaatgcataaagagtccctggacattttcagacatgccattcctgtttctgtccttgaagctgcactgctgcacctgtgtggcaaatttcttgataagaaagaagcttgattttgtctctttttttttttctcaaagctttccaggggaatgtcagttcctgttttgtgaaccttttaggagctaaaggacacactgggaaagcaatataggaaattgctaaaccaaatgaagcaacgtttggttcctataactattcagagaagactagcaatatgaaacaaggattaatgaaagaggttgtccaaatatagaagccatctctttagcctcatctctaaatgtatatgtaacttctaagtcccagagatctaagaatgcttggaagatagttgggaaaagaaagagagagtaagagaggatgagagagagagagacagagagagaaagagaatgcacgcattaaaatttgatctaaacatatgactttaaagtatcttgtatctatgtaaatggaacaaaattcaaagtttttattttctggttttaaataatgatagtagttaaaattacagatgctggagtcagatctcatctatagcatctagaagctgagacactaggcccttaaattatcttactaagcctctctttccatagatagatttcacctaaattaaagaggtaagtattatctgtctaccacttcctgtgtaccagacattgctgcttgaattatgtgttaattaatgtaatcaagacttaacaatctgattgcacatgagaaactgaggcttagagttactcattttgcctcacccaatgtgttatcctggtggtcagaccacagagcctgaaccccaagtactgtgcatactgctgcttcatgtgaattataaatgggtttttattaataacagttctgaaatagacctattgtgctctaggaattttattgtaagttacacaacaaagtgtgacaaagtacaacaaagtgtgacaaagtgatagttttgctttcttcctggcacaaatagtacttcatgtgttgaatgatacctttttttttttttcctgagacggcgtctagctcagtcgcccaggctggagtgcagtggcacgatctcggctcactgcaagctccccctgccgtgttcacgccattctcctgcctcagcctccccagtagctgggaccacaggcacccaccaccacgcctggctaattttttgtatttttagtagagacaggtttcaccatgttaaacagggtggtctcgatctcctgacctagtgatccccccgcctcggcctcccaaagtgctgggattaaaggcataagccaccgctcccggccaaatgataccttttaaatatcagacacttttttctttcctcttaacactttttggaacaccaaaaggaaaaggtttttttttgtttgttttgtttttattacttctaagcaatcaacactcttttacagaatacatcactaattgttaactagattcatcaggcagatgaaggattttgtatattttctgtagctacagagcatatataaaatgtatcattgtagtgcaaagtatgagtccaggttttcagatgcaattctgtgaagtagtgaaagttgcttcatctgtctaagttttatgttcctcatgtgcaaagtgtacagtgagttcatacacaaatgacactttcagctctcagctcaatgattttgcagtttagcaagtaaagtcttaggaaggaatattacgtgcagctcagtaggataattcaggttagccaaatacagaatcatctacttttttaaagttattagatccacatcactggaaatattcaaaagaatttccttgccagaggtcacttagaagttacaactgtgttaagttgaaaggtgaacaacactagctcttaaagaaattgtactgccctgagtttcttaactagcttgtatgaacgaaatgcatatataataagcagtatcttaagaactagcacaggttatattcacatttcttaatctagggggaaaataaaacaaaacaatatctccatgtagactgaaaccaaggctccaattactctgcaaattctggcagcaaagcaataggaaaataaacccaaacacctgctgtgtgtttatgtaaattaagtttaggaaggattatttcgctaaaatgtcccaggtaatgctggctcaataattctggctttattggtaactagcataaatttgatctgtgttttttaaaatgtagtcctcaagccatctgcatcagagtcactctattaaaattgcagatccctgggctgcaaaaacttttgaatcagaattaacccctctctccctgtttaaacaagtattcttgtcagttgttttagaacactttgacaaggatgcacagtaagtgatacattgtaggtaaattgtctacttttgaggatggactagaagtagctacaccaaccatgagcacaccattaaaaaatcattctagtccaggagttcaagaccagtctgagcaacatggcaaaacccagtctcaacaaaatatacaaaaattagccgtgcatggtggcacatgcctgtgggggcaacaactcagaaggctgagatgtgaggatcacctgagcccaggaggtcgaggctgcatgagcggtgattataccactgcactccagcctgggcgacagaatgagactgtctcaaaaaaataaaaataaaataattattaaaaagacgaactgcaaaggtcatctgagcagtaaaatattgagatggctttatttataatttacttaacatttagggagcacctaagaagcctcaggctgtgtgatattaaatggcagtcatatcacttcttcaagatgaaaaggaatttttttataactaaaataattccctctttaattgtcagaattattattatggaaatgatgagtgctccaatttttcttaatctgaacaccagtatttcatttgccattgctaaaatgtgtggactgttatgaaaatttaacatagtgttttttttatatgagtcattcagctggcttctaacatttattttaaaactttgatttttgtgtttttgtgtgcaggatttttttatttcttctaaaggattttccaattctaagtctgtcctacagttaagacaaaggttataaatggtgaaccactgttatctagaaggggccactctgtcatctacaaaaaatagtcgaatgaagtgagccagccctaaaattcagagtcaatttctggtccaggtacactaaacggtcttccagtgagcataagcctcttacaaagagtgaggtaatcaagactattataatgcccaacctatattaatgtaattatccactacaacacaaacaaattatctctaaaactcagttacacttcagagatcttattttgctcataaaatcactgacctcacccacatcgcccacaccctaagcttcatatcatctaacatgacatataaaaatttaggcacaatcacgcctagtccatctcaactgtaccccaccccactctaccacacggagtgtcagactcactggacagcataaactcacatacatttgcaaataaactattttaaaactttagccctcaccacctttcttgccattgtgtttggttctttctagtttaaacagttccattcttatgactgtttcttgaacacttcctagatgaggaataaatattcgatgttactaagagacgtgaagaaatgataaataccttttccaacctttcaaaaggtaacatgatgaggaaataagacatacagtcacaaattcccaaaaaatgtggaaataggattaaattcttaataagtttgcctttaaatggccaagtgtgtaatagagacaaaaatcacatttacaaaagatttctgatatagagatagattatgaaaagacctctagattgaacagattttagataggtgaaagggaggatgaaaggtactacaagacagagtgaagacagaatgagcagagattgagaaatgctgttgcatgcttagggaagacaggggatattggtgtgagagtggagagagtattacctggggagatgagtttacatagatgttttagaatcaaatcatagcaccctttgattgacatacaaaatgtttaactgagtgtaatgagtgattggtgcatttttggaataaaagactaccacattagaattttaggcagattgttttatttacattcgaggaagaagaaaagtaataattgagatgtgaggaaggggacaaaagccaagcattaagattactgaatccattaaaagcagggaggataatgatggtaatagcagcagggaagtggctggaatgaggtaaatacagaataaaactccattggggcaaaatattcctggagtgctgagcaatacatgtcacagtctccaattttttttttattcttacgttagttcagattccactgtatccaatatgtgcttgagagtgaaaattgtattagtttctattgtaatctatctccatttcgcctcgagaaaaattacccaaatggattgagttactttctttcaaaaaagaaaaaaaaaatacaacctgaaatttggtggaagatggtgctgcttgaatttatgtgaatttactttctctcttttagaaaaactaaactttaaaaaatcactagtaaaacagcaatagcaagaaggagtatgcttgagggtgggaagtgtaaattcatgacagatacccttgtcttctagctcaaatcttctctaggaaaaaaaaacacacactcctagatgttttcttatttctcatgccagttatgaattcagttgtcagtagtatccatgaatactactggtgttgcagttctttctttctttctttctttctttttctctttctttctttctctttctctttccctccctttctttctttctctttctttctttctttttctttctttcttcctttcctttcctttcctttcctttcataaatttctgtctttgattactaaatgtatttcttctcatgacctggggaggaaaacaaagcagaacttcctcacaaagacaatacttccccactaaccatgaaaggtttttttttctctctctttttaaatttaggtgtgctttatttcataatcaaatgccagatatttaatgaactaaattggataatagagactttcttccaccacacaagcctctcatttttctagataatgataagaaatagtggaagctgtcatgggacttgactaactagaaactaccagttgtgtgttggctaagtaaaaatattaatcttcccctcaagctaatttctgataattaaccaaaatatccgggagtgccaagatgaattaagcacgtaaggtaatattttataacctcctttggaaaggatatcccttcccactgttctctattcagcccaattcagcagttttaaataagcattcaaaagtgctggagtttcaccctttcaatgaggttttaagagggctgtcttaaaggacatagggtgggcgatgggggcaggggaatgagactaaaggcaagctaagagaaattaatgacaactacaaaagagaaaggccttttatttagttggcttgtatttctctaatagactttctcattctttttagcctaagttaggcacgtagggttacatctttctggaaagaaccattagagcaaggagataaccgtattgtagttctctggcttgtaactgtttccaactgtggagctgccagcagagatttcaggaggagacagtccccctgaggaggagagagacaaagcaatatgttacaaacccatcaaatccatccagtccttccctttcattgtgtgtgtgtgtgtgtgtgtgtgtgtgtgtgtgtgtgtgtgtgtatttgtggtgaatctcctaccaaaaacttaaacccaggaaggtttaaatttcaatgaacattaattgtctgcaaccacctatagtttgttttatgaaaagccatgaaaaatattttcagagaggacacatcactctggaaagttctaaacatgagtaatagtgtatctcaaaaatcatcagaatcatgtttctccttcatgactaatataatacaggcccttccttcacacgagcaaaatcattattgtacaagaatattttactcatacatgctctgtgttttctaaatcctagaaagactaccaaattttcaattttcagcagacacattccagagataatattatctggcccatctgttttatgtttttaagttacttttattttgtaaagcaacatgttagtatttccaattttacttgttacatgtattcactcatctattccttcatttttagcccttgaccatattctatactctgacagcagcttcgaattggtttactttgtgtattacaagcatagtaaaaataaatgcccttggtcctgaaagttcaattatttcaaaatgtatcaatacttactctctatgaatgtttaaagctggcctggtgtcactcccatatccctttgagtgtattaagccaaataagaatgtcaggcttccccaagcacactttggtctctaaccacaacccttaacagcatttccattatgtccttcaatatctttcagctctagtaaatccttgcctgctcaggtgaacatttgtcttactttgaaagaatctgcagccctcataatgtggttgttcctaaatgccatcacttcacaattaggatttccctggttacaaaatgcaaatcaaaacatcagtgggctttagtatctgatacaggcttggtttgtaataactccaggaggttttatatctactttcaatataaaattcttttatttttatttttgtttttttctgagacagagtttcgctcttgttgcccaggggctgcagtgcaatggcgtgatctcggctcaccactaactccacccaccacacctggctaattttgtatttttagtagagatggggtttctccatgttggtcaggctggtcttggactcccaacctctggtgatccgcccacctcagcctcccaaagtgtgggaattacaggcatgagccaccacgccgggccataaaatactttttttttttttttttttgagacggagtctcaccctgtcgcccaggttggagtgcaatggcttgatcttggctcactgaaacccctgcctctggggttcaaatgattctcctgcctcagcctcccaagtaactgggattacaggcgcctgccaccacccccagctaatttttgtatttttagtagagatggggtttcaccatgttgaccaggctggtctcaaattcctgacctcgtgatccgcccacctcggcctcccaaagtgctaggattacaggggtgagccactgcacccggcccataaaattcttaaagaaaagcgagtaaacacaataatatgggaaacacgtttggttgccattgacaaagtcttgttgactatttttatctcattcttgacaggatttagaacaaaattcatggttaaacaagagtaaacaattatgccacctgatttttcaggttaataagtaaaaattgttttatttcattaaaaataatcagcatcttatcaggaaactgggtaattattaaacatttacccagttgtctcataagtaatagcaagtcatttaaatctatgctgtttgtttgtaaatagttgttttcattgaaaatatatggttattttaatacatggatgtattttaatattgaagactttaatccacattaaacataaaagattgataaataagtaggcatttgtcatatcgttctttaaaagccttctatatacaacaggtatgagaaacaatacttagctgaattttcttatttgcaagaattagaactactatctctataggtagccctaggttctattctctgggccacttttacaatagagtggagtcttgccactccattacaattatcattttaataaaaattatacttagaagcccttatccctggtttcctctttttcctgacctattcccccagataatttggcccattgctatctgtggagtgctccagaaaacatcttctaaatgaattggtactaattagcaggatttttgatgtcagaacgagaccaacctcagtcatcaatggaagactttcttctggaggcaaaataagatttttcttcttccttcttccccttttctccttttgcttttcttccttgcctcccatctctaggaggaaatatgacttgtatttcagccaaatttggaatatggtggtacattaaaaattttcaccaagtgcacattttcatgcactagagtgttctcagaaattgtgtacttgaatttcactttggagctcctattattcattttgtcctttcctcttcatagtgtgagtcatggaggttttgtgtaggcctgtggctctttatcactcagcctaagtccccaacttttccccttccctagtcctctgaggatctctggagtgtcatctgatcaagttattttaatgttttaagaattctgaacaattgtattttcccatgttggccattttgaaatgaaaattatttggtattaaaataacgtggtggagagcgttgcgtatatagtgatgcagagatgcatgctccttagcttcgtataaatctaaaacttttcagctggtttttttcttccatactctgaattttctttgatgtttggccatatttcatgagtatcactcaaaagttcatttaaatgttgcagtgaactaaatattatatgtatgccccaattaatagaggaacattctgttaaaaatctgagttcacagaatcctgactcccttatcctaagattacataagaaaacatcttataaacgaatcggtactgattaatatccaggataaatgatttttcagtcctgcctctgcctccagaatgctgggcgtgaccttggagaacaaatcttccctttctgatccttaatttcctcatttgaaaaatcatgattatgtcagtcactaattattttctaaatactatttccacactgaaattccactttaagaattatttaaaccctcaaacaggagaatcttagcatcctgtttaatagcccatatagccttggtatcagaagaaagtaaacatgctttttttaataatatttttatattgagaagtgctgtgatttggtgagaaagtttagatttggttcaaacgtgcatatgtttaaattttcttagctacgtgatctcaggcaagttttaaactttctgagctctgattttataatttgcaagaaaaaaatattggaatgatagtattttaaaagttgttgtgacttttaaaacacctacaccattatcgggcaatatttggcattcaataagtgtttttctctccctaatacaatatacttcttttgttttagtaatatctgtaataaaatacatcaactattaattaatgtactacatgtaagtgactgttgaaaattcaagatatttatttttcctctttgctaaataacaaagacacaattttcactgatgtaaaataaggggattataatgaaaagtccatcttgaagggggcgagataaattaattattatttctggatattaataaaaagttttattattaaacaaaaccacaaagaaaccatgtgtaatatttagaactcttcaagttaataacaattttcattggtgagaaaagattagtgaggcatcagatggctgaatgagtgatccttaaaaaaaaattggggggccgaggcaggcagatcacgaggtcaggagatcgagaccatcctggctaacacagtgaaaccctgtctctacgaaaaatataaaaaatcagctgggcgtggtggtgggtgcccgtagtcccagatgcttgggaggctgaagcaggagaatggcgtgaacccaggaggaggagcttgcagtgagccgaggtggtgccactgcactccagcctgggccagagagtgaaactctgtctcaaaaaaaaaaaaaagaaaaaaaagaaaaaaaaatttggtactacctgaaattgaagctgaagctttgattgataatttatttaatccttttgccaaataaggaaatattaaagatgagaatatacaatgagatgattggtatttacaaatatcaattctgataggctctctcagcagtagaccaaaagtggtttgacttttgcaatataatctgataatagagaacgtattttcttccatgtcataccagaaatttttgcactctcaaacatcactctactgacatgcataatatgacatgcactatcatatgatcttgaatgccagtctttattttattctgtctaatagtgttacttatcgtttcacttagatgttttttgatttccaattaaagtcaaaggccttgaagtcagggactacatcattactgttttgtatctctcccacctggtcacaagcctgcataaaatgaattgtattcttaatttcctattgagcctgatttttcaatagtaaatgcacactccacacactgcttaatattaccaactagcaaatttttgtccacagctatctgatattgtttattgtcctaatcactaatatggcatcccattccccaccctgacactatggtgggacatagcaataaaaaggaatttttgtcacagtgattttaacagtttcaacaactgtaccctaggtgctttccctttgttatactgttagactagcaacgttaacagttttagggaataaggagccttctgatttctttgttgctttatatacaagattaagatgcttcttgctttaagatagagtgcctatattcacttcacgtattacaaatctcatcataaaacaattaggcataaaagtattcaacaggactacagtggagctttctggtaacaaaacacatttttctaaatataagagtaataatttaaagtcacaataatctgaaacatgctacatcattatcaaaactaagatggtacaactaatataaattgttttttttgtgtgtgtgtctgtttcttggtttttatttttttgtttttggttttgtttttgtgaagcacatatttagctattggggaaaaacatgggatttccttccctgattagcaaaatttagtctaggcaatggatactggcagacataaaatgaagctgaacatgagcattaagaattgtttctaactccagtgttcatgttgtattttctccaattgatcctcaagagaagaaaacacaaggctcacaaagaaacatcgagtatcatactcacttaaatatgtataattcattcattgttgagtgagaaaaaaaatcaaaggcctctaatatctacatttgaaacaatttctgtcttttcaaaaattatccaatttttaaacaattgttaaatttttaaaagtgaaatcaattttcgttaatttctgtggactaaatagaaatttctatcacaatttgaatttacctatgaatctctttagttatttatttagtattttttatttttttgagacagaatctcgctctgtcacccaggctgaaatagagtggtgcgatctcagctactgcaacctctgcctcctgggttcaagtgattcttctgcctcagcctccccagtagctgggactacagacgtgtgccaccacgctcagctaatttttgtatttttagtagagatggaagtttcaccatgttggccaggctggtcttgaactcctgaccttgtgatccacccgccttggcctcccaaagtgctgggattaaaggcgtgaggcactgcgcctggcctatttatttatttttaatcatgaacgtttaaaagaaaagtagagctccagtggttgggactaattaacactccccccattcctctgtttccttgttatttgtagattattattgatgccatcatgaactacaaagctcagtgatctatgcgtgaggcattttaaagccaccagaaagtgttgtatcacttgaaggctttattaagtttattgacagtagattattgttgggaaccatatttcatatttggatgccgagatttatgacagatttagttgcaaaggaaatgaatttgatgggtagcacatgaagctttgagctgcatgaaaaaatatcatgatttttcataatattactctctcacattgaactatctggtgccttgcagcccaaggttgaagcaaatattttattagaaatcaaatcaattttagacaataaaaagctcatattctatcagcgaataaaatacaagctcttcaaagaatcctttttaaattaatagaatatatcagtttaggtattataatacagcttccaagaataataaaggattcagttttcactctccttaaccttcctccttaatgtgaagtcttctcatgccagtgtcgatctgatatgaaaatgctttgtgttgtatatcactgattttttctttttaaaaaagtgctactctcatttgtttttgccctctaaaatgatagtcagagttcatatattttacactgtagaatgccattcaccattgttggcagcctatgttctatttctattggtacatgaactccacgttagaacagaattgcaagtaaacagacaggaggaataagttcaagagttctgttgtaccatagatatgactgtagttaataacaatgtatcgtgttcttgaaaatcaccaagaaagtagatttaaagtgttcttaccacacaaaaaacgataattatgtgggataatgtatatgttagttagctcaattgagccattctactatgtgtacgtatttcaaagcatcatgcacatgaaaaatatataatttttgtggatttaaaatttcaattaattttaaaaaggagagaatcacacaggagcagtgtgccaaggggagtgtgaagggaaaaagagaaattaggaggaggcattctctagccccgttgtctttttcatgtgaatttctccttgaggagtcttcacaagcattttcagccagttctctcactttcaacttctctcccagtttctgcttacttctcttcctcatcccacttttcctggctcgtatacttatgccctatttttattctctcaagaaaaccttcaccaccttctctctcataggaggtagaattgtggtaccatccaagcatgttaccaaggtttgacttgttcttccgaacagggctggcatctcccctcagactcctaatttgagaatccttttttatatttcctccttttcaaaataattaacaaaacaactcttaacccattgtgtaatacatatgacctggtgcattatatataaaatgctattatgaaggatgtcagacttttgttgattttttttcccagttactttactgacctcaccacatttaacagtaactgcatccactctttccgttgtatgatctcttctactgtccctcacatatccagaacgggaagaacacttgaatctacttctgatagtacctagagagagtactgcagagttggggaggaatgtagacattttctgtgacattgattttagagagaattaaaaatttaaagaaaaatatttcattgttttaagcattaaacattaactgcagttgggatctgacagacataatctttctgcaaaatcaagtttgtcatataggtaagtaattgataacatgcctctactcttacctggacatcacctgcctcttgttaggatcaagggagtaggtagctgcagggggcatctttcacagcttaattttggtctctgactgcttccacctaagaccatgttggagttacattggccaaatcatttgaaaagaatattatctaagtaatcatacatacacatttacaagtagatataaatctgtgtctacatctataagtgtatttttatcttcatctatctaatctaaaatttagttttctttttaatgggaaaaaagtagcaattttgttttaaactataattactatgagccaagggattcctgctattatttggacaaagatgaaaatcagtctctaaaaacttgagtggaggactagtttgttttaaagtcactgcacgggtcagcatttaactttcaaatcaactataccatttgtttaataaaaagctaactttaacttacggaatttcaaagaaaaagctatttcaaattcagaaaaagagcatacttatacatttgcatgatcattcatagctttatttttcatcacactttatttcaaatagtgttggagggattacttaacccctaaaatgttaacatatttttgtttctaaaactatgtggcttagtacaaatcaagtggccataatcagtatgcattccttgtagaatggaaacataagtgacattttgaaatattttaattgcatgttcagaagtgctagtggatatgccaaagtcagaataagatcctgaaactaattaatgtggcttcatttatcaagagcactagagctgttataaatactaataatagcattgtaagagtatatttccatttgtctgttgatacttgctgggtactgtcatagtgctccacaccactgagtagaagaaagggctttgtgtgaatttcacaaaaagcattccacacttctctgtagtaaattctgagacctttttactgacattagtatccctagtactaagattgattgattgcaagaaacaactgtgttcatgttcacagagttgcaggattaaggaaattagtaaaacacattccaaattcaaacatactaattaataaaaatatgtaaaacagaaaaaattcccttgctattctttgggggtggtaaaagtgggcccagaggaggggttcatatgcaagggttagtttttatataaaatcttgcctcgtaactagagactgctgaaacagaaaagacttcaaagtgatattcttggataaaggcctggccttcatttctcatccttaaatatttgggaatctttgtcagcagagtgtttgttcgacgcttattgtgagaacatatggaaagagcaatggattaggaaacctatatttggtcttgaatcttctgttccttgggaacgttttctcccagccaattttacttctcaggtctttagtttcttcacacataaacataaggaagttggactcactgacagtatagttcttttcaattaactctaaaggctgtgattctgtgatcgttactgtaagatgactggtgccccaaagaaagggtaaaacttaaggtttagaattgtatgcaggagcaaattgcctgccaatatgtaattcccaaaatttgtgtgttcttgtgagtcacctctaaaggtggccagtttgctgcttctatgacaatgaaatttccaggttaaatatagaagagaccaccatgggcaataaaggtaattccagtagaatgtggcaaaggaaggttaaataaaatgtttatcttagagaaagaaagccagcaacagatgagcataaatatgtgtaaagagaaatgtccctgaaattttagttacatttgttttctggggcaaaggctagattagtaataccattaaaaaaaaagaaggggacatttgtgcactgttttatatttcatctttttgttgttgttgttgttttggacagagtcttgctccgtcgcccagactggagtgcagtgacgtgacctccgctcactgcaacctccgcctcgcgggttcaaatgattctcctgcccagtagctgggattacaggtgcctgccaccacacccagttaatttttgtatttttagtaaagatggagtttcaccatgttggccaggctggtctcgaacttgtgacctcaagtgatctgcccaccttggtctcccaaagtgctgggattacaggcatgagccaccatgctcggcccttatatttcatcatgcttagaaacttcatttgtctttgttttgagtcagaagatctactaattatttattagatttatattttggttccttttcgggaaacattatagactattaccttcattttttttcaacaaatgttattccaggctagattggttatagaacaggccttgagttgagatactttaacatctagtaaaatggaaagaagatggcttaagaaagagaatggcttaggtttcagtggtgactatgcagtcaacttactaattttgtgaccttggacaatttatttaatctttttgacattaagtattctagtttgaaaactcagcaaaatttcttacctcctgaactgtgacagagtgaaatgaaaaaatttgtatgaagcatgtagcatagtacttatcataaagtagatgcccatcaatacgtagttgatctaccttcagctaactcatcgcacattttccaatttttgaacgtttaaacctatgacttaatccttgctttgcacagggatgtatggcccggagtaaaccattgtttctggggctgcagtgttaattggcaaaaagaagggtttgagctagataattttaaatattccattgtcttttcatcaaattttatctcttttggtttatttagatttaaaataacaacaataacaacaacaaaatagatgcactaccatcctctgaccctgtaacaacaatggtgtgttacaccccaagactatcataattattgtgactttttaaattcaaagcttagtcttttgtaagaatcaccttgaaaagcaggataatttttacctgaaatagttaaaagacttgagatatgcattttcaattctttctaaaaccaagaaaaattaatctgcatatggaattcttctttaaaagttgaaattttccttctagtatggagtctgagacatctaacttacagtttcttttggcctgcaattgatttctccttgcctactaaatgataactgctgatgacattaatattcaggtctgtcctttcttcccaagaggtcatttttagtcttttaaaaaaaattagtctattttctcctgagaataattatttcccatgaagatggtttgtagctatgagtgcctttcttaaaagcacacagaaaagcaaaaaacaaacaaacaaggaaaaaacccacctatttctacataagcataaaatgattcactattatatagatattgtagcaaatctgaaaagccaaaccagtcagagacgtgtagataatcctggtttcacctcctcccaccaagaaaagtctaatgaccttataatatcattatgaagaaatggttgaacaatgacaaaggtgatctttgcacaatttgatttttcttatctgaaatttaaaactgttttattataatcagaatccgtttgaaaatgtctttattggccggtcgcggtggctcatgcctgtaatcccagcactttgggaggccgaggtgggcggatcacgaagtcaagagattgagacgatcctggtcaacatggtgacatcccgtctctactaaaaatacaaaaattagctgagtgtggtggtgggcgcctgtagtcccagctactcaggaggctgaggcagaagaatcacttgaacctgggaggcggaggttgcagtgagccgagatcacgccactgcactccagcctgacgacagagcgagattccgtctcaaaaaaaaataagaaagatagtatctttatctttgggcataacattctacaatacagtgtgacattttacacctacagggaaatcacagtattcatagatcataaattagagaaattggtcctttttctagtccattcctttatgattttatgatgagaaagctaatacatattattcttctacactactccaaaatcttcttaaaattaaacaaacaacaacaaaaacaaaacttaatccaagtatatcatgtaattaatttacagatcacctaagtaagaaggttaggaaaaagtaataatccatatctattttataccaggtttttacttgaaaatcttttttttttcttatttacatattactggtatgtcttttttgtaaggacacccagcgactgcctcaaaagcttctaagtacagacgtcaagttggctccatgaacctcatttaatagctataaaatgaggtggatattattcatagtatctctgggaagttttgccattagtaattcttgaattattttacataattttaaatcatgaaaatggcttgtataatagtatttttctcacctgtattctctgcttctcaggtggctgaggcaggaggaacgcttgaatccagaagttctagtccagcctggggaacatagtgagaacttatctccaaaaaaaatcagttttcttttttctaggggcctatatagaattaaaataaatgtgaatacatttatttctgatatatttttggaaatattttgagacataatagtaccataagaatatttttatttttaaatattagttggaatatgaaacaacgaaataaaatattggtgcatagtcatactaatgaaacctaagaaatacttttcttattagggcaatttaggagtgtgtgccaaggaggaaagaaccctagaagtatattaggggacatttaatttctagggagggtattgtactgcaaatggtggtcactcaccaggtcactgtcaagatgagactgagctaaggcaagaatataagttattttaaaggccagatttgcatctgtgaaaacatgctgttccctagaaagcacacagacatgagttgcataaaaatactcatttgtaaaaattgtgtgttttattcagtttggccatctgaatcaccacgtgagaaaggaatatgaaaacgttagacatcatggtaggcagaaactgcacgatagtaccatgtgataggaaatgagggatgcatactgcagaaaacacattattttggcatgtttctgcccacaagtgtatcaactccattacatttttctgtatgatgaattactgagaataattagactcagaatattgtaatatattagttagatagatgggtagacagaatagtcacctacatactcttagttataaacagttgtaaacactatagtctgaattaaacagaattctcagtttatgagaagcccaacattttccatatgcactgtcatattccattttttctaatattcatatttcattagcatttagtacacaggccttggattgttgaaacaagaaatataaatatattcaatttctatatttgtgaactatttatcatttaagttatcatcaaggccgagttagttttgtttaagacactaaatcaatttaaatcccacctcttttacttttgatatgcaaatatttttactttgatgttgtagcaatacaaattgaagtttgcaacatgaactgctaatgctaatttgattacttttgtattagtgtttagtgttacaaaaataacaagagattattttttaaatgaaactgggaatggaagaactctttctttgcaggccctgtgcaatgatggtagtattaatgcatgtacattaatgcctgatgattcttatagaacaatgaatgtgattttgaaggcaaatcattcaagatttttagaaaaactgacagcttgatttctcttttttaattgaaagttcatcaaaaagtcctcaccttcctttttaacaggtcagagacttcaaatctacttaaaatatttgttgtagatgatttagaccacaatttatttttagcattaaaaatgttttatgtgaagacaaggtgcctgaattgtgaatgcaaaactttttggacagaatcaaatcacagttttttttttccagaaacttgtttcttagattatttgatttatttgataaagttgaagagatttctcatgatctgtcacaagaatggtgtaaatatctgactgcaaaacaagctaagataggtactcctaaaacctgttgaaaaacaattttttctctttctctttttaaatagtacttatgaatggtatctctccaaatatatacatctcactagtacatatagctatataatctgtaagatatcccagtgatggagctgcagtaatatcggccacctgtagtgtgcctgcagcgtgcatgttgcttgtctgtttcttgatgaaatgtctgtgtagtgtctgtaatttgcattatgcctgaaagtctctatgctcattaaccttttacaggtgccgcaccattccaaggaactgcaggtactaaaagaatgggcagtacttacaaagtagaggcacagaacccttgtgagctctaacctctccttttgcctacttttaggcaatgttttggaggtcactggtctaacactcaatgagttagagattcataaccaagctaaggaagtgaaacagaggagtagctaatgattgaataggggttatgttgtatatttccaacatatcactgattatctgacacccttccccaccaaaaaatgtataaatttcagtgaaaagagagagggagagagattgagaaatatcaattaatcattactttatgtatcaaattgtcaaaagttttgcctcaaactatgtctagaaaaatgtattagaatttattcacatgccattgacttttcaaagagttcctgataatatatgtggtacctggaaatagaatgcagaagttaatcaggttagaatgttgacaaatacagactaatagactgaaggaccatatacaaaatttattacactaataaatattgagttctatttggcagattctctttatgattatagtataatttttatataatatagtcaaataagagcaagcattcagcattattctacatttttctttataaaatttaaaaattttgtgcctaaagaggaaaaaaaaacatgcaatgatagcctcaaagaaattgaacaatgtgcatatatctgtctatgtatctacctatatatgtatgtacacagactatatagacacacactatatatacacaatatatatagaatatatacactatagaaatgttttcagcatgatagcaacttgaatgatagagaattctcttccagaatgctacttactatgattttgcattaatacctgtaaattccatgtgtgatagaaaaagaaagaattcttaccctttctatccagtgcttttgttttctttttcaaaatagtcactttggtttacagatgttttcttttatatatggtacaatgtttaagaagaatataaatcaatctaccttgggtaaacacttattaagtagctactaaatcggctttggcaaaccactcctataatcccacagacttgctagagttagggaatacttttgtgattatgaaaatcattaatgctattaaaaatattgatgtcaatgatattagccttcatcattgaaaccattttcaagagctaaaagtgggcacagcattatatgatcccacttctgcttaatggcctcacaatccaaattaccatcttgctcaacttcccatttttaaaatgcaaacttttttataagttatttatgcatattgttaagaataataatccatcctcttttttatagtaggtataaaataattatctataattctttacatatataatgaaagaaaattgaggtcaggtatagcaaggaagagaagtattccattttcttcactttagaaaaggggattctatagatgtaaatgctcactgctttgtccacttcttcatctgtttttcacgatacaccgggttctttccatctagatgttatgtttttcaaaaagccatctatttttaaaacttgttctcttccaatataatctggaagcaatcaagactcaagtcaccatggaaatgttgtgagtttgaaaatgatgtctgctaaattatgccattggctgaacctcactcctcccccaagtcagaaggtcagttttcgttttgccagccatcatttttacctaaatggacaacattcccactggatcctatgaaagataatgtgaaaatgacaaacagttcatcttcctccaaagtacactgttgtgagagggaggaaagaggacagaggctagacaagaagaaaagagttaaagagggatatccctgataaaatcagcacttagcccttagtttcatttagatcagcactctcgagactgaggaactgattttttaatattttatttaatcttaatttacatttaaatagccacatttggctagtagttatcatatgggacagtgcagatttagatcctcgggttctcatttaactttaaaaggcaaaggttaaatgtttttaatttagtatttgaaattgacaccaaagaataaaactggtcatcgttcttttggagaatcagtatttcttttggtaattctagattatttttcttggcttcctgtggttttagcctcctccctcacagaaaataattaaagtattgcttaaaattaagatttacataaaatgtatatatttatgtattaaatagatataagacagtatttacatatatataagcacacatatacacacaagttttctttattagaagaattttactaaatatttgaaaagacttcatgcaattatttggcatggaacagcacttaaaacttattctgtgtggtgagtagagccatgtctttgaaatcaaacagatgaatgatcaagtcctaattctgtgactaggtgaatgactttgggcaaataatgaagccttctgaggcctcagtttccttatcaaaaaacagggatcataatgctttgtacatggtagaattgtgttgaagataaatgaactagtaatataaagcagggagcattgtgcttggcttatagtgtttgttaagtaaatatcagcatgtcaggtagtcttatttttaatgttgcataacggtcatatgatgcaacatgtcctctaaggaaacttttattctttatggtggctcacaatggataattcccaatccagctgaatatcaacagtgccactgggtttcagcacttcttcctccactggccacacaaagatatgagatgatcttacagggtgcctcagtataacaacaaccttataccgttagggggaaatggtagtattttcaagtgtttgaagaattgtcccaaggaagaagaaataaatgtaatgtaatgatgcttcctcttgagcttccagtttttacttttgctattgtcaagccatgtcccctttgcctttcagatggggctaatttctttaatgtagccatgcttagggaatagacctcgtaaatcatcttataaatcacaagagttagccataggagaaggagctgatgttaccagaagagacagaaaaaataaaaagatgaatgctaaaatacataaaatacatataacaagctcttcactccttgctcccaactactgttgctaatgtcaatggccaaggaggactactgtcccattctttttttttttttttttttttttttgacggagtcttgctctgtcgccaaggctggagtgcaatggcatgatcttggctcactgcaacttccgcctcctgggttcaagtgattctcctgcctcagcctcctgagtagctgggattacaggtgcccaccaccatgcctggctaatttttgtattttcagtagagatggggtttcatcaggttggccaggctggtctcgaactcctcacctcaggtgatctgcccgtcttggcctcccaaagtgctaggattacaggtgtgagccaccgtgcccggcctgtcccattcgtttttgatagacaaccctcagagagcaaactgccactcagaacttctatagatgtttccttcatctcacatgtgctgtgtgtaaagttgggggagctaaggtatatgcctacctatggctcttccaatgctagtttctacatttcccatgtatgtgatcccacatgggtagatactgtgcttgacaattttttgaagtaaattgaagaaataaggtgttcagatacattcaagtctggtcatgatgctttacctttccaagatgtcgccatgctccatacgtctaatgaaaccataatcgagactgagttaaaacataaacagaaggagctttcaaagcagcaagatgctatgaaaatgataataatgataaataacatggttcataaagtgtgatacttcgttaattgtagggaaaacccattcctaatgtaagtattaggtaactgtcaaaaaacagcattgccatatcagggcattagatacgctgtcattttaggttttgatactgctttacaagaaaaagtgaactaaagccagtacacaagaaaaaaaatgtagaagttttattttttattatttttataggaaaaaatactttaagagatttgaagaccatcttcaatttagatttttttttttggccaaatagtgataatcctaaaaaaaactctgagagttggaacatttattcaactgtaaattatatgaagattgtaatgaattttatttaaaacctgcaatgcccactaaatgtttagaagagagagtgtgtctgtgtgggtataaattcacagttcataacatccccaaaatgtgtaagtctggagaccagaaagggaaaaaaatgctaagttggtaactagttgaatagaatattaacatgggcagtgaaaaagactgtattatcagtaaacatttcaaaatatcaatacagttattttatgtagacaaataagtataatagtggtgtgggcatcctactaactgcttaggttggaataaaaaccttcagaaacattattgattcttataatctacaattatgtgttctatctttgttaaatgtctttataaaattacattaagaataaattatgcatttttgcctttatgtaaattatctcaaagtataagaaatggaaagctgtagaatttagccagccattggaaaggatgccctgaaatacctgtattctcaccccaatactctgactatttctgttcagtatctctgaactgacacgatgacccatgacagctttgttgtacctgtgctttgatcaaaataagcagccattcagaagtagatgaaaaaaagcaaattcattttatcttcgttctgtaccacaaaaatcagagtccaaatagagtaagcagaaactcaaatttgaaaagataggtgataaaaaccaagtttgcatagaatttgaaaatcagctttctaatatgccttcctgaaggcattgttgatatgtaaatacttcaaacttctacttagtcatttgaaattacttcatatgttgagatggtcctattaacatttaggtttctgtgttcaggtttagactatttattcaatgttttggtaaaagtcaaagcatataaactttgaaaatgtataaaaaatcactatcctttattaaaaaagatacaatattaaacttatagttttctaatataggtatattcaaaattatcacccaaattggcttttgggtgttagctaaaatatctctatataaaatctgggctgtttaatgtagcaattgttagccaatcatgacaattaagcagttgaaatgtggctagtcaaaattgagatgtgtggtcagtattacaagcacaccagatttagaagatttagtagaaataaaaggaatattaaatatctcatgtataattttttattgattacatattgacacaatatttggatatattaggttgaacaaaagacattcttagaattaatatcattttaaattttttaaacatggcttaaagggcattttaaattatgtttgttgttcttatgtgggatttacattatatttcttctattggtcgacattggtgctgacagtttatacaaataagaaaaacagcaatttaaagatgaatgacggcccagcacggtggctcatgcctgtaatcccagcactttgggaggcagaggcaggaggatcatgaggtcaggagatccatcctggctaacacggtgaaaccctgtctctactaaaaatacaaaaaattagctgggcgtggtggcgggcgcctgtagtcccagctactcgggaggctcacgcaggagactggtgtgaacccgagaggtggagcttgcagtgagtcgagatcgtgccactgcactccagcctgggcgacagagcgagactccctcccaaaggaaaaaaaaaaaaagatgaacgaggaagggtgtgtttatttcctatttccactgtacacattaccacaaacttagtggcttaaaacagcacatttattatcttacagttctggagttcggaagtccaaagtgtatctcactgaactagaatcaaggtgtcagtaaggctgcgttccttctggagactctaatggagagaatcccttttcttgcctttttcagcttctgaaggctgccctcccacattcctttgctagtggccccatttttctgtcttcaaagccatattgagccttatacttctaacactgaatctccccagggctccctccctgcctccatcttctcgtgcaaggaccctttgattacattgagtccaccgggattatccaggataatctccccatttgaaagtcaggtgatcagccactttgatcctccaccccatgccatgtaacctaatgtattcacaggttcctgggatcaggacatgcacctctttggtggccattattgtgcctcttcaatgtttatacatatatttatattcacatcgaattaaatatataaaaatccatgtgtcttctttctatctctgtcttgtcttcgccctttcacaaaaccttagtgcctttctttagactttttcctttgtttcccttttgatactaattttccttatcgtctaacacatgctgactatctcacccaaatagtcatagccaaaggccaacacatgctgaatgaacaaatgaagttatccattttaatatggtcattctaactagggcaaaacccctcagagtttggaattgtttgcaatgttcctcaggtagactaataactgtaacagcagctataccataaagaaaggatagtgattccaatgcgcgaggacattttccagcatggatagaatcagtaggtctttcatgaagaaaaaagggctttgagacaaagccaaacaaaggaaagaggaaaatgacttttcttcccctccgagagactttgttggtttagcacacctgctcagacctttcgagatcatcttgggacatgctactgatagttgaaaagtgggttccttcagaaactgtagaaatgtggcagacattcactaacatctttttaccctgtcagacactggggaaacttggttttatttttatagtatagttgattagacatatttcaccattgtttttataatactgaggaataactaggtttaattataagacaattgatgagaacagtgcttaggagtcagaatttggccattgagttttttcttttacacaaaaaagactcaaatactttttcaaagctaataatccatggtgtaaaacacgtcttttaacatattatactctgcattgcaatgattaaattgttttcttgctttcagtaataacaatgatttaactagacttaggaaaactgcctatttactctgtttattggacaacattaaattggatactaattgccaagaggtataactgtaaaatcagtgaaccctaaacatggtgatttaaacacaagctgaatgttttccttcttttcttttttttttttgttttacatcagtgtactatttctgaaagctttgcattatttccacataggtgatctttatgggaaaatttaccagctaaagagcgatataataaagtggttgaggaaaacaaaataaatgtatttataattctgtaatctatgacattcttttaaattctataaatggttattttagaaagtatagaactattaataataacatgtgatatggcaggaaaggaaaaggctataaaaattagtccatggtaatttcaacctccagttggatgttatttttgttagaatttaaaatgcttttaggattgaagattgtgttttaatagctttagaatttaccctatgactatataatttagaaaatataaatgtggatggtagtaaattttgaattttcatgcagcaagtaaaatcgttaaaactgaggatgaggacagaccatatcatgaggtgttgatcaaggcaatttctgtatatatttaaagatggtgatttaaattacacagaaataaatgtgtgttgatttagacatttgtgtctcagagacacatgcctacacaattttttttcctaaaatcatgcagacaatgttgaactctttctttagtacagtttggcattagcatagcgtgttggaggtgataatatatgctgaatgatatatttgtaatcaagacattttaaaagaacgtttaataaagggaagtcatcaggccaaacaaattatctttttttctctttatttttattgagggatggcagaaggaaataatcataaagtacccaatatataaagttgttgattttgtgtgtgtgtttgtgtgtgtggaggcttcagcaaataaaaataagcctctaaaggaaccaagtgttaattgaattaaatataatgagcagttcaattgagctatttctaagcaaaagagggaatcaaagtaagaagttacaaactctgccaggggaagcttgagcatatttcacaaagaatatgacttttgaaatagagttttagttttataaaacttatattacaagagttctattgcccatgtgctcatttattaaataagacagaagagttggccagactaagatgaaggtgaaactttgtgcaagagaaacagccagaaccaacagtagatcatggtagatgaaaaccagaatgttaaggtgatcatcttgatctctggagagtggaatgccattgaagagattcatgagttattcgataactttctcagatttctgtttgtacttattaaaatggtacaagataagttgaggaatggagggaggaagggtagtgactgaaatacccagctggtgtttttttgtagttgtctgactgagatatagatgagaatataatgcagtacatgtgggcaaaaagtggtaggatctcctggaatggtttttctcaaaatctggttctcagatcagaagaattgacatcacctggccaaaaatgccaatttttatggggcgtatcccagaacaattgaatcagaaactttgagggtgtggtccagcaaccatgttttcacaagtcctcacgtgaatctgaggcatactaatatttgaagacaacagtcttagagatgtattttcagagcagaaccctcagaattgaagaattgataggatttggggataaggaaggtagaataatcaggaacagctagaatttctatcgtagaaagtggagagggacgtcattacatgagataagatatatgaaagaagagttaggttaggccaaaagggtccttttgaaaatatgcaattggaaaggaagctgtcattggaatggaaacaaaataataagtctagaattaaatgtcaggaattggtcttgattaaaccaatttttggtcttcattgcactggagagtctgttattaatgtttgtagctttcctttacagtgaaggtacctggatagagggtgggacgccattagaatatgtgatggagcagaaagagccttggacttaggggtcagaggacctgaactctggctgtgacctataacatctataaccctacctggccgtgaatactaattgtgttacctttggaaagtcacttcttgagatctagttaactacttagagacccaggtgttttgttagtcttttgttttttgtttcccctccttatcaggacaatgaaaatgttgcctgtgagcataattattgtgagaaaataataagtgtgtgaaaacatagcatagtcaacaggaaacacttaatagatggtaggcacatccttcttggctatttgttgattacacaaaatttcctttgatttatccaaaaatttggtggagaagaggatgaaggagagagaaaactatttctcaggacattcacaaatatgcaggggaaataaagaccaaattgtcgcctgaaaattaatttgaatagagcatccttaatacagcctcatatagtttcctggagaagattattcggcaatatatctaaaaatagttactaagggagtgcagaaaaatgagcaagggccttttgtaaagacacgggaccaaacgatacattacattttaaatttaaaatagcaatgcactgtaatgttttgctatcagctacaccaattaatgcagatgatgctaattaaaagtaaatttagagagtgattaggttctctcaccattgttagggagaattgattcttctatagatctaatgtgttaaagtaagaagttaatgatatattgatgtattttaaagcacctaatttagattataattccgaggaaaacatttgtgttaataccgaatattaaatgacaaacgttttctcttggataaggaatggcaacatttgtataaccctagagcaacaaacatgttgatgtttcaaataaattattgtttatggctgtttaatctcaattttagttttataaaacttataatgcaagaattctattgcatatatgctcatttatgtggcagtatacagctgtgtgtggcataatagctatattgaacaaaattatgtgctgtaggacttgctgcaaaaatttcatggtcccatctggaatagctttgcaattgagaaggctgaagagggcaaacattttacaggattatggaaatcagtagtagggttttgctgtcaattttaacgtttagaaaataaggttagtaggtgtcaaagctagaagaacttttttcatattcaaaaacagtttatatatggaacaaagttactctcgctataggaaagtctgaaatatatacacagacatctagtttatatctgaacgtattggccttcaattacaaggtatatcttaaacacaacaaataagttgagttttgaatagattgctatatttcaccaaaataggcagtttaaaagatctgctatcctggaaaattattttctatgtccttagtatttagctagcattatgtaagaattaggaaatttgttgtttatggggaaaagagaaaaaggttaaaataagtatgaggtcaattaaatggtaggacccattcatcgctttctttattatcttctctcttattttttccctctattcctcaattctccttgcctttcttctttccttctctcctacaaaacatgtgacacaaagaaaagagaagaaaaggacagaaaaagaaacaacacaagttccatctatgtaaaacatagtaaaacaaagtttgaaaccagaaaataacctaaatggtggctcttacagctagtaaaatggtgacaaaatggaggagctattactattgtttttagtgtaaactattctttatgctgtgatggcatattttatacagtttagagtctatgtgtacacaccaatacaccctgttatatagatggtgaagcatcaaaagtatattaattaaacggggaaactaggaatgtaagtggcggcagtgtgggcaaaagaatgttgataatacaaatttatgtctaatatgtatttaaatccaatataagctcttcttttcaatgattacagtaaggacatttgggctacatatgcaatcatctgtaacaaaaacctgcggacaaaaaaaagttcataaaatagtccatggcttgactcatgtaccctaattaaaaaatattaggtaaagtcatgtagtataatttgattcccaatacataaaataataagcagattttgtgcattttgtaggtatgagtgctgaaagttatcttcagaatatattttaaacctggttaaataaatattagttaaaaattttcataataaaacattaaacacatgcttatatatacataaataagattaacaagagcacataaaatcaacttaaaattgcactcatgtatctgaggagtgctttcactaaatcagagtgaaaatttttttaaagtatatgtttgtgtttctatatacagctacacatctaatgtgtttgatgaccatcatacccacacacacacgtacatacattcaaatacataaggaatcattaacttgtattcactaaaacacggttgacacactcatttataagcattgatttatattttaaaaagaagttaaaaaagcacatctactaacctagtcattaaatcgtgtagtgaagaaagaatgaacaaaactctgattatgtagaagctgtttggaacagttccttttgatgttatttttattgttgagaatatttacataaattaaaggaaaagttcaatatgttcatatttgttgttgggaacaaaattatttacccctacttctatgttcaacactgtaattattttcttaacaggtataatattgaagtcctattaaccaattgcaaacaagaacaaaacaacaaaagcgttttttggactgtactatttaaactaattataaactcctaataataatggatcaaatacgctgagccaatgttatagaatgtagcttcttttaatatttaaagcaagctgctttgctattttaaacaaccatagataacaattgctcccccatccctacaaactctgtcaacctgaattttttcacctaattgggaatcctcaacatgcttataaatgcacacacttggaaaatattagccaaaaatgtcgagtgatccttatattgatttgagtaaaaatgtaattctgggggtatattagcctttcaaagggataaaatgataagcactcaggcaccatggtttcaccagcagtgcgtgttcacacagcttcacagcagactcattgttcctatttgcagcaacacgcacaatttaatagcatttaatagcccagcagtttcactgcaccattcacaagcctccagtatatttaatgtagaccagtttttaaattaaattggcataaataagcttggtagagttatagactctacttagattgctcttgagtatggagggaaagattttttgcaatgatgctaacaaaattagtttctggtgcatgacttgaataggaatggagatgtaatcccagaaaactagaaaatgcattactcgagcaaataacaaaatttcagtaaagtagaatatttctttaaataaaactatgctttagcaattaatgcaaattttactgtaattttggcatgaaataattattgcttgaggtattctaagttcaacttaatagaaaaattaaggggaagaatgatgcatgtatctgttatattgattctatctatagttatagccccaaatattttgacatgtgcattcctgtaatatctgaagctccattccatttataatcataattcccctgctgagatcatagcttgtgctcataccagcctgagcgtctctcctttaggtcagaagacaagtaatttatatgttttaattagcctaaactttagctctgagtagatgactttatcttaacactttcatagataaatgcatcctttgaaacgtaataactattttcacattattcattcatgagtagaattctgaaaaggcacagttagtctagaagaaataaaatcatgcttatttaaaatttctttaaaaatacttaccatgcttatttttttaagcctcttgatcacctctgtaacttccctcccagaagcatactttcatttaaatatgtaacttttggattctttcttctttgcagacattccatattcattgtcattatcttgacaatgaatatgtacaaagtgaatcttaagtagtagcatcttaccaagaaattttatgtctagagagacattgacttctgaaagaagcttccacattgtaaacatttcaccacaaaaatactgtttttttttttcttctttaccaattgctactgccctgtactccttctagtcctcgtttttttcaattccttatccgaagttcttggaaccagaaatgtttccgatttgggattttgttttggattttggaatatttgcattgtgattaccggctcagtatcccttatctgaaaaccccaaatcggaactgctccaaagagcattttctttgaccactatgtcggcgctcaaaaaggttccgatttggggccaggcacggtggctcacacctgtaatcccagcagtttgggaggcagaggcgtgtggatcacgaggtcaggatatcgagaccatcttggctaacagggtgaaaccacatctctactaaaaatacaaaaaaattagccaagcgtggtggcgggcacctgtagtcccagctactcaggagactgaggcaggagaacggcatgaacccgaaaaaaaaaggttctgattttggaggatttcgaatttcaaattttctgattagggactcaatctgtaccagtttcttcattttaactaacactaaatgaagtaggttttcttttcttttgtacagacctgacatcagcattttaggttgtctaggaaaaagaatgtcattctccccacaatcttttgaggcccagatgagtgaatgtcctaaagtctccaaggagaagagcttccttggggtccttagaggttttacttcacagctattgtgaccacatttcctgttatccagtggctagggaaagtcccattgataaaaaactgttacattggagagacacgtttaacttcggtttgtatgtaatcgatagttatatcccacgtgccgctttctgctaagttttgtgcgtcagacgagagacagagagagaaatacgaaaccgagccccggcctgaaaaaaagtcacaggaagaagccatacacacatgatagctcatttacaatgcacagcaaaatatgctttatttactaacctaggaagtacaggcagtactgaaataaggagtgagactgatcaataagaataacataaggccgggcgtggtggcttacacctgtaatcccagcactttgggaggcctaagctggcagatcacttaaggtcaggagttcaagaccagcctggccgacatggtgaaaccccatctctacaaaaaatacaaaaattagctgatcagctacttaggaggctgaggcacaagaatcgcttgaacccgggaggtggaggttgcagtgagccgagatcccgacactgcactccagcctgggcaacagagcgaaactctcatctcaaaaagaatgacgacagtaataacatccaatatttattgaacatttgctaccatgccaaatactgtttgaagtagtctttttttcagcaatcctaaaagaaggaacaatattatttcctttttaaagatgagaaaacagaagcacagagtgattaattaatatgccctagatcacacagctaaatagtgacaacgacaatcaaacccaagcagtctgacctctgagcacacaggatgatttagtataagtagcggtcaaaatgaaacacacacgaaaaaaacaaaataaagccaaagtccctcaaatctttattggtgaatttactatgtgaaatagtacttctgtaaaattgagcaagtgaaatttccgagtttaacttccttttcataaagtgtagttaagcgtatgtggcctccagattgcaggatttcttgaatttcaaatggtttatcttgtaaaagtgctggacgaaaacaaactgctcggcagatgttagttgttttatctgttgttgaggttatgaggaactgagtgttgcttgggctatttataatgggaaggttgggaagctggaagcgacactcctttgcatttatttgctgtgagcctttccccagtcacagagtttaacactgaaagtgatgtggaaggaaggaaatgggcatgagtggaggtgccacaggggcagtggtagctgtctgctggtgaacacataaggaatcttgcttcactattgtgtcatcaacccttcttcaaaaagggatcaacagatcagctggaaagggagaaaccaggttggaaataggtttcatgtgtgaaaaaaaagataaaattgggaagtaatgatttgccaatgtgttccctctgttctgttaggtttatcggcatgatacgatttcaaaaccatataacactttttctccctgtgcttgttaacattattttgttgagaatcggatgaaagattttaaccgttttgcaagtagaagtggaaacaggttgagtttatatgtttttgtaaaatacgtgaaacatagcaacatgaggcagtataggtccagtgtggtcactattagccatgtacagctatttacatatgaactaattaaagtcaatttaaattaaaaattcagttccgttttatagcccacttctatcaccggagaaagctcatttggatggtgctgatacagagtagtggttaacaggtcaagttagataaattcctgggttgcagcccaacttcatcacttactagcactgtgactttggacaagttcatctcgagcctgactacttcatctgcaaaatggagacgataataatatctatttcatatagctgtcaggagaatgaaaaaatatatgtaaagtacttaggtcaatacaaataaagggctaaataaattttggctactgttgttagggactagtcatgtttttagagccattaaatcaaatgtcattgattggttataaaaggaccagttgtacattttgggattaaaatcaacatgatagtaggaccctataatgtttaattgtaacacattttcacttccatatattcagatatatgttttccattttcaaaggagatttgaggccactaaacattttttaaagcacaaatgcacaaaattgaaaatgattaacctaattttgagcagataaggcaaaaatgaaggatgagaatgagatcatatggaagaccatagttaaaggatgctatttcaattgcacaataacaaatcttagctgagaggcctagtagttatggccaaagggagacatatatttaggcataatcttaattttattttattgtttaatttagatgagatccaaatggatgtaggaagtttcacggttgcagtcacgtataatgtgagtttaactcatgcttcataagaaacaggaactaggccgggtgtggtggctcatgcctgtaatcccagcaattttggatgctgaggtgggcggattacctgaggtcaggagttcaagaccagcttgaccaacatggaaaaaccctgtctctactaaaaatacaaaattagccaggtgtagtggtgcatgcctgtaatctcagctacttgggaggctgaggcaggagaatagcttgaacctgggaagcagagattgcagtgagctgagatcacgctactgcactccagcctgggcaacaagactgaaactttgtctcaaaaaaaaaaaaaaagaaaaagaaaaagaaacaagaccttatagaatggcagaaaatgatctattacatatagctattttaacagcctactattgtttatattttaaaaagcaggccctgctaaccatctagggaaaaattaccaggaataagtttagggaagcctgaaatacttgcttggaagtgaggcactggtataacttggtggctacaagcacagaaaatggagtctgatggtttggacaaaatgactctcctacattacaagctgtctggcttggagaattatttaatctctctctgcctcaatttctcatctgtaacatggagataataattgtaaatactcacttgcatttgttgagaagaacaacttagttagtgtttttaaagtataatgcctgattcttagggtatgcaatacatactgtaatcaatattagacaagagtattgaagtggctgactgtgactttggagaattcttctagttcctttcttcctctattttcctcctgtgaatttggtgtcaaagtaccttgtcaattgttcgcattgcaaagactgtcctagcataaaagaatacattatacaattttagtataaaataacttatgtccagttttaattgttgaatttttctgaaagtgctatgcaatattttcacacagtttctagaagatatggttttatggttttttttttttttaaatatgtggatgctctctaaggcaattgtctaaatagttttccaaattctggaaaagaaggagcaagaatatatgctaatggaaattacttggagaaacctgagtaaatctagtaattgtgtgccgtatgtggtaagaaaattagatagtgcacttaaaatgattcaataattaaatatgtatttattaaatcatttgtagtagctttagtatatgacctcaggattcaaagacaaccatgttgtgattacccttgaagcttcattgaaaagtgaattacagaatcagctttcttttcttttactgcctgaacatgctttaccctgaaatctcattgtaaaataaaccttcctgttacaactattgcacaccacttaatcgctgcagcatgacatggggtaggagttgcaagaagggaggggagaatgtcatgaaaagtcgacaataaacagaaacagtcagaaaattacttctgggagatggcagatgatgagatattaagacagaaggcagacactctgcacagcagctggagaggagaaaaggtgcattagtcaaatgaattatgaaaaaaaaatgaaatcaagttccagagaggtgccaacattttcttcatgctattgagtattttcactttctgagatatattcattagttgcaattttggtcagtttattacttggacaaaaacaatttggattatagcttttggggaaaaatatactatttaagtgattaacttaagaatgatatgatggttcgtaaaaatagacttattttaacttagttaacttgaataacttacttttaaaagtcattctcacagatcatatccaaaatgtttgtttttcaattcatgaattaatcctcaggatgaatgttattactttgttaagttagattttctgggcaatatggtgaaaatataagtaatacaaaaattttaaatgaatattagtgtttctttctcttcctgtatttctcttgttaatttacagggtttcctcttaaaaaaaatagcagctgtaaactatcctttgaagatctaatgcaacctctttgtcctattttctaaaaccaaatggacagcattgtattattctaactcctatacccacagattgcctgccatgtttttttgtccattcttctctttattttctgcagtttagtaaagtttgttttaaaagaaatcccttcaaaaagtaatttaaaggagaaagttccccttaagctaacatagttcttatttcttctattttcaacttcagttcttttttttccactgtgttctcaaatttgcagagttatgtaattttagataagtcccctggctgttacctactactgccacactgtatgtcccatcacataatatacaaagtcacttcattcctgtgaaaccgttcagccaattcagggtgctttcataatcaggataaagagaaatttggaaaattattgacacataagtgaaaggcattgagaatgaatccaattttctataacacttggtctgcgtaattaaaatgtaaaataatattaacatggaaatattgtgtaatgttttatttattgtaaatgtaaaatggcagatcagctttactcatgtgataaattgtcaaacatatgagattagcaggacagtatttcttttaggttgtttccacttgcttccactttttggcattggaaaaatctcactcgtattagtggaaatagggaaacagctgtttagaatgtcagtagagagttttatttttactgaaagcaagtgcagtaacatttatattaagaatgaaggtgtgcatacattcacatacacacagagacgcattatatatttttgttaaagaaaacacaaaatctacacagtaccggccaagagtcatagcagagactaccaacactgtggtagcaagttctgatgacttctaatggggcaaaattccagtcactaaaattgaatatattctgtgacttagatatgtcattaattttcaactgtttttttgttatcagatgtattttttatatatctatatatattcatcatctctatccttggtctacacagcaagaatgtaggggatattttcaggaaatttattttgggctgacttctcccaataactagccataagatattctctgtactaaaacaaaccccacctttagttgggcccaaagcatactgttgagggtgataaagatggagctcaatagttgatattcattgactgctgaggtaaagatgaattttctagtaaaactccagaaagcaattcttaggaggtaaaactttttattgacatagggccaaaggtgaatattttggggagcttagataaaactggctttgccatttttgaattatatgctagaaaggaagagggaggaaatgtgttccctactgaatcataagatttcaacagttttttatgcctgcaaaattcaaaaatgccttgtgggtataaacctcaaacttggaatactgtccttcttattgtattgagaaaaatgtattgagagcaaaagcaatccacattcacatttataaagctgggagggttttgcaattcatgtctggatgagcaccatataagcattttttcctggcttctcaaaccaaccactctattatggaactttattaagagctagaaacttaatgaaaatcaaaggtttaaatatgagtaacatattttaaataaaccatcatttatctaggcctgaggcagttattaatttacttgcttgttttttgctttctgtaaatctttgcctttccctccttagctttagagaaaataggtaaattaaggcaatgttttacttaaggattgtaacagatctaaaaaaattggaaaaggtaagattatatgagatatatcaataagaatcaactttaacttcatttgaatatctctactgagttgatgccatgagttagaagtcaaaattacctttgtagtactctacctcaaagctcctgcttgtatattaaaaatatatttgcatttcacctaacactaaagcaatattcttaagcactttggaagataatttgaccatctaataacttgcctaattttcaactcttgtcacatgctttaaataggtgtaatagtttcaaaaacaaggcaggtaggagcatgtttaaccagacctccacctacagcaaataataagaataagaagaaaaaaggtctcaaaaataatacaatgattttaagcctcattttttctcagtcatattttaaaaaataaaaagatgagcatgataattgcagcctttagagcaattttgtaaacaacacattataggtactggatagaaaataaatgccagcctccttctttcccccgataaatctgttgaaatattttttcccctatatcacaatagcagacttctttcttggacctgcatgaaaaatcaagcccatcatttttctgtgggtttctataatatgtataagatccctcaattaaccattgtgatcaaaataagtcaaggtaaatagcagacagtaggttctatagacaagggcaaccacaaggttacagttttgtagcaggtgtggaatatatagatagatcattcataaaagaaattaaattggaagataacagatacattaagctattttataagaagatattaaagtactgtgccgctgtaagaaagtacatcaaattgcttttttattcagtatgtcagttgaaatacggtcactattcttggaacttgttctctttgtaaaattcaacatggatcttttattcctgatatttggctcctttccaggcatgtgtctagtgaagtatcttgaattacaagctaataatggatacttgtaatagatttctagcttttagaaccatttctttccgaccttctcttttctattcttcttttctctcttctttgcagataagacatgttctaatgtttgcatacatttaaaatgaggaactttacaacatgctgatgtgggacccatagaatgaaaatcacagaaaaggctggggtatatatgaattgtctgaattgtttttaataaataataaagtacaatttcatcaactctcaactttaaggtaattacctatctaatcactaccatagttcaaaactgtaaacacatttatttatttaaaattaatgtttggggctatactaaaggaaattgacaaattacatatggaaaaactgtaatatattttctttttttaatacagcattcctataccataattattttttaaggtctacttttctaataatactgtcacttaaatcaacaaaaacaaatgattatttttagtgtagcattcttgccttttagttaaatattttaattatataagcatttgctaaaaaattacataccctatattttattcaggcatcaaatgaattaggaaaattttagtcagcaccaaatcttcttagaaacagtatagtttgaaaaacctcaataatttcttttgaaagttttgacaataagtggatttaaagctggcaaacatagtttcttgcaagaaaaaagctacatccatctctcgggtttgatttccttttggccatgtggaaaatacaaaagaaataaaaatcggtcagtacaccgaaacaaaccaacaaacaacaaaacaaaaagacaaacttcctttcaaggttatataaataatattcgttttatttttctaatttatttgtcatgttggtttattattgctgaatttatcctctgactactaaatatagaagatgtctcaattttcattacaaactgcccccttctagaaaagcaaaacagcaacactcacagaatacttgtctaaacttaaggtttgatgcttttagagagtcttgttatttactaggcattgggtacaaggtactcaatacattttgtaccaatgaggcataaaaatctacattttatttggtaaatgtatttgatatataacttcagataagatctctctatagaagaaaaaaattaacacttgcattaatcttgccagaaaagttatttctactaaaatagtaaaaataagaaattatcttactagaaaacagagatttctttccaacttttttattcaattgaaagcagatgtccaggctcacacctgtaatcccagcactttaggaagcctaggcaggagaattgcttgaggccaggagttcaagaccagcctgggcaacaaagcgagagatggtctccacaaaaaataaaatgaaatcaataagccaggcatagtggcatgtggctgtggtcccagatactctagagactgaggcaggagaatcctttgagttcaggagtttgaggctgtagtgagctatgaaatgatctcaccactgtgcccaagcctgggcaacaaagtgagagatggtctctacaaaatataaaatgaaataaattagccaggcatagtggcacatggctgtagtcccaaatactctagaggctgaggcaggaggatactttgagttcaggagtttgaggctgcagtgagctgtgatatgatcacaccactgtgctccagcctgggcaacagaaggagaccctgttctctaaagaaaaagagtggaaacattaaattaaaggaaataaccaactatggatgcacacatggaagtatttctgtgtatttaatgaagactatgtgtacatatatctaagactatatatgtatacacacacacacatacacacatactatatatctgtgtatgtatgtattattttcacagagaaagagtatgcctatatatatagacatacatattatatacacgtatatatatacacacatatatcatatatcttcatatattatatataatatgtgcatatataatatataatatgtgtgtgtatgcttatgtatgtatatatacatatatatgtagacatactctttcattatagtctcctttcccagagaaagagtatgtccatatatatattttatacacacacacacacacacacacacacatatatctgcacatactgtttctctgggagaggagactataatgaatgtgcataaagagctattttgacttatttttcacataaatgttatgtgtttactgtatattttacaattgtctgtaatataagacaagggagggacccatcctggagacaaggatggaataactctagcattctataatttacatatagaaaaatgagatttaaaaaatgttcctgtcacatagaattccattctgttacattggcattcatgttatttatagcttcctgtaagtggaacatatttttttcttcctggggatttccagcttaggctatgatttgcaactaattatctcagggattttagctaatatttgcaaagaaatcatacagcaataaaaactttatgaagactttggaataaaatagacaaataattatgattttggggatagtaaatttattttcagtactaaagtactaatgtagggtaaactcatttaaaatcctgatttacacagaagtttgcattgctatagaaaaaaaaggaagtggcctatttaaattatacagcaaaaatctacccagaggggtcagggaaacagaaaaaaaatagcgtaattataaaaatgcttggaatgctgccattaaagaatgaattgtatatatttaatgtgataatcataaaaaatgagacatttaatgatgaaatatacttgacttgttgaaaaagttacctgaaaagtcttatacccatgtattttgaaattgtttctatagctattctattataagcagtttgcatgacaccaattgagattttagataggaaagaaagacaggaatgtacaagatgacaaaagaagagaagtggagaggaggatgggacaggactggactgaactgagcagaaggcaagggaagggaaagcacaactacacgtaagccagttagataatcacacctatattttgcaattccacatcgatttttatcttaacaaaaaatgttatgtttaaaatattaaatgagaatacatttttttctgtcacttacccacgatgtagagaaagctataaaacttgagatatgtaatgtattctataaaattaataatgtacttttcttaaatgatatcacagaaaaatgatctcttagaattggagtatcatttagttttctgataaatgtccctttacagaggcctctccagccactcattcactttctctcacttgattttaagttcctgcacaggatttacccctacctggcaaatacttgtttatttatgtgtttgtttcttatatgtgtctcagttctagaatataagctaatgtgagaggagagaaattctcttgcatgcacagcaaaggcaatcaatatttattagaagaatggataaataaatataatttaatgtgatgaagttccttttcaatgaaactgtgtttttccatatcaccaatgataataccttgtcaccataagttgacctgaatatatgtcaatggctgaccctccagacttggcaatgagaaagttcctttaagtttcattcttgttctttctcataatggaaacagcgctacttcatgcccttgtctttttctgtcagaaaatcagaatgcataaactcagcaaactaccagttgctttattgtgcaaataaatccaatccacatcgcactttatgatgaaatgccaagtccatgacagttgtagaatacatccttacagaggtgtactgtgaaatcccacgtgatgattcccagtgtgttttataggttttattgacataataagtaagatatgtctgtcaaatggaaacatataacacaaaccatggaacactttgtccctatcaatcaagaattgccatgaaaatacatatataaaaatcatattttacaagcgtgacacgtcaaatccttgcacctccattaaggcccagtacaaattccaactcctttattaattcttctaaaatctcacactacccagaatctgtctctgaactccctcataagcctttacccatgtctgcattatatcatttaacacgttcttttctagaagagtaaaactattagtatattggtctttaatacataactttatatcataaagtctctaaaggtagtgacaatgtttgttttctttgcactttccaaactacccagcataatgccttattcataggagaatctttagaaatattaattatagatcacttttgtaagtacagactttatttaacacataaaatgtcaatatctaatttaaatttattttgaaattgaatgtattagttatgttcatgtgtacacgctttcagtttcacagattaattttatggtatggttaccaagatacatagcttctggtgacagaaaagatgggcctggaatggcggatgagtttaatataattcattttattttatgcaactaaatcactccaggccaacattccacctgccaaattcaaccaactattacaaaaatgtaatgaagtggtttctcaatgtccaaggacattaaagtaacagctattaatgaccaatgttcaggttctttctactttttcattcacaattattagattatgaggaccatatggatctttataaccactttctgggtggactgttttgactaagaaacaggttgtgaacattcttttaggtgtttttgaataatttcttcagaaaatttggctcctgttaattttagaagcatatgacttactacatgagcttgctaagcaagtaactgaaaaagacagatctttttttttttttttttgcagaacatcactattgcttttattagacaggagagggggaaaggccatcatctaaaccaatgattcagccacagattgtgcattgagcaactccagggggcaccacttacaaaggctacagtgggattggtgctcttggacccctggaatgcagtggtatcagtaggaagtagcaggttatcacaagcaatgttatagtaagatgggtagcatttgttaaggaaataataattttgtggtctgtttgtataaaattaaatggacaaaataaccctggaatccatttgtaggataatttcattgaaaagactcttacatgagctgtctcaatacagtgtctcaaagcaaataattgagtataagggctattgtgtgtgtgtgtgtgcgtgtgtgcatgtgtgtgtgctcggtgtgtgtgtgtgctgggtgtgtgtgctgggtgtgtgtgtgtgctgagtgtgtgtgcatatgtgtgtgtgctgggtgtgtgtgtgtgctgtgtgtgtgtactgggtgtgtgtgcatgtgctgggtgtgtgtatgtgtttgtgtgtgtgtgtgagagagagagagttgggtattcttcttgtttacaacactgagctcttctggactatgtgtgacaggaagatttatttaatttgtgtgaaaacccatttaagagaagcgttagcaatgttgccagtggtgtcagagaagtacacccagttagccaactgtaaaagctgcccaagaagcagttattatgcacctttaccttctaggcatagtctgaatcttactatcttccaaatgtctgcttttaattctatcttttggattggagttaacataagacataatttatgggactaatccaaaattgaattaagtaatagttattcttatttttttaaaaaataatttacatccatttgatgcacagcattgtgataagggctatactgtaagctcaatacagcaaggactttgttagctgtttttgttcatatatacactggtcccatagagatgggaggatctaaacagttccctgcacataatgcctaacagactttcggaatcacttattgactgaatgaagatatccagagtagaagaaattaagtagaataatcttttatttaataaagtttctgatatgaagattcatttgacacacacacatatatatatgcatatgcacacatacctacatacacactatcaccaccactaccaccaaaaagcaacaataatgatcgtataatgaaagcagtgtcatctatttgattggctgttgtagtgaaaacaatatagagagaaaaaaataaaataaaattaatacttagctcaaggcggggatagataaagaactctttttagagttgagggtacattgattttatctttgaatatagatacaatgatgatcaatagataagaggcttgtaatcatggcagcattcaagtggcattactaatacaggacttcttttttttctgaaaactaatataatgatacctatacccaataatgttaagcaataaaactttccacttacctgagtaactcaaagacaatttcagtcttgttttaattataaattagacagttttaataatccccagatttgtaacatcaaagtgtgaaactttatttttcaaacctttggcatttttcaatcttatgaatatttggaaaccttaattaacttggtgaaaaggctgaaaaagaagattatcagcatgtggtgattgacaggataatgaaaattttcttctgcaaaattctgatatgtttagtctgacttgagtttctccctatatcactacttatctcatttttatttttagttcagctgaatcactaaaaggaaatattcaccaatgtaacttggggagaaagattctgatcagaaaaccacgatgtttgaacctagtcaaattttaagtagaagtgaactacatctatctaagacaacattcttgattcctttaaaccttttcctcacttactaccagtatccttaaacttcaatttacctggcatgtacctgtctctatatcaacatctttcaattcaggacctatatatgatatctagctttctctttccttggtttgatcattttcaatcccaaaataaaagcaaagccttgaggctattcccattttattctgcattcctgtaagatttgacataaagtttctctaagtcgtgtatatttcgatagaataaggaaattgagccaaaatctgcaactacctggcactctaaatccactgacaatttgcagcatctcatttgtaatacctgacagaaattgaggcagctgtttgcttatgtatttgtttttacaaactgcttctccaaccatgattttctatttcctagcaacttcataaaaataccagaatatacttttgaaaataaaatccttatgtattaaaaaatcagaaaatggccaagagatatagggaaatgaaatatctctagccttgctttttcaccacataactagcaaaagtgaaaatataggtatggtatacagtgtcattaaagcttaagataaataggcactttgatttatacttggtgagagtgtatatatctgcacaacttttaatggagtagttcagaaatatgtatcacaggtaaactgtatatgactattgactcaacattccattttgaggattgatcctaagaagggaattagtactcaaaatgtatttacctaaatgtccattacaccattgtaggtaactgcaaagaaaaaaaaagataaatgtctatatatatgtgggcatagttacacaaattatgatatatttataaaattaaatatatagtcttaaaatgatttgctagagttatatttattaacataagagcttttcaaaaattaaaaagcatgatcatatttcatttatttagtaaaaatgttgattaaattttaccttgcatgaggccacatgtctgggccaggggataaaatgattagcctacagaaataggattcctggccaggcatggtggctcgtgcctataatctcagcactttgggaggccaaggcgggtggatcatctgaggtcaagagttagagaccaacatggtaaaaccccgtctctactaaaaataccaaaaattatccgggtgtggtggtggatgcctgtaatcccagctacttgggaggctgaggcaggctttaacccaggaggtggaggttgcagtgagcccagattgtggcattaaactccagcctggggacagagcgagactctgtcaaaaaaaaaaaaaagaaataggatttctgcctttgtggaacccacagttaactacaggagaggaaccattcattaaagacacatatacacacatgtacagacacgcacatgcacacacacccacaggtacgcatgtaataacataagagaagaattctgttagctgcctggaagaatagtacctggtatgctaggagtggggagctggggatattgttttgatgagagaagcaaagaaggtagaggtctttacaagcagaagtaaaatgtttcattttgaaagcaattttgcaaacaaaatgaagtaagtggcttgttattgaaacagaaataaccgtggcctggtattaaggaaaaaatagaaaagtaaatgtatccatgtgtaaaaactatacagacccctagtcccattgatcctggacaccccatagaaacaaacaaaaactaacctaatttttcatctgtgtttccatttcaacgttgtaaaagctgaggatcaacataaacagtggcattcctcagaaaatcccaacacaggtcagaatgaatggaatctcttagtgagaattctatcatgcagtgactataaattctttagagataaaaagcattttcccttcattatttggattttatttcaaggtacaggtacgtgagattctctcctctctctctccctctctcgcacgcgcgtgcacatgcacgttcacccttgctatgtgtgtgtatgtgtgtgtttgtgtctgatatgagtacttaagagacactggatattaaaacagcttctaaagtgtaggcgaatcaagttctaattcacaattgcactgtaaacttcggagtcactgcggttgttaagccctcttaagctcttctctgatatccagtgctggcttccagaacaaagaaaacaattaaaaagcaagaaaaaaaagtacttcaggacctgtgtgcagaagggtgtggattcagaaactaaacactttgtcttctataaagtggcacaagccataacaccccagcaatcttagtttagtaaattaacagtaggattctctctactttaattcaaatgcaatccaggcctaattactactgttcacagcacactagccatttctttgagtaatgcagggctgtatatattcccactgtgaaatccatgtttgattaggattcacattgatttctacccactgattgtgtgtaaagattctcatccaaattgatttatttttttctcctcctccgttttctttattttgccttctgaatggtagaactcaagaagatatttgtgtgtattggaagaaaatatttcctatgtttacatttgaaaataaaaataacacattatgaaaatattctgagaaatatgtggaccaacgaatgtttcatacatgtttaatcagtttataagataaaactgtgcatgggaaaagaaaacataagtcttgattacatttgacagttttgttgattaagtcatgggataagggtctccaatggcactaggcccagagaattagatgccattacctctaattcattaagacactttcagttgttatctcaagtggtcttacatagcccctagggaaatgcaggttataactaccagaaactagattcatcaccacacaaacaaaaattcttcatttcctgatttctctttcagaccttctatggaggaattgtctcgaccaacatgggctagaaagaaactaatcaaatgaaaggactatatttctttgaaaaaggcagttctgaccttttgtatggtcagaaatatgctaactgttgtaatcaacagccccagaattttagtgctttaacccaacatacattgactgtttgcttatataattcagtgtgggtgtcctgggggtggctttctgcgggactcaaagacccagattccttacctcttgtaattccagcctctctcaagactttggagtcttttctgttcctcaaggagataaggaaaaggaagtgcagcaccaatactttttttaatgggtcagtcttgggagtggcacacttcttcaggtccagagacacgagtgtctctaatttcaaggaaggtgagtaaatatggtctaatctagagatgtggaaggggaaaaatatggttggatgagcatctagtgagttgctatgacagaagaaaattcactgaggaagttattttcttttggaaataaaaagatacaaaataaaaacaaaacagcaacgttcatctttgtaaagtgtatctttagttttgaaattataaggtgaatgtacctttggttaggttaggcaacttaacacagcttattttgcttaatggatgttctagggataattattgtcgtttaaatatgtgaaataaagaacacttcctttgaattaccttttaaggaagtcagtgtttaaactgcaaaggcttcttaatagttaatagtagtgagagttgattttctgtagcagtagactctgtttgcaacagattgtatgagagtgccctttggggattaataataatttttaaaaatctcatgtgtttaatgtggaaaacacctcctaggtttactgataaaggtattcttagcaccatggagattttgtgatttttcacagttgatgatgattatttctaacggtagagtaagtaatgactttaaaaattcacactataagcttgaaaattcctagtgcttagttttattgtacataattttgcttactgtatcattaaatctatttaggtaatgaggcaaaacattttctgaagcttggtgggaaagtaaaatactttaagaataatgcatgactgaatatttcgtacatttcttatatgtttatttaattgaaacgtactcttggatcagagatagaccacataaatgtcaaaaagagattttaacccaggtattgcaagtgtaaatcatatttatcatcaggagaggtgaggagaatgtttaaaccttcctccattcctactttcagtttttccatagaaaaaagtatgaataccaaatttgtctgtattttgataactgttgattgaaaactattatgagtaggctacctggttagaaaaatacagagttgagtcaaacttggcccttgtctttcaaaaagcttacacataggggtagaaattatgactaagtgtcataagctgctgtgcaaggtagaataatacggtgagtgtgataaggaaaatgaaaataaaatagaccaacagttaagatgaaggaaaagcacgggaaagataaaggagaaacaggaaatggaagtaacataatcaggtaaattatgccaactatctttgctcagaacaaggggattgcgttcataggtaaaggaaatgagagcgaaaccggcaaatgtttgcaatggacattgaaacaaaacttaagacatgttagtatggcacttctgaatttaaggagatagtgggctaggcagtgaggtcaaggtttaaaagcagagcatttaattggcaaagcatatgtggaatgaaaaagtacagtctttgactctcccattcagacctgattattggcaacaccagaatcgcagtttgcatggaagctggttatggtttaaagaggtctggaggttgtaaaaatagactatgacactcagatgaggctcctgcgtgtattttatatttcactatccctattcttgtcctgacatctaaagcttccccttctaaaagaattgctgggaagaacaacaattttatagtcagacagacctgaatcaaattcctgctctctctctaatttagcagtataatttcaacatttctttttttaaacctaaaattacctgaagtaaaactgaggagaattcctcatttgcaggactattgttaggagtaagcaaaataatatgtgtgtgcaggtaagaaactaaaacaacgtaagtatgataatgatctgacatgactattcatttcgctgctctcctactttcatgtaagggtcaatttttccctccttttttgtattcctccttccttccttcctgtttaaaaattttattttagaattacagaagaatgattgtacataaaagctaggctacaggatttctctaccttacattctattatagcaaagaaagactgaatacaaaacaaagctcctagaaatcatactcaggttttaggaggagttgaatacagaaggaatgttcagagacatgtaaaagagaaagcgttccaaacccagcaaggacaaagtagtagaactcaaggtcagggaatgtaatgagacacagcataaaagaagcactgtcagacgctttggagaccttgatgtccatttgggtggaatcagggattgatgcttttcagtaagaagagcattaaaactttgaaatgctagtttctgtgatgtggaagggtagtgatttgtttgaagagagttctgtgtttgaggaaagatatactccagaaaagtggagtggaatagagaactgtggagaataatatttgaaaaatatgcgcttttttcagagcactcaactaatcattgaatgaaacacaatttcctttaatacgtgaaaaaaccttcagggtagatattattcatattttactttccttttctcagttcagtttttattcctgttaaaaactgagatactaatatctgcttaataggagaattgaaaaaattacaggttactattcaatgttcctggttcagtgccagaaatatattaggctctccttaaaaatggtagctattataattattcttgtcatttctatttacgaaatacagaacttgaagctcaagaaaattttatgattctagattatgacataaataaatattagaatcagtaccataatttaaacctgtttgtgtataatactgaagatggatatattctttccaatttatcacatttatttttcacttcaaagactttctcaaagcatttttttctttgaatctacatactatagagatattattcagagaaacaatgtgtgattttacttataattactaaagaaattctcataggaacctgggttttctgtgactttttatttttattttttgagacagagtctcactctgttgcctaggctggagtatggtgatgcgatctccactcgctgcaacctctgtctcctgagttctaagcgattctcctgcctcagcctctggagtatctgggactacaggcacgcaccaccatgcccaactaatttttgtatttttagtagagacagggtttcaccatgttggttagggtggtctcgaactcctgacctcaggtgacccacccgcctcggcctcccagagtgctggcgtttcaggcgtgagccactgcgcccggcctgtgtgactttttaaatgtttaaaagttattcagtgaataaccttatggagaaatcgtgatcctgtttatggtgctggtaatatttgttatttttttagctggtgtaatgaaactcacaattctgtgtcattttctctcaagagatatccaagaaaaggaaaggttaacatacattttttcagtattttcagagaaattgtctcacgtataggacatgttgaatttaacatcttgcatagcatctgccctttcatttttagctacgaaaagctaaatgaaatggctgttagtatacaaacagcattaggagagtgacttgtttcttatgtagttcttctaataattggaagaaatcccaactctggcagagtggaagtatttggaggattctcgttttttcttttcttgttgttcagctgaaatgttttgatcccacttaacaaggattcagtcttgcgttgttctttaagtaccaaggagatatatgagattgttttgaagtagatgatttattttctaattatcataggtagttaacagatgcatgaagaaagaaatgtttccacttgcctattatttactagaaaattaatctaaaacctatcttttcacactataatattcatccacaatcatgcattttaagtgcttcttgttctttcccaaatatatcaagaaccagtttctccattatttcagagattccaagcctagtgatttttaattaagattgcattttgcaagtccagtcttcgtaaatgtaaaacttacagaatatattttatggcacccactgaaagtatgaatataacaaaaaccctttctctattaaaatctttgtggaaaatgctggaagtttccaggacatacagactaaaaaagtaacaatgcttaacatataagactcaaacgtttttagacaaccacttgtgggtatacatgttttttgaatttcacatagctataattactagtatgtgtcaaacaatttaccacgcactgttatatgccatgtcttacactgccattactgagaaattccaaataacattgaggtcacattgactttggtacaaccaaaatatttgccagcattagacttttatcaataactcattaaccttctaacattttctccctttatacccactaatctatgacatttttcttgagttccttccaattttagacattttatttgaattatctttctaagtacagtgtcatttgcctctattttctgtgccacaagttgtacctttgatgtttttaaatttaaactttgcattttgatgtggaagtagcaaggattcccgaggctatgatctgatcggcaacagccaggctagcagcaagggaagttgagataacaacagtgggcataccgaaatgagcatactgttacaacacgtgttcgtagttttatgaacatattatggagctgacagatgctatgataaatttgtatgcagatattgtctgcagcataatttttatgtattccctttaaagctgaaagtgtatatgtctgtgagcaaatatgtattagcatacatgctttcctgcctgcctagttttctttctttgggacaaaacattctgccaccttggcttcccacataattaaaagtttctacacattattgatatttgtaacacctcttatttttgccatagaaatatgttgcactatttggctttcctttggggggaaaaaacctgcacacacacatagacacacatacacacctgtggactcaagttttaagagcatggcctaatggtgcatgactaccacattaaaagaaatgcattcagtgatgtcacaaagctgattgcctcagttgatctataatttggttcattaataaaagtcagcttattggtagtattctcgcaaaggcttcaaattattgcattttaagtaaaaatgggagtaagatgctaacatctatttctaaactttttaaaaaactaatctaatgcaattataacactagaatcctctgctgaagtcccacaaactttcgttcatgatttgccataaggaaacccagccccagctttgctgactagtaagataaatttatctttaccagacccaactctttctgccattctgctaagtcttggtggagtagctaaattaatccccccaaggactctttaaattgccagctaagctttcttggaacctcatcacaaataggcattatgttctttgtgagaaaaatttcgctctgcatttgatcagacaccttagttgtttgcttgatacagaacccttcactattctttataatattctacattattcagtttaaaactcctatattcacatttatatgttatgtatgtgtatgtatgttattatattttattttattttattttatttgagacggagtctagctctgtcaccagcctggattgcagtgatgcaatctcagctcactgcaacctccgcctcccaggttcaagggattctcctgcctcaacctcctgagtagctgggattatagccatgcaccaccacgcccaactaatttttgtgtttttagtagatatggggtttcaccatgttggccaggatagcttcaatctcctgacctcatgtaccgcccaccttggcctcctaaagtgctgggattacaggcgtgagctactgcacccagcctgtatttcatttatatatgcataatatttatatatgctttcctatatacaagtatatttgacattaaaatggattattaaaagtgattatgtctctgactgttggttcccttgaaattactgtgtgtaacatttccatgtgaactaacctgctttgtatcaatcctgcttatcctttattggtattttatcaacttgatttaatttaactgtagaaatgcttcagtttcctgtggaaattaaattagccaattgaattttagctgctgcaactttttgtatttagatgacttattaatgaccatggtcattttgtaccttttataacttttatttttaattttttttaatacaagagaaatactctagaaagtattcttaggtaagccaaattatttattttgtatggtactgactttgagtagccttaaataatgtccgctgacatagctatagtgatattaggatatataaaaagttatatgatatgcagtgttatacacaggaatattcctagaataagaggatttaagaatgttcttttatttaaaatccctgggtttttttgtttcaaagttcctgcagtacaccacactcaagcttaattatttaaatgtgaaaatcttccttaaaacagaatagaggaagttaagtgtttcatttcgaaattacccaaattgtagtactttgggccgctgaggtagtaggacctcttaaggacagaagtttgagaccagcctgggcaatatagtgagaccctgctctaaaaataaaataaaatttaaaaattcaccagtcatggtggtacacctgtaatcctagctactccagaggttgaggtgggttgaagtaagaggatcacttgagaccaggagttatggcgaggtcttatcgcactacttcactccagcctaagcaccagaacaagaccctgcttcaaaaaaaaaaaaaaatacccaaactttaggattaatattaaaggtattgaggtaacattttaaatttaaccttacatgagctacagttcttcatgatggataatgcatgagatgaaaaacatcgaaaaacatgctaatcttccaaaaagaagctcattctagaataatttgaggctttgggagataatatatttatgaaaaaaatagaaaaacaaattattgtgtcataaaagcgattatcccagtaatgaggagcaaccccaaactggttgtgtgacattgatatattttgatgattgactatgcccagaacagctgattcagcagggcagaagaaatgtagttttggcaaaggtggcaagaaatttcagaaacaattacaaaattttatctctaccacctgaagtgtagcaaattttaaatatttctttgattttgaaaggccttgttaatcatttctttgattttgaaatgccttgttaattctttttactgctaatcatttgtgctctctgaccagcataaaacagctatagaacattaatgcatcacaagcaactgtaaccaaattaaaggcctataagtccatttttttggtgttggagattctgtgcctatttcacctaatgtacttttaactaaccatgaactaaaaatagtagcttgcttctgaagatggtgggtctcaaacatcaaaacagagtcagaaatgtcctaggtgcccagacatctagaggggcgctcagcagatgggagtcaatggagtctagaacaaagtgttggattagagtgggttctgagtggagcatgaaaaccagatatttgcaggcacagctgaaggctttgagggcacattactccagcattttcctgggaaatagcggtgctattataacggtttagcactgacaagtcttggctcatagctctagcaaggaagtttatagaggactttgaagtcagacatacttgggtttgcacattaaatctgccacactccattcatattataccctagatggagtggtccagaattctaataagtgagtagaataccagatgaagaatccgggcaacatttggaaactccaggcaggcagataggcctgatactgtagatctggtatgaagcccttagctctgggttggggttcaggcataataaagttcctaaggatcatacactagtctaggcctcagtcttagaatggaccttggcaactctgtgggttctgagcataaagacagagaaagaaagactaatgcagaagtagtttagaaaacaaaacaaacccactagactaggctgggttctaacaagtcttgaagaaaagctcagttttctagtcatgaatgaattagctactcaaaagacccaatgcagggctacaaattgtgaatttgtagctctgcagtcattagtacttctaactatgactgacaggacagcctttgtgtgggttgcgtgtgtatgtttgtgtgtgtgcatgtgtgtgtgcatgtgtgtgtgcatgtgtgtatgggagtggtgttcagcagcaagactgccagttatattcatttgtcctataagacctacccttgctgcatcatctcagcaatccttccttgtatcctcaaattgctttgtcttctttagggccagctatttagtactaggatgttattcttcctcacaaataatggagaaagacatgtagttatttgctcaattaccaataataacccaaacttttgcatttaggaatgctatctgaagactagccagggttagctatagacaaagagggaaagaaaaagaaaaagaagttgaagtttgttctccaaattgtgtcttcaggataagagccaagttacacttttatttacatataattttaatcatgaacagcataatttcatcttattttaaattattggtgctaagaaaaaaacaagtagaaaaaaagactgaaagttttagtgaatttcaattacttatggcttagcagcagtaactgaagagctaatttgtttagtaatgaactttatctgcaaaagaaaagacaagacagctactgaattcaacaacaatgacttactctccagtttcaagcaaaaaaagacaatagaacttgtctataccattcttcagattggtgaacattaatcatgttttgcttttttaaaaaactacaagacagttgtataggggcaaagaacatgttgatgatcataattttgtttattgcagaatgaatatttgatggtttctgagcaaataagaggtgtagggcattttcccaagaaagctctcttgaagatactgaggcagaaaatgcatcatcccagatttcaaccagtttcctttctagtgatgtaggtaagatctgcacaaaagtacgtgtaatataaagacaaatggggttatttgaagaagagttacaagtggtggtaatatgaggaggatggaaagatcatatttgatgtaggcctggaagaggaaagatggttaagattttatcaagcacatataaagtgattaaacagtgattctcaatgaggagaatttttgacacctccccgaccccccaagggacattggcaatgtctggagacatttttgtttgtcacaacaacggggatgcaactggcatttagtaagtagaagtcaagaatgccactagacatcctgccatccacagtacagcaacaaagaatggtccaaccaaaattgtcaatactgtcgatcttggaataaagaatcatttcaagtagaaggaagaatattcacaaaagcaaggcttatgtcctttgggaaattctgtgtggtctagtttgcctgaggtatagattatgtgaaagagcataagataagtgaaggctggaaggatagtttatgaatggatgcggacagatgttgatgtcagattaaagaattgtattttcttatttgttggccttcccaataccaactaataaaatatttcactggatgtaatgcaaattaaaagaaaaaaacttttattattcagtgttatttcaaatattcaatagattttgttctttttaaaaatttctttccatctcagtgtaaggaattaaaagggcctttggaaacatatacaactaactctttagaagaatattcctattatctgccagtttccttcaaacttacttacaaagaataagagatcacttccttagataagtgctgggattcttctaacttaagcctttcatgactttcctccattaaatgtttaattattttcaaggcatttcatgattattttaattacacataagtagtacgtaatatctatatggggctaactcattttattgctcaatctccgaaagcagcaagataaagtatagagctacttattttattttcaattaacttgttaaaaagttttagtatatctgccttagtaaaattatttgtttataattatctgcatgtgtcaggctatgacaaacaacttcttaagatcagagaaactttttatcagatgatacgcccttcttaaaaagtttggcctctaattataggattatatttgtataaattatacgcaagatcatacatctagagaatcctcatgtggctcatattctttttcaacgccaaaataacttttaaaaatgtataagattattgcatttaagaaataatacatggctggaccttgtggctcacgcctgtaatcccagcactttgggaggccaaggcgggtggatcacttgaagccagatgttggataccaaactggccaacatggcgagacctcgtctctactaaaaatacaaaaattagcttgttgtggtagtgcatgactgtaatcccagctatccaggagtctgaggcacaagaatcgtttgaatccaggaggtggaggtttcagtgagccgagaatgtgccactgcactccagcctgggtgatagagtcagattctgtcaaaaaaaaaaaaaaagaaagaagagagaaagaaagcgacagagagagagagaggaaggaaggaagggagggagggagggagggagggagggagggagggagagagggagggagggaaagagtacatgtcattgcgagcacttgatttttacaaataatcaaaatgagttatcttaaaatcaaaattcaaatcttgaaacaatccattttatatgaaattagaagataagaattttgtcatgaaatgatgttttatcttagaatctattaatggacagttagggaataaggaatagattttgtgcagtaacttttcctttggtcaagtctctgccttttttggtaattattcacataatagtgtttatgactttttttttgtaattcttcttgactcttctttatttaagtttacttttggacaggaatcatagtgtgttggtaagcattcagaaaatacttatggaatgagtaattttaaagtaatattatctgatttttttataaggcagtttcccaaaagtacaaaatatgaaatgcaaaataaaaataatgttaaagcttcatgtaaagccaatagaaatgtacgtttgttaggtccttaaaagtggacctcacggatggtatcttacagcaacatgctaacagcatgctccatcaataggtctatcaaactatgtgcagcagcctaacaaattgtaaaatattgattgaaatgatagcatgtctttttaagcttcaccaggaaaagatagtaaaattagagaatctttattcagataacagaagatagcatttcaatgcattgtattaataatagaaatataacaaaatggagtaagaggatggggagaaatatcgagaggactatttttgctgcagaatttgcttcaacatgctaactccaattgcgtcatgttatacaactggaatctacatcagagcttcaaaacttcaattcaaaaactcacttcacgatataaaaacaagcttttggcaatgctttttattcaacatggccccttacttgcatagacagtttaatcattacaggcattacccgacatcccccttttaaaatcatttctccatccaatcctttaactcccagtgcttcctaaatttctcacctccactttcatactcacttttatactcagttgctacttttctgtagctctttgtcttttatattagaaactatctaggctgggtgtggtggctcaagcctgtaatcctagcactttgagaggctgaggtgggcagatcaccggaggtcaggagttcgagaccagcctagccaacatggtgaaaccccatctctactaaaaatacaaaaattacccaggtgtggtgatgcgcccctgtaatcccagctattcaggaggctgaggcaggagaattgcttgagtccgggaggcagaggttgcagtgcgtggaaatcacaccactgcactccagcctgggtgacagagtgagactctgtctcaaaacaaacaaacaaacaaacaaaaaactatccagatttatcccatccagcaaaaactcaatttatcctatcttgccacaatagtcctccctaatagatttctcctgcctccatcatcttccctttcatcttctatcccttactttaattctctacatcgagttggaccttggcttcagaggcatattaaatgcttctctttatagaaaattaccttccctcatgcatcacctcaaaaatctaagccaagttacctaattttaaaaggaaatgattgttcattattagtaatatactttaacaataattacgatataaacagaaattgtgtgcattaaatattatggtttttgattttcaaatttcattgtaaatatagcaggggagatgttacctattctgaaaacacatttttacaatgaagacaactaaagcgtagccgctcagtacttttacaaaatttcagataaacatcagaatttagaaattgctactttaatattatctaagtctcattttacctactagtaatgctactccagaatttttttaggattgtaaaaatctatcgtcatttcatcatttccctgcccattgcttccacatttatcctataatctcgccgtctgtttcactgacatggcagacccagagggcagggagcatatcttatctgtgaaatgctgtatgtaagtgtggattctctgtcagcatttaaaaaaaataatagaacttcaaataggattgatttaagcctccctagtcagcagttagtcttggtgacatgaatcactctttcaaatggtaatttacacctgttacctgcatccacaggttggaaaatgcttacaccttaattaattgcacccttgtgatgtgggagattgtatcctcaactctgagacagggagattagggaatagagaatcaacagcttttctaatatttcaaagaagagttttgcagaagaaaattagaattcaggtcacttttcattgaatgatcgatgaggttctttaggaatctgtgctctcatgggagaaacatggagatggcatctcttccagtaagatatgtacttgtccttagcttatgcggtagcatcaattcaatatgacctcagcaagcatctatgttttttttccttttttcccttttttttttttttttttttttttgagacggagtctcactctgttgcccaggctggagtgcagtggcacaacctcggctcactgcaacctctgcttaccgggttcaagcgattctcgtgcctcagcctcctgagtagctaggattatgggcgtgtgccaccacgcccggctaatttttgtatttttagtagagacgaggtttcaccacgttggccaggctggcctcaaattcctgacctcaagtgattcactcgcctcagcctcccaaagtgctgggatcacaggcttgagccacagcgtcggccacatctatgtttcttaataacacttttgctctctgcttctgtagtggctgatatcatcctcagaaccaaagagcaggttgcatgcaaattacttttaggcgagcatgacattagaatataattccccaaatggtagtgccaccatgtaattaagctacaactgatgacaagtatctgacatcagataatcatttaatagaggaaaatgggaggcagttcattattttaaaacatgttttctttaaagttccttgaggatgtggaaggattttcttggctttcaaatgatttcaaaatgtttgtgtgtaattattttttggcaggttttagaaatatatttatggtagcgataagggtttccttggctgacatcactaaatgttcataagacctgtaagtggactttcacctttgattttttccctaccagagcacatgttgtctgggttaatatgctttttgttccttaaacttgaacaaaatcttaggaagtgctaagatagaaactttataaggtattataaatgtgttttacacaaaatgtgaagggtttattgttataatagcttaatctgtactttgctaagtctcatttggtctttttcactgaacatagaaactgagaaattgtagttctttttttgtatttttgagatggagtttcactctgtcacccaggttggagtgcagtggtgcaatctcagctcactgcaacctctgcttcctaggttcaagctattttcctgcctcagcctcctcagtagcggggattacaggtgtgcaccaccacacccggctaatttctgtatttttagtagagacagagtttcaccatgttggccaggctggtctcaaactcctgacctcaagttttctgcccaaaactcggcctcccacagtgctgggattataagtgcaagccactgtgtccagcctgtagttcttgaagtataaagataatggaagatcctatccccaaaagactctgaaactaacatttttacatacatgtgaggtcaacttggcaaattacaaagagaaaattgaattagagagtgaactatataatgttcattctttcatcgaaaatgtttgattatttattgtgtgcaaaacactatactgcactaatagcatactctgttgtgcttgtaactctaaagtcagtacgactttgaaaattccatacctgtattagttcattttcacgtagctaataaagacatactggagactgggcaatttactaaagaaagagttttaatggattcacagttccacatgtctggggaggcctcacaattatggtgaaaagtgaaaggcatgtctctcatggtggcagaccagagaagagaacttgtgctgggaaactcccctttataaaaccatcacatctcatgagacttattcactgtcacaagaatagtgtgggaaagatccacccccctgattcaattacctcccaccgcgtccctcccatagcacatgggaattgtgggagctacaattcaagatgagatttgggtgggaacatagccaaaccatatcaataccttactaccatctttacctctccaacatcatctcctgcgttttgagttaatgttatttaattgtctcatgttattttctgcatttctctaaccccatctctgccttgttctctatccttgaaaactcttgcctgatctccctgaaattcagtttgttcatctgtatgttgggaataacaatgtaacctaaaaattgtgaattaaattaaataaattcatgaaatattttgcttaattattagcatatactagttaagcagcgattacttgctaatattgccattattgatattcagagttcagcttagatatcaggagctctcctggaaggggatctccctggtcccactacactgtgttcatacttctatttgcaagtctagccatgttctatgttactgggaacctaataattgatgagtgccttgagaatatgggccatgtgttatttcttcctgtatcttcaatgattaaaatattcaaaagtctcaagtgttggaagaaatgctctagaatatagacacatggctgatagtagttgggaatattttaccttctcccactgaaagcaatcattctttcatatccattgctctcttttctaaaagaaatgctggtgagtgtactctagagacatttagccagttctcacttctcccaccccttctctgctgtgaggccagcatttgtggtgtggactttgctttaaatgctggaaacctagaggaactataatatcataatagtatggtgaaagaaggaggcagcagttcaagtagacaggtctatgtgacaagtgacagatagatgatgggtgttttctggctgatgatcagagttcattgacacagaaagacagcaacaagcaatacttggaattcaggtagtcaagtagatggattcaataaggtttggcagcagatggtcagggcccaggccaagactctggagagcaatcctgacctgcaattctagaattatggctaaggcagagatcttgttgtcgaaaataaattgcacaatatggaaaagacaggtattctcaagggtttagccaaactacttgcttctggggaagagttccgaggagattgtttgatatctagtattctagatcagtgtttaagatttatcagtaccaaaggaaggttgcacatgctttgtttttcttaaatattgttctgtatgtttagttcctgaagttcatgttaaaattgtattataattattatttacattacccatgataaatcaaaacatttattgaaatatactattagaatctcaaagtgatgaaaccaaatatttcttccttagaagggtaaacttaaatataagcaaaataaatacaaaggtagccagaggactatttgagatggaataagaaattataaagcagaaaataaatagagtttactgctgtcttatttttcattataattttaatgaattgtatatcttcaaaagatattattttatatttttcatttgtgaattgtatatacatgtaattacactgtatatattctgtgacttgatttcttcatcagaaattctgtttgtgggattagtccatgctgatgtgagtagctatagttccctgattttcaatttatgttgtatgttattggaaaacattgtgataatttacttatcaattcttctattgatggacattagaatcctttctggttctttgctatatttatcaatgctcttacctacactttcttgcagcattctatgatctttgtatttaaaagttccagtccacataaatctgctgttaaacctgagataagttactttaagtcgaagactccttgtgtgtatcataggaatgacagcagtaacttaccagatagtgttttcaaagagtaaattagcatataccaagtgcttaatataacacctccccataagtgcaaagcaaatattagctattattaatagtattactcaaaagcaatgaaataatttctgtaagaattatcaattctaaatatcaaaaaaaaaagctcacatttctgctcagtgtggtttaaagctccaaaatcaaagattcaatttggcattctcctttagcattttaaagttcactgcacttttgtgacagtgttaggatatttgaatgtccatctcaactccttctaccatcagaggcaaatattagagctgctctaaaggctgaaagccaattgaagggtcttcctcattaagaagaaggaacatgtcttgaagtaaaatagtctgttgggtacagtttatagtgttgttgttttgttttgctttgttttagagatggggtcttgctatgttgcccaggctggagtgcagtggctgttcacaggcatgactgtggtgctctacggccttgaattcctgagctcacacgatcctccttcctcagcctcccaagtagctgggactacaggcacacaatgggactttgcccagccatagtttatagtcttgctgcctcttctctacagtgcccagtcatagctcccaatagccactgctgactaacccctattctgatctctggaacaatataagagaattccttgactctacacattctaacttttctagaagagcaactggaagacttatgttttttctaactgttttgctggtgtatgtatgtataggcacagttcaaaacggaatgaaaactcagccaaatttcctcttaagatcacggagtaaattataagcaataatctcgtgattatatcttcaaaacaaaataggtaaatttaattaataccaagccaatagacagaacttctagacattcaaactaagattgttctcccctcatgtagaatctgcactcagtttaaaggttatgtgcgtagatacaaacagggggcttcagaaaggggttccaagatgatatagtgctgccttctttatcagtagtgcaaatgcccagagctgaatatttgttttactttaattaaatcaactttattgaaataatgtgcataatttacattcagttaaatgcacagtatgtttttcgatgtatactgcagtgtgtcttgacaactctgtatacccacgtaaccaccactccaatcaggatatagaatatttctatcacttcaggaaatttctttgtgcctcctttgaatcctctcttccattcttccccactcttccctgactcatctgggaatcactgttctgatgtttattaccatcttttagtgttgacatttcttgaacttcatatacatggaagcatgctgatgtaaactttatctggctccttttgctcaattaaatgtgcatggtgttcataaagggaaaggatgttcttaaattgatttttgctgtaaaattatattcacttaaaatttgtacatgtacaatgatttaaataaccttagttcaaactaatatgttgtatcagttgaaataaacgagaattgatttcatttcggtatatagggcatattcaccattaatcagaaactaaaaacatttcttgagtttaggccaggttggccaagtaaaaatgaagcaaaaatttactcattcagcagttcattaggtaagcctttactcatcacatgttaaaccaacttcaaaattcagtgatgtcctaaaaatacgaacaatttgagttaaaaaaaagactattttttaagacccaattttcccagataaatcccctctggcatattttgttggttgagaaactaaaaatcaaattaagaaaagctaaatcatctgccagttagttactaaaagtgttttcctgcttgccaccattcaaatgatgtgtgtgctgagaaaaaaaaaaaatcctggaccagaaaagcacatggggttacagagttgtggaaaaacattgaaaaatatttgtccactttctgagaaaggaaaagtacaattgctttttgacagtgctgacttctgtttaccggggcttgcattataatctccatccttaaaattctgtaatacttcacaaatttggaacatcaactctataagggatttagttttatgcttgcttatccatttatgtgagtctcaggatgaaattctaccaatacgtcttcctgaaagaaggtgcaatatccattttcttctgaagtgtctcttctcatgggagttacctagtgtatggtactgtctaactgcttttagaattgtttgcttggttattattccggggatattttttgagtgatgaaaatattttagtaatacattggcttaattttcaaatactggcattttatttttattcaccttgctttcttctacttggtgtattttaaagagcatgctccttgcttagcatgatgaaatgcagtcactgctaattatcatggctgcaattttcaacttcacaagtgaaaatcaaaccacagactcctaagtgctggaagtcatgcaattctaagcaaaatcctgaaggagcacgacacagaaggccagttaaagttaccccccacccccttgcattgagcagtcctacaacgaaaagaattgtccccaactagaccattgtttcagttggcattgctttgctagttatttacattttcattagggcagggcaatttcccctcaaacaggctgttgcaatttgtttatgtagcgttttcatccaatcaatatgcttctttatgatgaagatgcagaaatgccaccaactggcttgggctattttttaaaaaaataatgctgctttataaaagcaacttttactatttctgaggaataaatgtcatccaaggggcataaaataaaccaagaattttaaaaagttttctgttcatagaagtgaaatattttttccttcaagagagttgtgtgcaacaggggacaaattgtagcaatgggagtaggaaagctaatcaaaaaggtaatcatgtgaatccaggcagcattccctctgcagcaagatactagtgtttctgatcgacaaagtatgcagtgagttagggcactgaggttttcatcggctgagtgtgcagcctcagtaatgtagaaatgcagagcactcattcatatcatttgaatgagcatgtttcaaggcttgatttttattcatatgtttgattgattgtcattttctctcatccctgttttctagataagataggaggatagcaaagtcaagcaatgctttcccttctagtcatcaaattagagtaacagcagtgagtcagatactcttgttataaagaacaaccatatattttttcccagtagaattctccaatctctttttgatctttgcatgctgtattaatgactgttaattacattgacatggagaatatttgatttttttgatgaacagtgttgcaataatttatgaaaactatcatgcgtgtgtgtctatatgggtatgtgtgtgtgtattttatatttatgaatcgtttatgcagatcgtttcaagaaaagggagtcttgtaagttaactcctaacttagtttctttggggtcctgtgggaagcattggggaaggattagatatcgaagtcaaactcaaaaattttactctttagggagagacaattgcacaaaaataaatgtgatgtatagtaaagtgtaaaaactaccatttgaaaaatgcagatgatcagtggtggataacataaaaaaagagattgttttcagcaaaataatgtgcataaaggaattactgtaaagtttgatgtcttgttcaattttttgttcctttaacagaatacttgagactgggtaatttataaagaaaagaaacatatttattatcgttctaggggctggaaagtcagaggttcaggggctacatctggtgaggggccttttgctggtgcagagtcccaaggaagcacagggtatcacattctgaggggctcacaggagacagccaaactagcctatataatggcccattcctatgataaccaactcactctcatgataatgcattaatccattaattcatgaatccgtgaatggatttttttcatgggggcagagcttctataacccaatcacctcttaaagacctcatctcgtaatactgttaccctagggattaagtttcaacatgagttctggaggggacaactattcaaaccatagcatctggcataaaataatgtgcttcaatgaacatatgcgtgcatgtatctttataatggaatgatttatattcctttgggtatatacccagaaatgggattgctgggtcaaatggtatttctgcctctaggtctctgaggaattgccacactgtcttccacaatgtttgaactaatttacactcccaccaacagtggaaaagtgttcctttttctccacaacctccccagcatctgttgttttttgacttttagtaatagcctttctgactggtgtgagatgctatctgattgtggttttgatttgtattctctaaagattagtgatgttgagctttttaagatatgtttgttggctgcatgaatgtcttcttttgagaactctcagttcatgttgccctttgctcactttttaatggggttttttgtttgtttgtttcttgtaaatttgtttaagtaccttgtagatgctggacgttagacatttgtcagatggatagattgcaaaaatttctcccattgtgtagattgtttgttcactctgataatagtttctttactctgataatagtttcttttgctgtgtagaagttctttagttaatattttcaagaggttaaaggaggatgaggctgagcagttactgagtttacaaaggagatcactgtaagccttcaaggcaattgctttgtcatggtaaaggcataggctaaagtgtaagggacttaaaattaaatgggagctgagaaaatggagctggctggaagtagtttacctttctctaaggatatctaatgatgagagaaaggagagaagatggcagcttctggtgtaacttatgcctaaaagtggcaatctcttagggacaacttctgtttatttaaatacataaataggtcagtaagtaagtaaataatagtggtgcctaccattaagaaacaatgaggagagggttcattcagtataacagatgccacattttagggggctggaaagaaattagcaggttatgcagaaagccagacattctcaagattaacaaagtggactctgggatttttatacaaactgtgcagagaaaagtcaaaaggtatacacatgtctgtgggcacacattttaatactataactgtggctttttttcatttatatagtgtaaattttatatcccatatttctttaagcataaatatcctatgacaacaaggtattatggctttctcccttttcatttttttaagtgtaattatcagcaagaagaatgcattcaacagacacagaatattgatttcatttttcattgattgacatttctgtgttttcttatgctaggaggctaacaactttcaattttatgtattttatctagatttttaaaatataataatgatttaatatatgtgggataatacattactaccacatttgtgcactagagttattctaaagtactaagcagtgaaacagacaaaaatgtgagtgttgttagtaatataatttggtgttttaacaaacaataacaagaatctctaaattaattaattggttattttaataagcttggagtcctttcttaggaaaataaaaataagattcactatagctgtctttccttttcaggaggagggagataaagttagttacttttatgtatttatcaattttcccaagttgaaacacaagtaacataggacctgcagtgacttttggaccctgacttctctgcctcaggtttaatctcaagctatcaagttttggagagtcccctaagtattttatttttattcattttatttatatttcttttgtggcctagcagatatacgaataaccagttagattttttaggaagtaagccagcatattaatgaatgatttgtaatttcaaggtagtttattaatttattctagcatggtggtgacacagaaattactgtgactttagaaaataaaattaatttgagctttagagtctgttttcttgctttcttaacttctggtactttatctgaagtggaatctctgatgctctggtctttctgatgtgtcttctctctcttttttctttttgcactttttttccctagggatttgtatttcgattgcaaaccttctttgatatcaggtttcaggaagtaattgtacacagtatctctctctgtgtctgtgtatgtgtgtcaaagggacaatatgaagagccagagagccatttccgtagtgaacataaaggttctagaccaaatactaaattaagagattcacacttacactgggcattccgttcctgctgtcagaagtcataacatgataagcagaacggtagctgatacaaatgatggtagcatatttaaaatctttggtcaaatgcagttcctgatttgctacagtttgggatggctacttgttaataaaatatttttggttgaaattcttagtaaccaattgataacacttttcataaattcgattattgcaacctatctctcctgtaattataaaaaccaatactaccccatctacatccttgcattaagctggtagtactacaaaggctgccttttgaggacaagtttgaagaaccagtgtgaacagttctttcattgcacttgtatttttcgaagcacactgattctgatacatgaaagaatgtcaattttacctgcagcattcttgaataggtagctggtgccaaatttcagtagcatcctccagagggcactgtcacctgttttatatactgtataatttgtatccttttattaagatgctgtgcaatacttgaagagttattttaatctatttttatgtgaaatgcaatcacgcattctttgcatcatccacaaccctgctatctacagcagcttcccctgtccattgttgtagaccatgggttgacttgtatatctgtatacaagttttatatcagtaacattttgtagattgatccacctaggctaaatagtccagtctaggcctgtttaataaggatctttcacaacacccccacttaaccataatttttcccttttcttattaaaatatactttatgtaagttatcttacttttcaccatatttatacatatgccatgcttggctctggagtcagatttcttgggcttaaaataccagctccatcagttagactatgtgatatggaccaatgacttctcttcttgggttattaagaagattatatgagttatatatgtaaaatactaagctaatctccctaatataatatactttgaaagttctctattgcatttgccatgactcaaataatcagggttacagtttgtgaaatttagttgaactctgatgattgaaaatgtttaattttttttcaaaatgtaaaggatgctttttatttctcagacatagagtttaaaaatctcagttttttaaagcatttccaaaagtatacacacacatgcaagttatagttttacagaaattctcttctaagtgacttagatttaattattcaaagaggccgaatctattgagttaaatattccaaagcataacaaagtaaacagtttaaaataaattctttttgtggaaatgttacttacatccatcatattaaaggtttggagattttttgcaaataccacttaaaaggaaaaatcaattagttataattttcagtttgcacagaaatagctgtatatacattataaatccaacataagcatttataagtgcaaagagggattgtttatttaataattgttataaagggataaatgagaatgaaaggacacagttgctgctataccattctgtacataatagtgcttaattgtatataattttgatagatttgagtagttaagttttaatattctcaagttcactaaaacacaaattttttgtttgttttttttaaataggctcaatttccaagtagttgaaactttcctttttctctgattacacaaatatcacataacagcagttttaaaatcagattacatggactcaaaatcttctctaagattaaattcatgaataacttcatgtggatttctcctcagctgctgttgtgggcaaatgttcaaatacaaatttcccacgcatgtgtacactaccctatagcatgattgacaatttgtaagctcctaagtgcaaatcggtggtctcaaaacttggtcatcatttcatcttttttgtttttaaattcaggaatcataaacattgggtcatgtacagctgtatcttttggacaaatgctcactgtcataggagccgccatccctgcctttccctgattatctagcttctattcactccataggagtcacacaattgtcatttctcccttctcaaaatttacttctcaaaatgcactcatttgtatcttaagagaaatacagtagaggcaaagagagaaattattcagttttttgattgattggttgactgactgatttcagagctttctttatgagtttcttatatttacatttagaaattgatgttgctttgtcaagtttgtcatatttaattagctcgctctcataattgtgaagataagtatagctgatgccttaacctatattttattcttgttgatcattttcttccttgaggctcctatttatttctgcagtcataaatgacttgagagacaagatttaaaaagtgataagttcccacttgataggaggtctgtttggtttagactgtagtgacttcttaaattaacatttttaaatgtccacatgcatagatgacttgtggtttatttatacatttttaaccataataaattttaccttatggttgcatagtagttatactcctcaaaactttaattaagcagttatctatatgagtatttgttagaatattagttccatgaagaaagggactttttcttctttcatataattgtatctctactatctagttaaagattggtacagtaaatatttttcagaaaatatgtaaaataaatttattattaactactaaatgctgttaaatgacaagaaaaagaatatctcaggagtcttgaaaggtagaatattaatgagagatgtttctggatttctttatggctctactcagtcctcagacaagaaggtatacatctatcaagtccaaaaacatgttaacaatcagagtatcacaattttgggtaaaatttagtcattctgttttcaataaagattacatcccactaaggcatgtaaatattgacactttctaatccatggcaatataattatttttagtcttcaggcttgatgccagttagaatctttccatgtcagtagaattcaggactaatttgctgtgattagcaaagaattactttgcaggctttctattcatttatgcaaggacagacctgttaattccaactcactgaatttatatgggatgcccacaaaagtccttggaagcctcaagcttttactacaaatagttgatttttccatatgccagatactcagcttttcaggagaaagcatcccactagtactgttgaaaagagagagagagaaaaaaaaaaggcaaagcttaattctgtaagtaaggttgctattgccactcagcaaaggaaatcgcacttaacccactgcagtgtaagctcttcttccaaacaatctggaaagaacattatatgaaaatgttgtcatagcagagctccacaatgtaaaaggacaaattgccctttgagaataaaagtatagtcaggacaaagacaaatatgatgatatgtataattcaactgtaaaccagaaacagaaaaacaagctgtggatatcatttaaaagtaatttttttaattatactttaagttttagggtacatgtgcacaacgtgcaggtttgttacatatgtatacatgtgccatgttgatatgctgcacccattaactcatcatttaacgttaggtatatctcctaatgctatccctccccactcctcccaccccacaacaggccccggtgtgtgatgttccccttcctgtgtccatgtgctctcattgttcaattcccacctacgagtgagaacatgcggtgtttggttatattgctacttgaaaggggcttcaaggcaggcaagcaaaagtgagaatagagtaattgtgagtgttataggtaagtataacccatttcttccaagtcattattagggtgtgatttacaagttcagtgataggaggtataggccctagttaggagaaaccaggcatggatatgcaagagtgacacagacaatgtggggcagcctgggaagcaacaggcaagaaataagctacatttctttctcttgctagtaacagggatagggcttaaatcgttgatattgattgtatctgttcattgcactgtaagtgacagaacacttgacccaaattaggtttaggtaaagagaagttcatcagattaggtgtccaaaaagtttggaatttgatctggcatggctggttacagggtcagacgccttcatcagggccctgtttgactctcttcatctcttgatctctctttccatcctcagacacgatatctttctgtgattaaaatatagtacctgatagccattccagcatagtcacatggtctccagtgaggtcacgtggacatatttgaaccaatcattttcatgaaagataatatattctgattggcttaggcccaaatcaaatgtctaccccaagcttagggatgggattatctctgcagacacatcatagcctaaaagctgaaaggggtagttttctgaagtaaaatagtatatttacactaaaaataggggaagtggattctgagtggcaaaaatacaaatgtctactttattggtcaataaatcaataattacagagagatatgggcatatctctctggctgtgacaggaggtgcaggactcagcagttccttttgaagttccctgtgttcagtctatactttggcttcaagaatatgcttcagcaagaagcagacagagaagagtaccctcaggcaggcttttgccaaacactggatttgtgtcagattcattgcacatcaatttcgagaaaaaacttataaaaatatcctgattttggaattggatgttgattctattaccattgtactctgctatgtagactacaatattattatttgttatactgacaatatgtaggtgggggcaagtctggaaaataaattttacatgacacaataattgtactgacagttacattggctcagaaataaaatagaataatgaggaaaaataaaactatatatactcagagtgcaaggactgtcctctgttcagagacttttcggttgtaaaagatgtcttctaaatatgatccatgcttcattgtgattgcccttgttcaagtattgattaggcctgtggacattaatgacaataatgtgatgtaaaaagattttatggtaagcatctcataatttactgaaatgatatttatactaaagagggatgtgaaaatttgtcttgccatttctaagaagcacatctttataattaagttacctctacttctacactcactggacaaaaattggtgtaattaagtagataacatttgtaggatactttagaattcacagaacaggttcaaatactttcctcaaaaatcctgtgaattcatatattgattctgtattttagagattgataataggactgaatatatttccaggggtcacttccctgcttcacatttatagctaggttctctgcttcacattgtctatcctctgctatgctcgtgtgtttcaaaaagggtgttacttgtgaatagcacctgaatcttaatcgcttagttcacataattatttatctatttaactgactaatttaactatttcactatttgtgtgatttttattggacctgccttggtaattccaattctttcttcaaaatattgcctataagccactctttgtttaaggtcttccttgaatccccaagcaaacatgccttgtctatcatcacagccccaccttacaagcatctgttagcatgtctcactccattataatgatgtgtttacatgactgtttctccaactgaactgtgagtttcttgaagacagagaccatatcccctgcatctgtttatcttttgttactagagctccaggagtgtggcacctgaaggttaaccagtgtttgatgaactaatgaatgaatcatacacaccaaaaatagagcagcagaactataggatacagtgacttactgaggcatagtgaagctacagataagtaatctagcttccagccatagaataataatccctggattttatatgtaggtttttaaaaattgtttcctcatagttagaagttgccattctacaattatattacagcttgattctatttctttattcggatattaaaacccttaaataatgccctttgttttaaatttaattcttaacaagtaaaataaaacagcagtaaatcacatgtttataatgggtagcagcagaccttaaacctttacagcataaaaatagcagtctcgagttgctaacacatcaggtatgcaatcttctgtagaaaaatattacacattgtcttaagtaggagcagacttgatcttctcaaaaccaaagcattgttgggtgtgtgtggggggcgggtaggggaattgttcatgatatttcatttatttaatatagcttcagcaaataatagatgtcctctaattttgtgatatttatccttgaatattatgacattcatttgcttatcagtggtattctgacggactatttttctgtggtttcattgaaagagttgattggtaattttgcaaatatctgaattaagtgttaaggttatagctgtatataataatagaaggctaatattgctctgtggtttgttactatatataatgtccctttttttgttgtctgttttattttgtttaaggcattagagaagtgttgacttgaagtgatgttggaggaaatgatttatcatgcctgttccttatcgactttagtttaaacaaaagtgtcttctatacacaataatcctagtgccagtgttttgagtctttgcaaaactgatacagaattctgtccagtctgagtaacatcaaactttaagtagtaatatcatccacaccactgaacattttgaaactacacaaaggaatgtatcaccatactattgaacaagaacttacagattcttggagtttacaattcagttggggcatttttaaagttttattgagaggtggtagattaaataatgcaatgaattcaatccaaagatcattctgtagtgaaaagatttaaaatatgtccttttctttaaggacatagagtcccatttacctagtcttcaccctcaagacactgtcccaaataaaaatggctctttaagaaataaaaatatagtaagtgactggaagtcagaaaaatcataccaagcacaagtgatcctgaaaatctatctgcatatgcaattataaaaggagctttgtttctgacacacagcaagctttgtttaatatgatgagctgctgctgatgccagcatctgactatttggtttatctgttcgtaggaatcacttgtgtgagattgaatttcaaactattctaaggagaagagtaaatgaaaataatataatcaaaccttgtcccttcagaatagagattttcataaattatttttatttatgtaacaattttttctcctttttctcttcaacttttctttacccccttttaagtattttaatgctatggtgtgactgctatctattcgtcacgagtcaaattactttttttttaccagcgctttctttaatggctttttttgagaaatcagatgccagattcctctctttgcaccagttaggatacctttttgttggcaatttgtgattttcctttgcaaatgctaaaaattaaatatgatgtataaaagcaaaagcttgtcttcttgcctctacctcgcctcacttccagagttttgcatacccatcaccaggctaatactgtgaaaacatcattttcaaaacactaccccctacccaaagtccttcttcacccctagtcatttagactatcccaacctatctttctgaactttacatcctgtcccccaaacataacttagttatttttcttgcttccatgcatttgtttctgctgtttcttcaacttatgatacatcatccttccatcgaggccactaactttgattctttacgtccatcaaaactcagtttcaataagatgtcctggctcacacctgtaatcccactactttgggaagccaaggtgggaggatcacttaaggctaggagttggaaatcagcctggccaacacagtgagatcctgtccctacaaaaaatgaaaataaaaaataaaaaatcagtttgatttctttatcttctgctgagtcatctctgctcctctgaggtcactgtactctctttttactgtgacttcatgaccctctgcatggtacactcactcactgttcgtcacgtatattattgtcccacatccttttatgtatttatgctctgtccctaagctaagttttactttattggagttggtagttacatattatgattcttttgattttcccataccatttaacaaagtatataaaataatatataaaaatatgttatatataaaaactaggttactaaactaaaattttctggttatttgaaattattttcagcagcaatgataatacatacacctggaccctggaacaactttttttgttgttttttgagacatggtcttgttctgtcatccagactggagtactgtgccatagtcacaatcagagctcactgcaacctctacctcccaggctcaagcaatcctcccacctcagcctctccagtagctgggactacaggcacataccaccatgcccagccaatttttgtgtttttgtagagatgggggtttcaccatgttgcccaggctggtctcaaactcctgagctcaagcaatccacctgcctcagcatcccagagtgctgggcttactggcttaagccaccacgtccggcccttggaacaacttttgatcccacaatccaatcagcttcttgggaacaacatgtgaaatcaaagcagccacaacaaatttaacatataccacgagggctgaaaattattaacatgtccaagttagtacgtcccaaaagggttgatgattattaattctgcagctggagttgcacaacaagcaaaaaatacaaactaacctcttacagtgagcaagaacatcaaagtgtgaaagataccactagtttcagccacatcaactttcacagaagagatactgctttttgaacatctagatctggtgcttctaacacattggaaaattcttttagtacctccatcctgtgtaagaagatgagaaagtaactgaaacatttatcttcatcaaattcaaggaagtaatctgaataccatgaaatcaactaaagatttctattcttggtgccattatatgataaaggcagagtgatgaaagatgccaaacaggtgtgctaatatctggtctagtatgacctcagttcttttttgttggtatcgttcaggttaagttgtctgcaggtttatttttagaacttaattcattgaatattttcttcacatagcatcttttatttaagaacatttcttaatgttgagtttatgaaatctatcaacctgccataattttagtttcatcccatttcatgttatttactaactgctgtaatgatcttatattggcttgctttcttcttcttttttatagcattacctctaagggttttgctcctaggaggttttagcaacttatgaataacaaagcatttatatttcatcgtagcaaataaggatttgacattgaagctcactagttttagcttcacaaatgcctttgctccttttctccttaactgatatttttttatttatgtcatccatcttcaagtgaaatgttgtatttatataacctcctcctgcacagaaaaacatgttagatttgtttaaaaataaactatattttcagttttttagagcattttctgttaaaaatattgattttcagaaaatgttagtgtattttaattgccatgatgagttaaaatttttgaaaaacgaatttctactcccttaggcagtagtatagtagctgtgcattttggcatctacaaaagctttggtagtaataggtttttaaaaaatctagttgtgtaccataatggttttgagcagtagtagattttttaaaactccaaatggcattcaccttagtaaacatctagcaacatactaggtcctagagttgagccttataatataaaggctttgtttttttatttttttgtttttttgtttttgacagaatctcattctgttgcccaggctggagtgcagtggcatgatctcggctcgctgcaacctccacctcacgggttcaagtgattctcctgcctcagcctcccaagtatctgggactacaggtgcccaccaccatgcccggctaatttttgtatttttagtagaggcggggtttcgccatgttagccaggctggccttgaactcctgacctcaaatgatccacccacctcggcctcccaaagtgctaggattacaggccatataaaggcacctgcacccagccatataaaggctttataatcttctttaagtattctcacagaagactcttcctcatctttgtcaaagaggaaatactaaataaattattgcccaggcattgtaatgtaggtctcaaattctagaactgagtaaatcagttgtagttagtaatgttttccctttaagactaagaatgtatcccagaagtggacttagaaaataatgagagccgggcgtggtggctcatgcatgtaatctcaatacttcgggagtctgaggcagaaggatcatttgagcccaggagttctagaccagcctgggcaatgtggggaaaccccatctttaaaaaaatacaaaaattagcctggtgtggtggcatacgcctgtggccccagctacttgggatgctgaggatgtaggatcatttgagccgaggaggtcgaagctgtagtaagccgtaatagtgtcactgcactccagcatacgtgacagagagagaccctgacaggaaaggaagaaagaaagaaggaaagaaggaaaggaagaaagaaagaaggaaagaaggaaagaaaaagaaagaaggaaagaaagaaagaaagaagaaagaaagaaagaaagaaagaaagaaagaaagaaagaaagaaagaaagaaagaaaggggaagggaagggaaggaaggagagagggagagagagagaggaagggaagggaagagaggaagggaagggaggaaggaaggaaaggagagagagagagtgaaagacagagagagagaggagagagagagagaaagagagagaggagagagagaaagagaaagagagaggagagagacagcaagagagaaagagaaaaaggaagggaaagaaagagaaacgaaagcaaagaaaagaaagagagcccaatgatgggatttcaccatgttggccaggctggtcttgaactcctgacttcaggtgatcctccctctttggtctcccaaagtgctgggattacaggcatgagccaccacacccagccaacattttcttaaatagtcatccattagtcaaatatccaaatgggacaaactttaaatatgtatgtttgtcaatgaatatcttaattcatttgtgttacgtattaaggatttgtttatttttagaaaatttcagtgtttaggaaaaaatgcgttattaaataagtttggcctttgtttaagtctattcatttataaatagtatattcataaatgtactttattagaaatatttgtaaacctgtgagatcttttttcttattcttttgccaactttcaaaaatagttttactttcataagtagaaaagcttagtcatattatattttcctctcttcttctacacctagcagaaattgactttatttttctgactccatttaaataataatctctcctccatttttcttcaaaataaagtcatcatagaaaatgggaagatgaagccatggtcctaaagcacagtctctgaaatagaacaagcattgtcactttcaacagtagtgatgcagaggtgggtcattgcatgagtctcctggtataaacatatatgaacttttctgtactggggattagagaagagattaaaactttcctatatgtccgtgagaactgggctgtatgtgataatacacctgatgattaaggtcacatgccagttagctatgggaatccaattctgtcagtgaattcaactaccaaagtaacaccatgtattccctaagaatgaacaagaaaatcaagcttaggtatatccctttaggaatcaacagtagtgtgatcatttaaatacattgtttaaaaatcttacttagtttagaaaaatttattgctcattactatacatctccatcactacaaccagctatttcctcatctaaccatttctttagaagaggcttacttagcacctactaaatacatatagcacaatcagaatgcaaaaccgatgaaatatccttgtaagatacttactctcttaaagaggagacaaaacatgtacctggaatatgtacatattctttctaactgcctttagaatcatagaaagcatgattaggggttcaaagaaaagataaatcttctagtggatgctcacaggagagtcttaggatttaaatatccaattaagttgaaatgacctttgacaactgaaagcaataagattccaatgaagtatctgctataaaataagagtttgcagctttgaaatagttttatttagaagcagtagagaaaaatttggcttctctgacacaaccaaaaaaattaaaattaaagtaaaataaaataaatccctcaacaaacaacacacacacgcaacaaaaataccaatgaacaactttcatcaattaattctgtgcaaggaattgggtgatacccattttcacttaaagagtttttactgtattctttgttttaatccattctgtttaatagagtatgcacaatggtgaggttctgtgaaattcatcttaaataatgttgatgcctgggtaagcaatattaatttatttgttaaaggcttgttgatatatgccagtctactgaagcaaaatttaccccaaaatttataaatttaacagacaaagagtatgatccttaagatcattttagttaggcagagtgcatttacctgagaagtaaatgatatatatgacattttgttccaaagatggttttctaatttttattactttatttaatgagcttcctgaggacaataaatataatttgaccattgatttaattaaggaggtaaaagaccttcttataatgtaggtaatatttttggaaattaatgaatgaaagttaattgcctggcagtctttcacaccaactgtgttggcaatctagtggcaaacctaataaacactctctcatgtagacaaatgtgctttagataatgatggagtttttgagtgggtgattccagagacagtcattcgaaaggaggacaatagaatgaatagagccaaatagaagaattaacaaaagcagtgatacacagaattgtgaagctatttacaggctgacactcactgccacatgtaactgactgccgatctaaaacctattgttccatttttattgggtaaaagtcataggctctaattcaatacttaagagaaattgaagcaatctttcccttatatggagaaacctgatgcttaaaaaacatttcaagtttttttcctttagaatttacttcttaaaattgtgatatttgtcttgacttcataccattatgtcttaagatcatttttgtatttgctgactttcatatggtttttgaagtgtatatttatatttgaattaacttgaaatgacaaccaattttgaagcaaatctttattctgaggagaaatgttctatgaatgcttgatgacagcatctgtatgacttgcataacttcttaaaaattgtgttcttaaaataatagaaatcaaaactcttttgttcctaataacacttctggcaacaatgtatgattactattttttaaaatcaatttaggtatagttatccaggcctcttcaacactcattgaaagcatgacagtagaattgtatcaattcagattactcagtcatatttattcataatctccagagtatatgtaaatattttcttctaaagattaagctccatgtcacttcagtgttgttttatttgccctcaaaatgataacaagttaaactgtttgaacacatagtaaaagaatatgattttcaacttgagctagacagatgtacatttccatttgttcaataatctgggaaaacgaaaatttatatttagtgaaggacagttgagtcagatatctctgaattctattctgtgtttctaataacccaaataaattacaatcaagagaatatttttcaacaattatatgtaatcttatctccattgatttatatgtatgtataattgaagcattatacatatttactatataaagtattcttttattacctgtataaaatattaggctgaaagtaaccttagagatcatctaatctatgttcattctacaagttgaagagattgagcaacatcaaggcaaaataactcataaaattacacaattattgaagcataatgatggctagaatcattatgatgccagcttttctttgtttagtcagagataccagaccaaagaaatgtagagtgtgctgatttccattaagagggcctttatctttaagtagaaatttatacaaatgtggctaaatcccataaagtataaatcagtggcatctggttgcaagctcatttttcctttgctcttgtaagctgggaagagatggatattttctggacacattgtccccaatcttggttatgaaagtagatatctttgtatgataataaattacttcccttagcatttaaatgactaagaccgtactcactgactgtttatttatttggggtcacttaattatacttttgctagcattcatgtataaagaaacctttatttcttacatttctgaagagctccctgtatccagctaggttcttaaatgcttttgtcttcctcattgccgtattgtttgatgccccttggtggccaaatatttaattaaagtcccttgaggggacagttttcatgatttgttattggacatctgccaaagcttaattcaccaaatttttgccatcaacttaggttacttctatgtatatttttaatactgtccatatgccttaagttttaaatattccccaacagcaatcatttcttaccatctccaaaacctaaacatattcaatttcaacatatatgaaggttagtgtgtaatttcttcttctaatctgcttataattcttttaagttagtgatttttcattgtgtttttctttgaagcacaaagactgtcagccatgaggatgaaaatgttgatttagttaacttagataatacatcagtaatgataaatattatttattgaatgtcagtttttcaacattctctgtagtgagcacataacatgcatctatttttgcattaaatttcactacaaatttagggaaagttttcattattctcagtaaaacaagatgggttgttaagtaacttgctcaaatttatgccatttataaggagagactcttcgtttctgtcaagatctcttggaatccaggttttaataatttcaaaatacaaacttctcttagaaagtgcatgcctgtcccctgtttactgacttcatttattgtcatgttgatttctatgggatatgaaattctagaacatgtgtagtttacaaggaagttttaaattacactgtcagtgttttacttacaagtctgtggtttgtatcatttgcactgttccctggattgaatatttgtgattttattttaaaatctcttttagcagaagctatctagtgataattgctgtattaggtttgtctcccaacagtgtttggctcatgaagtctttttcatcttttaaattgtataatgcatagggtgtttagataataatatgatgatgcaaaatctaaagattatagttttaattttcttctagagagttaatctttgtttcttaacagatcctaccttgttttgtccctaagactattactatcagaaaatataaaattatacttattttctgtcattataaaacttttctggacttggagaaaaaaaaagagtctccatgcacttaaattgatttctgtcttttgcagtaacaaagcaaaatatatattctgagtcaagaaagagttaaaagaatgttttaacaaaagaggcttaaaagtcagtaatcttaaattcagtgtaacagaattagagattttattttctccttttctggaataactgcaactcctgtaatattcaaagtatggagattgaaagtgaaatttttactgattttcattgaaatgattgctggtttgactgagctgacctttgctttaaatcagaattgattgaccaattgagtcaacatggttaaattggttgtgcatatacacagagactttgtttattgaatttagggtattctgagtaacataattttcctctgcttctcttctgctccaggaaacactctactttatgatgcatttaataatgtgtcggaaagcaaatggaagtagaaccatacacaagggagagtaacagtggattctgcaactgtttaacatccaagaatcctttcagatactcatgtagtttgtatgttatattggtttttcatattaaagatggtatctaaaatgtggcttttgtgaagttatcagaaaaccaaaagccattggcagtatgataaccatctattacaactgtataatttccaacctctaagaatattctaggagtacatcctagaacatttggataaattggaatgcactaaggatattgcattctatctctatttccaagtctaatttttattgttgcaactggataacgcatagaaaagaaatcaagtaatacataaaggaaccaatatagatgctaagatttgggtgcaggatatttctgaaaataatagttttcttgttcatttaaaatatctaatttcctttattttggcatacttcttatcatttagacatcaaaaacaggcctgaaatgcaaaaattaataatcagaaggatacgagagccaaacccttctgagttgtagaggtgcctgcctctcagtgccaaatcaacaactgatttcataaacttagtcttcatgttatgaactctactgccaatgaaaatcaataaaaacaatttccttctgcattcatgatcctctcctcacactctttcttcatattcttttcagggtcattttgtcaaaatgccacagggccatacaaaatgtaattttgtgtttctgtgtgtgtgtcccatgaaacctgatttttcttgtacacttttgattgatataaagcgtaactttgaggttttaagtaaaatcaaaaacttcgtgtttttaattttgaaaatagtgaaggaaccaccaagttttgttgctgttgctgctgttttagcataaattttgaggctgtgtataatgtatataatatattacatgcagtatagctagtataactacagaaagagagaatatgtgtgtttattacatatgtgtataatatagtatatgtgctaaattaatctttattgggtatctgagaagactttgagagaatgaagtgtaaaatgatgttttaacaagaaagtctttgtcaagcctctgaacctcaagcataactgaaagttgagatacctccagatagatctattattatttaatcagttaactcactcattcatgtgtatgtaccatgtggattactgtaatggcagagaaaatatatgaatgccctttccatcaaaaagcttattcagatagtcagaagataacataactttaatacatgcaggtatataatacatcttctttctaatgccgacaaatttttctatgacatttatgtggttctcctatatttaattcttagggactgaatccacaaaatattttacaaaaagatttgcaagggttgagcatgctatcatacatgcttttttaatctggggcctgacagattgttaggatttaataaataatggtaattattattattattatcattctaaaacaatccaaatgggaaatgtattattttcctccatttcacatttgagaaaactcatcccccaagttaagtaacttgtaaaagagatagcagttattaagtagcaatgctgtcagtcaaagcaagggataattgattttaaataatggtcttgtcttctttataataagggaatgcatattcaaattaatgtattcagtatttaaattttctgcctcattctatagagtataatggtctctaagattgaatgaacaggtgttagatattgacatgagcatttctagatgttatctcttgtatgtattacagcatctcaatgagggtcagtttttataaatgtccccattttatagatggagaaactgagacaggcttagaaacttgctcaaaataagtagctggtagtaactggagaagacagtcaacccaattcgatctgaaaactatatgacttttaagcttgatagtggactggcacaaagttgtataaagtgttgaaaggcaagaagatttaaatgtttacagtatatcaaaaatgaaaaagcaggtaaaaagaccaaacattatattttgagccacataataagtatcagcactgttttcaaaacagaaagctagaatgctgtttttaaaaatttagattgccaacagaagaaaatcagatgaagttttacttattgttttctattatttcattgcaacagaattgtatgtttaatataaaaaatttggaaacaacacgcaggagaaaaaagtcacctttactcctatcatccagatataggaacctttaaaatgttggcccatgtccatgcgttgtcattgtgttctatgtgtatacatggagtaagttctctctgtgtttgtagggcgtgtgtgtctttgtatgtggcaacaaaatgtcctaaggcttttgtaatcaagtaccatgaatagggtggcttaaaacaacagaagtttattctttcacagttttggatgttagaagtccaaaaccaagatgttggcaaggccacgatcccttcagagcctctaaagtagaacctttcttgcctcttcccagcttctgtgggtggcagcaacccttggtcttcctggcttgaagctatatcgctccaatctctgtttctgtcctcacgtgatgttcaccctgtgtttctgtcttctgttttgtaagtgcaatagtcatattggacccaccatcctccagtatgacctcatcttaatttagctaattacctcagcaaagtccctatttctgaataacagcaaattatgagatacttggaattggaactttatcttatctttttggggacacaagtcaattcagttcataacacacacacacactatacttgtgcaaaactagaattttagttcatatattatttcatagcttatttcatctaacatattgtaaataacttccatggtcactaattaagattaatcatgattaaagttctcaagtttacttgcttagattttcagtaaaaaagttaaagagttttaatttagaattttgcttttcaaaaatgtgaatatattttatcaccccaatggtgcttttgtgaggaactaagacacctctctgagggatgctgtgtaaacctggcatgttattattttcctctggcaatgcaagaacaccagaaatttgacttattcccatcctttcacctgcatattggcaataaatataagatctgtgtggcagcttcagtctagtgtacttagctctgagtcgtcgtaacatccaggagagcaattcttcggtgaggtggaatgagcagcactttaatagcagtgcttagtggtaaggctgtctgagaggcagaaaagagattttaaattaaatggactttactgaaaattgtcttcactttgtagtttgaagtcagggatgcaattttcaactttcttttccctccacttacctgttgctaagagatcacattcagggtaaaattaatgcttctccaattacaaagcatgtagtcagcaaaggaaagaaaatgtaacatgcagtctgttggttagaactttaaaaaaataagtggcattagagagaaaatcatgcatataatagacatctaacaaatgagcattaagtcaatcagcacgtaccgagtagtaagtcttaaacgtcttgtctctgagactgtaagaaattcactttatgtttttgtgctttagtttattctgctttttaactcttaggaaattaaaatgtactcttaaggtagaattgacagggatattacccactagcttcatcataatattaacagaaatctcttgtgtctctggaatcttttggaaccaggaaaaaaaaattactttatgtcaggattcttttaattgtgcaatataatttcactgcgaaaaattgagttattttggtaatggaggtgacatcaggagatacataatattgggtaattgagtgttagacctagtcaatagtgccacagttttccttacatgttccctgaaagctagcatctcatatataagtgttccttctatcacactaaccaatgatcaccatcctgtttcatatcagcctcctcatttacttagtaaacattcactggacatctagttcaactaaggctccacttgacactctgtggcattggtaatgcaacgtgagacaaagctattttactcttaagattcactctctaatttaagagataatatatgcatatattatgaggaaaggaggctctgtttctttcatgttaaatgaagaacatagagctaatccagcttgatattgtgtaatatgaggagtcttataatgtaataataatgacataataaggataaatatattaagtcacccctccttcaaaaaaagacttagatctatcttttttctgcccaaacactaagaagcattcagaaaattcatagaattctaatttttctcttcacacttaatgcaaacaaaatgagaattcagatgggaatttagtttgggtgttataattagccaacctcactgaccaaagccacattcgcaaacttacccgtctctcagatgccttctaatgagctctattaatctgttctcttcacctccccctttggaatttcactctggtattactcttttcagatgctttgctataatgcttgattttaaatagggtttaatatattttggtcatgccattgacacaatacttaacatcccaaatatgctttcacatatggagagtaccatctgtggtattaaatattatttcataaaggttcaattactccatttcctttaactctccacctccaaatagtagacaaaaaaggggtgcatgaacatttttaaacatctctcccataaatccattaatttaattcacaatttcttaaagaaaattgcctaaagacaatgcaagataaaggaaataataattaagccatccccagggatagtggatgtacctgagaaccagttactgatcatgatagagtagaacaaggactggcatgaggaataggaggcctgggctttattcctttcatggtcacaagcccaagttttagttgtttcatctagaaaataaaaggcttgggggagatccatgctttccaagtgtactatgcatgggattcagctgtgaagcgtgttaaaaatacagataccttaggtccatctaagtttggaagaatttgaacttagggccagtgcccatgaatctgtgttttttactaactccatagtgattgggacctacaacaaggtttgggaaccactgttccagggatgtctaggatttttatttcagttcggaatggatatgacactcaatgtctacatcaggggaatttcatcactgagacaaaaaaaaaaaaaaaaaaagcctaattggaattagaagaaccagtattttagtctgggatctgcaagactttacacttttgagattcagtttctttctctgaaaaatgaggatcgtgccagtggtatttccgtgggctgttgaataggtgatcgtacttagcatagtgtcagtaggtattagcaggaggaacacaaggagaaatagagaaagagcagccagttcacaaaatgaagtgttatcaagggaccaggaagaatataaatatatgaaatgagtaagaagtaaaatagtgtttgctaggcttccattatattaccagcttagttcattcatttatgagcgcatagccccttttctaaaaaattcagcagaacaaacaagcttcttccttttagatctgtggggaattttgagacgttcattctaagatatcatagaaaattgtcaatggcaggtgctgtgaagttgctggagataaatgatatatacagtgaaacaatgagagcggcgcaataccttacattctgaaagaatattttaagcttcagatttcattcataccaaaagatactttttaatacttgctatctcctgtttaaggatctaattgtgcacaacagttatgcatagttccatctctccatgagcttatagtttaatgcagtccatacataattatagaaagagacatgatgcagacacgaaattccaaacatatttctggcgttttcttacgggcaaattggaccttaaatttttttgcaacatttaaagcaataattttcaccatcttgatctttatttcttttgatctgctaactaaagagaaagtagataatacaggagtagataatgtatgaaggcatggagtagatgggaaatctctgtatcttcctctcaattttgcggtgaacctaaaactgctctaaaaaaaaaaaaagtctttaataaaaaagagagaaaatagaaaaaaaatccatcgcattcagctaacacattgttgctgtacaaaaattcccgcacagcaagatgactcgtaaactgaaggcaggcagaatgtgtaggaactgtattaggcttgtagactccaatatatacacccttgtacaaaccacatttcagcacaaagaattcaataatctgacacttctctggtgaagtgcgttattctgctgcagagtaaattgctgtggccaaatttttcagtaggatccaattctctataataacccagcaaggtcacacctcaaatgaagcagtgacctacccgaatgtcccctcataactgtcgagggattccaaggaagcaggacgtctccctaacctgtctgctgggatccttgagattgagttataagaaaggaggctgtgtctgttgaactccacctgacattgttctttatcattgtttccttagcttctgaatttttgttccagggatagattataaataggatgaacagtgcctagagtaggccccgtgactcatataagccataattacactggccatgagactatttccggaacagacttcaggcctataattcagagaataacatttgttttaaaatatggctccagatacttttttggctttgtcctagaaatgttgagggtaacagaaaagatgactttgttaagtacctataacttcttaatatctgtgtgtgtgcgtgtgtgtgtgtatttacacattgaaatagctgttatgttcgagctaaatgccaaactgatagactaagaatacctttaaaacgcattatagtttccttttctgtgcctttatttttagggataaatgaaggtttttaaaaagggagtttactgcaaccataaagcagccctatgccaactgttgcagaaaaggcccttctgactcagaaacactaatgcatggagaaacttgctttattctggtgaaagcagggttcaaaaacctcatccacttcatttgctttgctgaaataagccaagtctccctggtgcctcatgcctcaaattccttcttgaaaacacctgttcttctcacggaatttggggctttctcagtgacaatttgaaggatttttttaaaccaaaaaattagcagagaaaacccagagagaagtaatgggcatcactttacacatcatgaaaaatgcttaaagaaagtaaaaataatattgcaatacatttcctccaaaatgatactttaatgcctagaattgttttagaaaaatatttagtttttgcataatgtttatggattaaatgatgataaaagtttgatggaattataccaaattttctttaaaagttgaagcctatctatgaatgaaatatgaaatttttcttattagaccacctgttcatgtggcatattttttccttaacacttttgtcatggttgtacttatgttaattttaagtattaatccataagatagtatgagctacttcttggctattttctaatatatattttatatataaattaatctcaaattttctccacttgattcatttgatggttctctcaacagatcagctctaagttgaattcctgaagtttgacccttttaaaagctgacatattgtgcaacaatctttcacagcccaaatactttgagtgcattattgagatctttagattaactgagaaggtaacttgtcttgtattcaatctgtgaatgattgatctactcacacttaattttaaacagtaaatgtattccgtgcctaaagtgaattttcctttccattgaatgctgaattgatacaaagtaaattctagaaaaatatgaaatatgcatgtgtgtacgagaataaattcttcatatttccaccttagatattctcaaatgttcactttacctatagtaggatttatcgattgacaaatacacaggctcattcaacagtgtaatttttgagatatttcactgaaacaaaatgggcataattatttagacggacatctgacaatgaatacttttcagacttggctgggtaatgtttttagcatcactgatccagcaagatccaataatacgactgactttttgtttaatagaattccctctagaatgttctactccattagtaaaagggagttgctcaagttacatagatatgttctcaaggacattggctaataaaacacagacatttgtgtctagatgctgaatgtttatatgcagacatttgctcaagcaaaccattctctaaatatataagttgtgttaacaaaatgattactgtattagacttactcagacctaatcatattttttaaattactgtagcctatggaaatatttcttcccaaatatagaattgttttatatatttaggttactttgcaaagactataacaacattcataaaaacaatcaaaagaatacattatcagaagtcactttgtagaaaatagaggaagttttattaatttttgtcccagacttttatattctacaacttagtatgttagattcatgaagatgaacaaatataggtatttgttaatgcagtgctgcaaagtagtggcattcagaattatatcaaacacaatttatacagggccatccaaaaaagacattatgcagtgtttagctgagtttgtataaaatactacagctgtctctaggatgcctttcccttgtggaaaaaagcttaattctgccaaggcaagagtgcagggccccttcttgcccttatttgcttttagagactgacactgtcaagttgataaatggtctttgacagaagcaaaggtaattcaaagctcattcacaggtagaatagtctttaatagattcttttttaaaactctctggtggagaaaaaatatatagagggaatgcctagtattaactcaccgtgaggctgttattctcccaaaacccaaaaacccatagtctctgtacagctatatttttgtcattctatcatgtttactgtgtacatgtgtgtctgttgtttacaaacaagcttatttattttgtatccatatgaaagaaaatcagtgtttaattaagaaaaaaatctttggttgaaatgttgtgtgctttttttgcaggagagggggcagcctttcataaactgaataacgttgaacatatatttgacaagctcaccctatcataatgatgctttggaattacagaaaagagttgaaggttttagtaaatgcaggcaaattttagttctattctgtttgcttttgatgtttggcaaatcaattcattagtgataaaataatggggtaagtcagcagagaaagctcaattcattgcatttatcccacccaccatagttcatctgcagagtggttgctctgattgtgttagatcatattcccatcatcctcccaggcagagatccctcgcatttcatttaggtttattccttttgttcttttcaaaaaagactcaggaatacagcattgagaaagcttttcctgcagtgttaaggaaattctctaattaatggtagatacaaatgacaggatacatgcttttctggttattctgaaggtggtgagaacactatttagttgctattacttttatattagctcgtataaataactactcttatactaaaccagtatcagagctatgagtcatgtttactgtcttcgcttttctaagcttggacatgtaatgaagttaattttctttggaagacagtgttggagtgatctacaacactcacatggctgcacactagcacacctctaagaaaaaaaatagaactgattgaaaccctaaggcaatcattttggcaaataaaaatgaccaattcaatgaagggcttttctgggtttcatcatatttggtagaaataatatgttaaatcttttttaaatgcatacaggaaaagaattataattacatcagtcattctgttgagcactgcagttgcatcaccctgagatatgtagtcatgcatatatctagaggagagtggtataaataagatcatatatgtctcacttaaagagcctgtaaatgtatagatgtgtaaagactcatgcatgaataattatgctttaatataagcaaacataatgtggaaagagataattttttttaaaaaaggaggcattgacaatgtgagcataaatacagaggaaagaagcaggcttttgaactaggtgccaataaaagcttcttggaggagtcaccattttagaaattggaagatgtgtaagatcatgtagagttgctggtggaagggggcaactttaagagtgaggaacaccatgtatgaagatatgaaggccagaagtccgagaacgtttcacagagttgtgttatctcaatcacattactcacatcacattattggaatgtgtcaaatataagaatggaatgatggctgacatattcacccattaattcactcattcattgagttcatggagttcctgcaatgggttgtaagaactcaatgaaatcaatgggtgagtgtaacactagaaaaacgttcagaaatgaataaaatatagcagctgtgtaggggtcattctttagtgcggagtatggaaggaaaaacagataatcaaaaggcagtataataaattctcaagttggagctttcacagaatatcatggaagtaaaacacatgtcccagctaaatctacttgagagaatcaggaaaaaattaacagagaagctgaatgtggcctagatcctgaagagtatgtaaatattatagtagatggagagtgtgagatgaacagtcaaagcaagtgaaataagtatttgtaaatgcaaacaggtataaaagggcatagttttttggggtagaaggccttgattactgtgcttaggggattagatttgctacatagcattacatcattgaaagcatctgagcagagaagcaaaaagatcttatttgaatgttagaaccattgatttatagcacacataaataaacaaaatagattgctgtatactcaacccactgatatttaatatcttctaagttatgatgatatcttagaccaagtagagattataatgtgtcaatcattacaaagaactgaagaatccatctgctatactattagctcaactgactcatcattacttagtctaatataaacctcttaatttcaaggaaaacagaataattaaagggataataactcatagcaggtcatgtgcagtttagtgactacatgaaagacttctgaacaagactatggcatctacctaagtccactgaatatgataatatcaaaagaagcatatatgtcatatataatagtagttcctctggcctctgcccaaccacggatcaagactgaatactaatcaatgatgtataatcattacatggtgggattatttcactgtttgcatacacaattttataacacaaaccttagtatttattttagttaaatatgtaaatcataatccttttcaagatatgcagtaaatccttcacttaaaatcctccaatccatctctctgaggatgaaacctaaatttcttgccatgccttacaaatatttccagtatctcaacagtgcatactcctaactttgtctcctattattctctcctgggctttgtatattccggccaaactgcttttctagctattttttcaaacacagcaagatcaacaccccaggacttttgcacttcctcttcctactatccatgctcgtcttccccaagattcacatggttgttttgcctttcagatcctcgcccagtgtcaccacactatctgttctaaattagctgtactctgcaaccccaaaacccccgtcacattcaaccatatcactcctcttatctgaaatcatcccatttatcttcttacttatatgtttattctatctccttctatctcacatccccaccacataaacatactagattgcaaaataggagaacaatttgttcatttagcacattactgttttctgaagatctagggcaataggtgtttagttgaatggatgaagatatagcattattatatacttatatcatggctttcaaaaacgatgttaatgacagcgagtacaaactatatttgggtgtgactggaaagataaatgtgtcttagtcccctctacattatgcaaagacatttgtttggttaaaagtttcatttattggccagacgacacagtggctcactcccagcactctcagaggccaaggagggtggataacctgagatcaggagttccagaccaacttggctaacatggtgaaaccctgtctctactaaaaatacaaaaaaatagccaggcatggtggcacatgcttgtattcccagccactcaggaggctaaggcagtagaattgcttgaacctggggaggtggaggttgcagtgagccgagatcacaccactgcactccagcctgggctacagagggagattccgtctcaaaaaaaaaaaaaaaaaaaaaaagctgtatttatttgacagacctagccctaccatcctgcatatgagattcatgcccactgatacattgctcatcatttgtaccaggaaaattaataggaattaggaggaaatgttagtgtcctttcttcttctcctcctactctagtatataatcaaccatgtccttctaatctacaaagtacttattaaggctctgctgaaaaagactttgaaagggagcctgcaaaaaagaaattacacgattgtctggacctcaccctttttttacaaacagagacaaatgtagataaaagtgatggaattatatttattatgtgcacccctttgtaacatgttgccttcagaaagcctctttttttgttcttgttgccttattttgatttacttatctctgttctataatcatgaatatgacctttgcatttgcctgaaagtggttcttttgcatggtacgatactaattttggggatgacatagtgctgtttagagattagcaatgtaccatgggagaaacaaccagagattaagagtaaataaaaagaaaaaataactgagatcatggagctggttttgctacctgatcagcttagaccttggccagtggatatgtctcttagtctcctagagccttaatttctacctctgtagtatcttctctcacaaattaaagaaataatgtataatgtacatgaagaatctgattctctatgtctgagatatgtatacttgttaaaagatgcacaagtaatttagatatgcactaggagtgagaaacaaaggtgtggattatgacttgggaccctcaagacatgggcctagcttcattactcctctgataatgctaactgtgtcatcatagcatgcaaaggtcagtgtctgactatctgatatgggccctgttgtatctcatgggggataacatctataaccaccttaaattcaactaggaatgtgatttatcaataactttttcaatccagaagttaatccttccttccttttattattttttgaatcaacttcactgggtcactttttctatggaaaatttcttcagtgtatctccatatatcccagaagcaaaattcaaacgactttaaaccagaaaggatgtaaagtactccagcaagccctggcagtgttcgtgtaggtataagaccagttttaaatttcccaatgtaggttatgacctcatggaaatatttgtatctctaaaatatccttggggttaagtgacatgcaaatattatgtggcatatatatttcattctagtgagacagttattttccttgtccctatgtagtctgaagtttgaaagccaggctgtttttgaagctcttagagtgcagaggaatgaattatgtctgttctgacacagtaatgtctgaaggatcagctctggcgtactcatcaagtttatgttgccaatgctcttaatatgtattagattctgcatccaggatataatgtgttaaccttttgtgataccatcctttatcaaaagagattattttaattcatgctttatttaaattccttttgtggcctgtcagtataaaaaaagaaacacatttaaaaatgcatttgtttcatacagaaatattctaagagaaaatctagaaggaaacttcctttttctactttcctaaaacataaataagacattagtgtaaagcagtggtactatttaaaatataccactggtgttgaagctttctcatctaatttggtgtatatatctttatacttataaagtttccatacagtttattcaaacaaaccaattctaagaaagctacattttattcttatttctcaaaatccccatatgccaaaagaaacagccaaattgcactttttcagcatctcaacatagttagtaatattatagcaattattttatgaagatctaaaacatacagggagatctggcatgcaacattattacacaggttatctattggtgtaatacaccacattaacagattaaggaagggaaaaataatgatcacatcaacagatgatgaaacaattcttattcatgtcaaacaaaatctttgcacacttaggataaaaggggattttgtaatcctcatgcaatcttatatttagtgataaaacactggaagacttcaaaatttgagactgggcaggaatgctcattatcactgcttcggtacatcctatgagatcttcaatacaaaaaggcaaaaagaaaaaaaaagaaaaattgtaatgattggaaatgttatcatatatgcatatatgtatatacatacacacataaatctgatggtattatgcatatttaaaaaatcaggctgggtgcagtggctcacgcctgtaatcccagcactttgggaggccgaggcgagcagatcacctgaggtcaggagtttgagaccagcctgaccaacatggagaaaccccatttctactaaaaatacaaaattagccgggcgtgtggtgcatgcctgtaatcccaactactcaggaggctgaggcaagagaatcacttgagcccaggaggcagaggttgcagtgagctgagatcatgccattgcactccagcctgggcaacaagagcgaaactccatctcaaaaaaaaaaaaaaagaaaaagaaaaaaagaaaaaaaatatgcaagtcttttccaaaaggacattaaattagaaacagaatgagttaacggagatgatgcatttcggatactgaagagagtagtagacaaatcaattgaaaattttcaaaggaaatgttttaaatgtttagctcccatttcttagtatgtctccccacttcatgtttatgagataggatggaaagggaggtatgggaggtggatacttgttaagagcttgctttggtgagagctgataggataggtgcatttcacccaccttctacaatggaattgataaggaaagcacattttatatgacaagatgacttaaaagaaggccttcagcaatactttcaaatattgctacttggagaatttgatatatgactctgaaatttagaaggcacgaggtccactgactgactcctaaacagaaatctagagaatcaaagaggagatattaacaagctgttttgaaggaagaattaaaatgaggtggctgatttaggatcagaattctgatcccagaatttactgggttaaaggaaacaggaatattttctcaggattcgatgtgagccatgtggagaaaaaagctggcttatagctgtttttacttctatctaacaagggtcaattggtgtgatctaacagtgagaatctatgcctccctgaacaaattagggactaagcgcatcttcagaaagtggaaggaattaatgtaacatccatatcatggtggttgcattgggagggacgcagcaaggaagcttatgtgaacctttcaaaagatcccagaatcaagtcagctttaaacatctaccagactcaaagtacataaaaccaattctctctctctctctctttttagagacagggtgtcgctctgcagccaggctagagtgcagtggttcaataatagctcattgtaacctcaaacttctgggctccagtgatcttcccacttcagcctcccaagtagccagggctacaggcacatgtcaatatgcttggctaactttttttttcttcctttctttcttttcttttttcttttttttttttttggtttccagagactaggtcttgatatgctgcccaggctggtcttgaactctgagcctcaagctatcaagcaatgctcctgctttggctcccaaagggctgggatcataggcaagaaccacagaaccatgaaccatgccccatttttttttttttttttttttttttgcaatcaaacatcctaaatgtaattttcaagtaatttagtaagtcaatcccaaaatttgtttggaatattacaagtccaaaagttggcaatataaattttaagaacaaatttggtgataggaagagctttccatacatgatgtcaaaatttattttaaagacacagtggttaagaggatggtattgcagattgcacaatgttagacaaaacaaacaaatgcaacagaataagaagttacaaaataggtccacatatatgtggataattaatttatagatgctgtatctgtggaaaacagtggtctgttgactccagtcgataaatgaatctgtgataattgggtgtaggaagagtggacatttacttcacaaaatgcacaaaataaattccaggggtattaaacatttaacatttaaagatagaaatgtaaaacatttagaagatcacataggaaaacagtatcacctcaagaatgaggatgttttcttttgccaaacaagacactaaaagtgaaaattacaaagaatatatatttattaaatttgacctcgttaacattagaaatatcaatgcaacagaagactccataaaccaagtgaaaaaaaaatgccacagtgtgtaaaagatatttacaatactggaagatatatatatatatatatatatatatatatatatatatatatatatatatatatacaccacattttcaaaatagacagaatagcagtggatgtgaaaagttatccaagtggctggtaaacacatgaaaagttgctcgatatctctagtaaccaagaaaggttgattggagctgcatttaaatactatttgacaaccatcagattccaaagaagtccaacagcacgtaataccaagtatatgtttaagatgtggagagatagaaattttcatatactgttttttttttgagagtacaggtttatagaattgcattaggaagaaattttgcaatagctggtaaagttctagataatcacatcccataacacattaattcttctcttacatagaccttaggaaagctctcatgcatgagcacattgaaacatgttcaacggtgttaactgcagctttagaaacagcccaaatgtccattaccagaagtctagatcaacacatttgggtggattcatacaatgtagaattctgcagataaatcaaaatgagcaaactagaaatagaggatcatatggaacccagtggaaggaaaaggaataaaaaaggaacacaaaatgatgagggaaagaatataatacaaataaaatagcagggataagagtaaacactcagtaagaagtgccgcaacctctcttctacttacataattaaccttctgactgcctgttaccacctaataccttcctgcaataagataaaagcagggtccttcaacatatttaacttagctattaaatcctttctagtgccttctttaaatcttagaattagttggaaatatttaaatataactagataagtctcttctaccactttttaaaatgctaataaaatgtttgagttgtaaaatgtcacctgattttgcttctttccccctacaaatctgtagatattctttatcttgtttagaaagttttttttttaactagcatatctattccttggatcaaccttgattaatcaaattgatttttaaaaataatagtatgtataattcatatgataaaaatatcagaatttcttgattacctaaaaaatggtaacagccattgtatttgtacctgtgattacagaacaaaaaataaatcagtgtaaaaagtcattagtgagttgacaaggtattattaaaacctctaacatttaatcatttgatgtattaggaactactgagacttactataaaataaatgattacctattgataattagagtaagatcgttctttagaaaaaaaagtgtaattcttttcatattgcatttattcatgccttatggaaacatctatagcacagtttgtttgtagagttgaagccagagaaagctataaaatgaagagtaaacttgccacaagtcttagcactagtaccaagctaaatattataatgtgatatggtttggctgtgtcccaacccaaatctcatcttgaattgtagctcccataattcccatgtgttgtgggaggggccaatgggagataatggaatcatgggggcagttttctccatactgttcttgtggtagtgaataagtcccatgagatgtgatgattttataaggggtttcccctttcgcttggctttcattctctcttgtctgtcgccatgtaagacatgcctttcactttctgccatggatcgtgagtcctccccaacctgtggaaatgtgagtcctttaaacctctttttctttataacctacccagtcctgggtgtgtctttattagcagtgtgagaacagactaatacataatgtatgaaaaacatgcagtattttggaataaagaagaaaaactctaaatggaatttctggtatttaaaatatgcattcatagtttatagttttttagagaaaagagttgctttcaaattttatttggttatgttttctaaatagtaagcagactttctaacatttagccttttgaataaggaaataacatgccagtgaaactgttaagcatttatttctaaagtggaccacattttatactacttagtttttctattcaattaattatgaataaccatatattatatgcacattttgatcattcttatataacattttataaatggaaatgtgatagatttagaaacattacataacatcttcttaatatggcccttaaatttatttgcttacaactttgccaaaagtcccaatgagatgcctctacaatgattcacatttctgtgtctttcaatattgcaacattattagttttggttcctttacatgagttttggccaagatagctgagattatgtgagctgatctcaagaaagttaccaaggtccattttttccattccccagcttattttttaagaaagtcaaaagtcagatagcctaataagaaaactcttagatataatacaaacttctttaaagggactttttttaatttcttttttttttttttctgagatacagtctcactctgtcacccatgctggagtgcagtggcactatcttggctcactgcaacctctgcctcctgggttcaagcaattctgctgcctcagcctactgaatagctgggattacaggcccacgccaccaaggccagctaatttttgtaattttagtagagacagggtttcaccatgttggccaggctggtcttgaactggctggtctcgaactcctgacctcgcgatctgcccaccttggcctcccaaagtgctgggattacaggcgtgagtcaccatgcctggcctttttaaaaaatttctaactgaaagtacacttatggaagctcagaaaacaggcaccaaatattaggtaaaatgtactggactgcctttgtaaagcctagactatagatacaagtgctaagtgaatccacatgctttctagacagtgtccagtcttacagcttatttcctgttctaacaaatcaatatagtcaaaattcattgggatacaacaaccttaagactagtgtaaggtgagaaccatatactaaacatgcatataaaaggtctgtagattacattgtttttttccccaacataaaatgtgaattttattctgaaatatatagtgaaatatggtaaaataaagttttggccaactatatttaatataattcagatacttatcaaattttagatgcaattaaaatcagccaaaagtttggatgtcaggacagttggaaatactggtgagaaagagcctttaaaaagcaagaaagtcacaacaaatcatgacattatcagaagttgattttacaggaatgaaataatgtcttctgcagcaacttggatggagctggaggccattattctaagtgaagtaacacaaaagtgaaaaaccaaaacctgtatgttctcacttaaaagtaggaactaagctatgagttcacaaaggcatacagagtgatataatggacttcagaaactcagaagagggagggtgggaggggctaaggataaaaaactacacattaagggccgggcacggtggctcaggcctgtaatcccagcactttgggaggccaagggccaaggtgggcggatcacgaggtcaggagatcgagaccatcctggctaacatggtgaaaccccgtctctactaaaaatacaaaaaattagctgggtgtggtggtgggcacctgtagtcccagctactcgggaggctgaggcaggagaatggcgtgaacctgggaggtggagcttgcaatgagcggagattgcgccactgcactccagcctgggcgacagagcaagactccatctcaaaaacaaaaacaaaaacaaaaacaaaaaaactacacattaagtacaatgtacactactcagggggcaggtgtactaaaatctgaaaattcaccactatttaattcatccacatcacaaaaccccttgtaccccaaaagctattgaaataaaatttttttaaagaaaaaaattgattttactttagttttcaataaaacatcataataagaataaattatagatattgagaaatcattactcttgtgatatctttttcaaaatataggtatgaactataattattaccaattttaagaaagagatttttatttaacatgctctttctgtctttatcacagaccacttaaattattttgctttcaaaatcatgtcttccttgagatttacaggtaatagaaagcatcttttttgccatactcttaaaaagtaaaaaaaactaagctcatttttctttgcgtctgagccaaattttaaaggattacgttcttaatcttgacattcaaaggagacatcccaggatgttgtaaatgttccagcaggattaagaagagagactgcagtgtctctaagagctctctagcctgtcttcaatatgctcgtttctcaaaaatgatggggtggagtgggacagaatatctgagcccttgaccttgtcaaagcagtcagatgtgtcaaagtgtaactaccctcaatgtattaagtaatgtagagggaattactgcagcatattttacttgtaccacattcctccccagtccattcaatgatgctggaataataaataggaaatgcttaatatcataagtaaattttctttaaaacttttaagtagaaattaagtgatagtaaatgtgagaaatccataatcatttattaaatatcatgtgttctgggtcaatacttttgccatttagcctatttgttatgtttattatattcaaagaatacctattattcagtaattaaacttataaatttgatgtatagttttgatgcagattattaaaaaataccactactatttcagatgtaactatatttagaataaatctgagctgactatatttagaataaatctgagctgactattttatggacatataaaatactaactgaaaaggaaggctgcatttgattgccaataatgaatatacggacagattgcagagaaatatgtaaaggttggaaaatagattataggttcatttgtagggacaggaatttaatttttctgcattatagacgaagatgtgaaatttgaaattagttaaaagtatggctattgagctttattatagaaaagttaaaattgtagttgaatacgagtgtagtgtgttagtctgttcttacattcctgtaaaggaatatctggactgggcaatttgtattcaaaagaggtttaattggctcatggttctgcaggctatacaggaagcatggtgcctgcatctgcttctagtgaggggctcagggggcttatagggaactatagttcatggtggcaggcaaagggaggcagtgtcacataaggaaagcaggagcaagaaagagagagagagagagagagataaagggggaggggagggaaggggaaaagggaggaggggaggggagaagaggggaggggaggggatgagggaggggaggggaggagatggggaggagggggaggggacggggggaggggaggagactagaggagaggcaccacatacttttaaacaaccagatcttgcatgaactcaaagcaagaactcactcatcaccaaggggatggcactaagccgttcatgaaggatctgcccccgtggtccaaacaccttacaccaggccctacctctgtagccgcccaaggggttcaccttgcccgctgcctagacagagctgattcatcaagacaggagaattccaatagagagagtaattcacgcagagccagctgtgcaggagactggagttttattattactcaaatcagtcttcctgagcatttggggagcagaatttttaaggataacttgatgggtaggggaaagccagtgagccaggagtgccgattggtcagagatgaaatcatagggagtcggagctgtctttttgtgctcagtttctgggtggggccgcaagatcagatggccagtttattgatttgggtggggccagctggtccatcaagttgcagggtctgcaaaatatctcaagcactgatcctaggaggagtttagggagagtcggaatcttgtagcctacagctgtatgactcctaagccataatatctcatcttgtggctaatgttagtcttacaaaggcaatctagtccccaggcaagaaggaggtctgctttgggaaagggctgttactgtctttgtttaaactataaattataaactaagtttctcccaaagttactttagcctactcccaggaatgaacgaggacagcttggaggttagaagcaagatagagtcagttaagttagatctctttcactgtctcaggcataattttccaaaggcagtttcacttccaacactagatattacatttcaacatgagatttggaggggacaaatatctaaaccatctcatgtagggtgttttcatcaactttcctaatatggcaattgattaacaagtgttaaactagcatcttgacttagcaactgctaaaattcattataaagtcaaaaatatattgtgacatcctacatacacatcagactcttttctctctctctctctctttttttttttttttcatctcttcctcttcaccaggaaatctcaggctttcatttacaaatgaccatgtcaaatctgttgatgacagatttagtgcctaacaggaagatactctttaaagaatgccaggaagtaacaaagtaagttgaaaaagcaaaattctgtattttgtcagctaggaaaggatcaggaaactgagggctttgaatcagttaatccattttattcctggttttgctttgtttggaaaaatagaatcttttcattaaacctttgtagaggcttattaggtgaggaagaaaaataagatttgagttcctcctttatgtgaagcctatactgtctcaccactttctcctgttttttaacatccagacctgtctagaaaaagagcagagttccttttatttgttttaaataaagaaattaaaatagctgcaaaaatcctaattcttgacctacagcatttcagaaaacttttcagtcgatgatgtcccgcagttattttaagtctgtttttgcatgctgtgtgtctgtgtgtgcacatctgcacacatgcacaccataacctcatctcattatatatacagatgtattatctatacacccagagatttgtaggctaaaaaatgcttgaccctaaatgtattatcatacttaataagtattttgttttgccttatataagatttgaggacagaggtatattatatggtatgtacagagaaaagtagtatagagaaaattccactttcagaaagaatcaacttctgtggggatatttatatgtttatgtttctgtctctgtaggtatagatacatttcttatttatctgtgaatataaatatgtattcatggcatctatcttaaaacaggaccacacaataacatacctggcatattaacagcttatgccagataaagatcagaattccaaagggtcagagcaaaagcacaaggaataatacatatttgatcaaaattcacttgtagactaagagttgattggcagagaacaagcaatattaagcactcagctctgctcagagaaaccacagtgaatacatagccaagaataccatctgttgaatatgaaattcttggatcaagacattatagatacatttccccaaacagcagggacagaagcctttctggaaacaaaatcacaatagagttgcagaaaggtgaagtgagagagaggcaaataactgttctctgcattgtggggagcaagttctcttactgctagtgtggagtgtgattaattacatggcatggttcacgatggtggtagtaaataaacatacagcaggtagtcaccctgttcgaataatttctacatcagtacgtcaactgctagctatgggtagatcaaaatctttttactcattgtggtgtctgcacctttttttcacacttggaattcattgtgttccctgtcattcattatgttttataaagataatagaatgatggctgtgtgatattcagtaggaagatttatatgaaaaggttgatgaatgatactattcttaaggaaaaactcaaatacaatgctatgcgtttatatttggatctgatattctcagaaaaaccatgtttttctgtacattaaaataatacctttactagaatggacctgcatcttttttagggaaccagtctggtatctagagatagatagttgttgacatggaaaggatctgtgttaatgagaagagacatagaatggtgggcaggaacaatgacacagtaggagaaataatagtggatacacagctgttagtgaaaggacctccattcctttaattgcacacattgagaaaacatggaaaccaatatgaagggaactaaaatgtcgattaattcagaatttcatcttgtcgccgtttttgcattcagacgaattacattaaaacattttatttttactttggaaagttctatactttagttttctggagcatcacatattaatagtgggatataatcattattaacatgtagtaggtgctcaataagtagttaagggaagaaatataatgatcatacaataaaagcactcctttaaatgcttttatttattaactcatttaattcttataacaattctaaggagtagatgcagttaggatctctaattgtttttgtaaggaaactaaggcaggtattttaggtgtaatgccaaaaatcactcagttagtaaattgattcgaaattggaaccctttctccagattctgtttctatctactttgctatattgtttattcaaaaagccatggtaccttttgaatgtgtgtttttaggcccatagtagacattcataatgagattatttgtctcacatgtttacacagagcatccattggggacattgttattatctatttagaggataatagaattgcttctgtttgcttctgttaattttctgttaattttgggagatgtatatgactttaggtgtcctgttatcctgttaatacttctatcaacagattacaagctacgtgaagagcagcatagttatttgggtgaacttgaatttataaaacaactacttagagaaagtttagtcacttttcccttggctttccctgggcctttctttatatctcatacgtcataaattttgctttgtgttgtatttgtatacaccttctctctcctaggcctcgtgaaggcaagagttattatttaatggcctttataatttcaactaccactggtaaaacatacataagtcaaacatatcagtaataattaccaaaactagcaatgaagagaacatcttatattgtgattttgcctaaaaacattattgctgagtcttttaaaagagtgtatttgtttttttaaaaatgtcaaacaagtgcatctgctctcttagaatttctgtatctatttctgccgttttttaatgtaatcaaattatgagtcatcttttaaaaataagtaaccgtaattcttttcacctacgtagtagagtgtaataaaagctccaagaatcttaaatgttttcaataataatgttaaaatatgtttttatgctttaattattttaattacatgttacagtatatcatgtgtaacacctaaaaatatcttacactttaggtattctatctttacttcctaatatggtgtgtttgcactacattttttgactgtttcaggcatgctatcttctaattctgactcagtcagaaaatagctaagagcaccacttgtttgctttagataagtgagtttctggccattcatcacctctcatactgaaaatgaccacactgcagggacattgtgttattggcaaaagttggccaaattacataccagtaggtataattggactatgtcttcaaaacattatgtttatattataaaccataaaaatgttacagtttacaatgaacataatataatatattttaggaatagaaaaagaatttgtaataaatacagaaaaaacacatatgccttttaaaggccaccctgctattttaacagtttaaggatttttggatactttaccaaaatataaaatgccaagaaaatttttttcttatttttttaatttttcttggcattacttttgtgtgaagctgggtaagattgtaaattaatctctgtactgaaaagtgctatattagatgctgtatataaaatgctgtatattagatgctgtttatatagatataaaatatcaaaaagagtttaaatcataaccatgttttaatattaaattcccagtgtagaaatattaaggctaaattcagaatagtgacatatttacgtatgttttcttacttgagaatttctaaagccatttataaaagctccctgtaacaattttcattttttccccacaattttacttagtgatgctctttgaatagtaactttaggtaatggagaagtaacattatattcagagaaccatcaactaactctcgaagtattacgacaaggaaaaatccgcaaaatcagctctgttaatgagctcagcattttagctttcaaacatttccgtcgagtacatttgctaattttcttttacaggccccagataacttagtaagatttttagagtggcttgtcagatgtaatttgacctaataattacccttaaagatgtgattaagaaacacctgactcagatgtcgtgtacataggcaaaccacaagtcatcacccctttctctcctttgatttcggtggccaaatgccaagtcagcaggctatgagaactggccttcaggaataacctgccagtttatagcttattcaggtcattgtacctatgccaagtaggcctaatgagagaggatccttggaagtgtgcaagcattaaatgtatacatggttctgaaagactttatgaaaaaaaaggaattctttttttagaaaatgtttatttttaatttttgtgggtacatagtagatgtatacatttatgaggtacatgagatattttgatacaggcatgcagtgcataatactcacatctgggtaaatggattatccgtcacctacggcatttatcctttgtgttacaaacaatccaattatgctcttagttattttaaaatgttcaaataaattatttgactatagtcaccctgttgtgctagcaaatactaggccttactcattctttctaaccattgaaaaaggaattctttccccacaaaaaccttgtaaactgtctttaatatacatgcaaacaaatatttgtaaaaaggtaattcaatcacaaagaatatttgcagtttcactaattcggatatataatctaaggatgccaaaaatatttttcttcctctataactcaacatcaactttcatatattttgatcattgttttttaatctttgaagttcacaaattgatgagaagcatagtattttttaaagatatttcttgactatttttttctgttctaaaatgtattgactaatgcttaagtcaatagtttaactccatgtctccattacagaatacctatgaaaagtgttatttagatgcatttttatgcctcctcaaagctcatgatgtatctacattttttaaagatacaaaactgttgtagttaaaagcaactttatgaaaaacacttgatgaagtacattaataatttgtctcaatataatgagtattttgagtgagataatgattagtcattttcaacattcatttctagcccagttcattttttagactttccttctccaaaaacttttctggacatgtctttattatatcctgtcaccaaaacctaaaggtaagtttcagagcttgctgaggagttatgacccaccatgggaaataatgaaatgccttcactgactgatagatgcatccaaacctattaagaatatcaatggaaaatatcagatgcataacttaaattagctttaaagtgtgcatttttagcattcatatacttcttacctgtaaaagatattaaaatagctacatgacatatatatgtatatatgcttattgatttgatttgtgaacttttatagaaatatattaaaatataaaaaatgagaaaatatactttttaatttgaaaaggaacttgaattccttcctgtgatattaataaaatgaaaacagattaatgtggaaaattgaattacttaagttatcctaaatatcacctggatttacagtgatttttcaaacttttattaatcaataattggtttaaggtctgtattttgaatgaaccatactattatgtattgcaagatgaaaaggatagcataaaaatgaatttgatgaaaaagaattttatatcctagtttaattcccactaatcttctatcagttattgtgaggaacatttactgaaccaaagcataatatgtaattatacataaaaatatataattctcactccactttgacatttgtgaataaagtttccacttaactcaagaattttacaacttagaaacatagggagtgagattgtggatttatataattaaagagtagagctaaatgcttgcatgattaaaggaaatgaaaaattaggagtatttttaatagttgaattgtgaaatcataatcaagctcaatctgaagtacgatgatttccattctggtggtcgtctgagtaatttcttgtctgatggagtagctattcttcccccacgcacgtgtttagattttccatatattttacattttgagaaattgcctaattccctgtttgaagaagtgcctggtacaatgttgatgtgcaataggattttcttatgaataagaaaagtaatcaacaaatattttctatatatacatagtctaaaatgtacgtatttctatctctaagaaatgagattattctcttccgtataaatataaaaggtaaatgtcaaaatctttatctttgttagctatgaagttgaaataataaatgaaattcaaagaacctgctagggatagacgttggggaaggaaaaactgaggaattagaaaaagctacaaacataagatcagattctaacctatcagcagcgataacatttttattctccagagagaatgggttacatttctctgaaactatttgttgtattaaaatctcagaatattaccattgaaagggctcctagagatcatctagaccaatggttcttaactgatgtgaggttatgagatgctttgtgaatatggtgggggttaaagacctttttgctggaaaattacacatttgcccagaatcacgattttgcacacaattctgcatacatttccaggaattccagtttaatacaggcaacctatagatgcaatttaagagcctctaattattcaaagttcattttataaatcggttgaataaactagagacctagagagggaccagcctctctaaatctaattacattgacctttcctatctctccaagttgtttggccatttgcactgataatgtttcaaagcaatcaccactttatgcttagtttgttctcatttctatgactggatggaaatgtgtgggagcaatttccactttctaccagagactggtccagttctagtacacaattttgtctttatatagacgaaaatattgcattctgtcatttatcttgtatctgtgaatgaccattttaaagctttgtctgaaccaggctgtcccacttctgtattaagagtgtgcgtctgcatctatccaccaatgaataatgtgcacagataatgtgcagtagggaatctgtggtccagtgatgggcacatggatgatgtatccttatttccctcagatattgcctggtttttaaacaggatagaatggtgtttattgtaaaccacaaggaattattttgaatttcctaaaataagagctgtatgacaactaaaaaatagcaagaacatccattttcattacatttatttcattatagtttaaggggtatcaataacagcactgtttgcttccctcttgctgtaagcagtagtcaaaaggtaaattctgttgtttgcattactcctgtttaagaagaagcataatgaaatttggtagggagaaaatgacttacagccttctttctacttttttgtgttctttaaaaatatacatctctgagtccatttcttgaggcagtagaataccatacagagctaggattttcttgaacaacataaggcccatatttgttttctacagccttattttgaatttatagaaataaagtgcaaggtgcagtgaattttccacacacacacacacattacttgaaaaagacatttgttaacttaaaacttaaacgtaagcttttcttaaaagcatcagtgcaagtatatccactacattgcaagtcatctttggtttctcctataatcaatttaataattcttggatcttggagaagttatacgttgaaaggcaaccacatgagccaaagcgtcacttctttcctctatctttttttgaggattaagtgaaattaaatatgggaaagcctactgtaaataaaataaaagatcacaatataatatagaagttgattataaatttttatcagtgtagtgtgagtgtttcatcacttaataactggaatttgtaagcgatctttaccttccattttactcaactttatggtggacatgtttttggaagacatgcattcaaggctctatcactgtctttgggaacctgctgtaacttccatctgtacaatttccacatcctcaaaatactgatcataacacttgcctctttgatatcctaagaaaaattgagtgaaataaaatacgtgaaaaccatttgtaaattaccattactcaagagaaaacatggtgatgattccaccctcttgaaatctctcagtaaatgaagttgtgaaaaccaatagcatcttcaggaccaaatatttgtatttgtgcagatctctgcaacaatctctagaacagaaacattccagacgtcctagtagaaagctgaacccccatccatttagatttttgcattaaaatgacagattgctctatgactattacttactggctattacataaggacatcttataacaaatccgtgaaaggctgcaaatggacaaagcatatcttaaagactaaaaaaaaaattcacaatggattgtaaggagaaatgttttattttcatagtaaggaatgttttagtttatactgcagaatcacagacaggtcacactgagataacagaaagcatttgtgatcaacagaagcaaatcagcaaggcacatccagcagtgggactgggagcagtttcatagcatctgttagaggcaaatggaactggggagagcattagcaaaaacctgcccttcgtccagataccactgataggaaacacataaacaaacaaaaaaaaattgtacagtttagctgaagtctgctcttctgatacatttcctgcagcccatacacatttccttttaaatccttaaaaacattccagttaagttttatgattcgtattaccaacaacatgatgccttagggatatgttacctagagtttggaagctagcatcaaataccaatttaccgtataattcttctgctatttaaaaagacaaggttcttcggtttaaatattgatggcccaactggtaatctttttagtaaaggtgtagctataaggtgaaaaaatcaaacagagtagtcaggtttatattttcagaaacaaaaagacctttacctgtataaaagccaaagatacaacagagaactgaattatagatctaccagacagggtatttttttttttatggctaaaaccttagctttaaatatctctggcaccattttgtttccttttattttaggttgttaatggtggttataggaattggttctatggtagattttgtaactagcttaaattatatttctttgatctagtgagtccctccctgccaccctcacttttaaccctgcagtattgaatctgagtctgattaagggtaggaaccaaaaggaatgggaatagctcaatgggggtacctgcaagcgtttttatagcttttctattcctactgagaatcgacttactgaccccagaactgctctctgcaggcccttggaggaaatctagtttcttatcagacatctgtacttgttctatctttcaaaataacttctgttagggttgtttgtctgggtctcttttttgtgacagagcagtataaaaaattcatttttattcaaaaaaataatttcagtatagatatttattcaaaaatttaaaagaagactcctctcctggtgaataagagctaggtcctgtcagagagccaaggactggatggatgaggcttgggagtggagtatttaattgagattatcagcaagggaaataacatccctttaaaacagtgaaaaaattaagaagttctattcactactatggtgattaggacactttctgttaatttatgggctttctctctatagtgtttcttctcataattattacagaattgttgtttcatacttgactgtttcatttatattgttgctttgttatacaaataaggtcttacaaaaagtttaagcaggatattataaattgttacctatgtaaacctgaaacattcttgccatgatactcacaatcatcagacactgcatctcccttggtgttggtaatctaggcaaatagctgctgtattaacatttcagacccctaataagtgcttaagtgttacaataacctaatttcactgataagatatagctcatcatgcaacacaggcatatcatatgtgcaaaagatgccccctaggccccaagttattgccaatgatttgcattatatgaagttgttctcctgttacgagaaatttgggggaagttagacggaactgtttctggtctttagaatagattcagcttagatattcaataaaacctatttatgtttaccttttaccaagttttgagtcacctctttaatatagaaaaggatgtggtcaaacatgcatgaaaatagaaagttgggtcactggatctggaggggaaaaaaattaggaagcaattgagggatataaaaaggatctaaagaagaaccttcttttcaccttgtcccaaaattcagggtaaaagtagagtagacattctcaattaaattaaagggtagcaaatttagagtttctttttgtagcatgtaatcaacctgtgggagccacagcctcagaaggttgagttaaatctatgtctagagtttaaaaacaaataaataattttatgcctataagagttttgatgatgttatagaaataatcacatctcatgctttcaagaataaattgatatatcgacaagggaaatctgttcccaaaatacaacgtaactgggaacaccttgtttgcttccaaccttagacaatccagatgggcagattctgggatccttgctttcagttggttaataacgtttattattgagtttattgtgctcttggacagacaaacaagccaaaaaaagaaagagtatactttctgtaaaagttcataattgattactgtgaaaatactaataaattccttgtttgtgtgtgtgtgtgtgttgtgaataagattttctgtcagtgtgtgcatttgtgtatgtgcttttcatgaggttgttcatgtaggtgtatgtctatacacagagagaaaaagagagacttttatatcactattatgtaattttgttttagataaagccaatttgcgcctagttgtgccattgtgacatccattaaacaatgacaaatagaaagtatgtgcctgcttgccattttttagaccatgacatacttctatctttaagtgtctgggcgcggtggctcacacctgcaatcccagcactttgggaggccgaggtgggtgaatcacctgaggtcaggagttcgagaccaggctggccaacatggtgaaaccctgtctctagtaaaaatacaaaaattagccaggcgtggcacacacctgtaatcccagctacttgggaggctgaggcaggagaatctcttgaacctggaaggtggaggttgcagtgagctgagatcacgccactccactccagcctgcgttgtagagtaagacttcgtctaaaaaaggaaagaaaggaagaaagaaaggaagaaagaaaaaaagaaagaaagaaagagagaaagaaagaagaaagaaagaaagaaagaaagatgcacttactatgtgaatgtggctgtttttcctccaaatatacatatatatatatatatatatatatatatatatatatatatatatatatataaatcttttttctgtaatttctgtaatttcctttgtgaggcttatcaattttatgttgttgttgtctacctaataagcaagtatggataaagtataatttaaaaaccagctagcttatttgaaagtcaggctagctctgcctttttatatgtgtgcttttcttttttcagacattaactctaattaggatctacttgtatcttaattatgagactcttttaaaataaggcagttaaatgagaccttacatactaaagatgtaggccactgttattttatcctttctaaggaaatatttacatgcatcaagataaggtgattcttaatctaaatgaatgattttttaggaaagattctttcaggtcacggattatcctaagggaaagtatttgggtgcagcactgtaacccaaagtccttcgtatacttctgtttaggaaacacgttgcttgtttattcactcagagaaaagacaaattgaatcagaacataagtttcagtagctactgcttcccccacgcagggatgtcactgcccacatgggcaggccagggtcactagttaaaatgttcccattgtgaaagcatattatcatcttcgggggtatttttgcttctggtctcgtgactgaccagtggaaaaagtcataagctatttttgtgaaatgtatttctagtacaatttgagtcagtgtttagaaaacatcacatattaataaaaaggattatatagtgagcacctattttatatcaattagtttatacacattatttctaatattcctagtcaccctgccatgtaatgttcttatgttctatttgcaaggatttcaagatgtggaccactttttgcaaagccaaaagttgatcgttgctacaaatggtggggagaacaatgttatgattatagcatggactctggtaccaaactacttgggctcacatccgtctggtcactacaactttatgattattgcaaagttttgtaactgtcagattgtattataaacacacaatataaatggtagttttcaagaaagtgagccttgtttccaacaatctcttctgcctctgacatggaatagattaactagatatgtacagtacatggccagcattttaatatggagtatatcaatttactagggctgccataacacaataccacagactgggagacttaaacagaaatctgttgtctggaagttctggaggctgaaagtcaaagactaaggttgagcaggtttggtttcgcccaaggcctctcttcttggctagcagatggtcacctttttgctgtttcctcacgtggtctttattctgtgcacactcctctctcataaaggcaccagtcttattggattagagccccacccttaagatctcattttaccttaatcacctccttaaaggccttatctccaatacagtcatgttgatggtgaaggcttcaacataggaattttgaggtgacacaattcagcttataacacagagggagagaacatttcatttgccatgaatacaatctggctaacactggtgcacacagctaaaaggtgcaactggtgccttagttacacagccagaaagggggcaaaggaaagtcactgtgccctgtgttgtaggtcttgagttttactcaatctgctctctgagtgaagtgggttacctttatacaagcagcatatacaggctgcagggggatctgcctaaaggtgtttgctctggctataggcagatcatatattcaggaaaatcccaggaaaacctggacagatacatttatcagaagtggtaaatttagaaatacttattaaatactgcatgcaagattcatgttagggaaagtgatgtggaataacaggctttgccttcaacacacacaaatgtatacatatgcttgcagatatccacaaaaatatggcatatgtagtttatttattgctaactgtgtcaggcactgcgatgcattatctgtttgattcttattaaaagttgagaaggagaatactattttccctatttcacatacggtgaaattgagcccctgagaacctaaggaactttttcaagacaaaccagtttagtaagtggagtggataggcttctttcattcctaaacctgagctctttcctcaaaccagatgacaacccgaaatatacatacatatatatataaaagatttgacgcgtgtcttcattagccttcgtaggaatgtattgtggttatatttgcatatacctgccccttctggtaggagggtaatgtgatctttacattaaaagcatttaactttgtgcctataacattatgaggctcagataaatgctgaacagaaggaaagaaggaggaagggagggagggagggaaaaagagagggagggaggaaacttggctgagtatggctctcactctttcactttgccatggatgtgttacataaaaacctccacagctaaatacatgcaaaatgtagctctaacctaaagaaagtgatagctccaatttctttagctcaagaaaggtctcaaaaagcaaataaaaagctgtagttgaaggataaaaaagaagtaaagctcgataggtagatttgttaaagaagagcagtttaatggagatatcggggggatcagcatggctgaaccaggtttggagaaaaccagtgagagattatttaagtcagcatcaaacaaaaatgtaaaagaatgaccacatatttctgtttgcaaagaacttttagtaagatacagatgagataatcaatcctagtggaaatacagattcatattacttgggatatgataagtcccatcgtttctaaagtttaaggatgaggaaaatcctgataaaacacaggaagttattaggtgaggcactcagcttttcttgcgtggtaagcatcagaagccagaagcagaattttagagttcccagtatcttaggaacaatctggttttacctctcaattctagagaaaactaacttgtacggaaattaacagaagtaatccaaatttatggattggcaacaacactggatcccagatctcctggctccctctttaggattttttccattcaagttcaactttctggagaagtcataagtggatgagtcagggaaagagaactgtggcctgatataaactgtttgtacttgaagttatagaaaaatactgttttatctagatcattctgcacatgcatttatctttggcatgtggaaaattggtttcataatctctggagaaaaattgttaatttctgcctagatcattctctctgctgattcctatcagaatatttgcaactctaaaattaattttaccctatttgctgtgttggttgtaatgaatcatattcaaaatcaccaaaaacttacacaaaagactgcacaggagaggaaaaaaaatgtatttgattttcccaagctgcttctctgttgattattaccaggtagcatttttttttcatttcttattctcatttgtataaaaatccagatagaaatgaaagtaatgtattagccgtttggttgaaaaaatgttaagtcaattatactcttgcaagatttataagaactaaagtgagtttaaatttgaattgtcaaaggaaattttacatgcattaagccctcagtaaaatccatcataagtatttaattatgtgctgggttttgaacttctgtatctaaagtggtatttttataaaaaaagatttttttcagtgaacttgtaggcatcactttaaattatacctgtaagtataattcaggtagtaatatattttagtgagacaatttggaggacgtgtgtatgcatgtgacacaatgaaatagttttctttcctctttgcaataagcatacttagggaaaaagcaatgaacaattgccatatctgtctgtgtgcaagtgccttaaaccttatatattcaggtgttctggaaaacctactactctctgttgtcacttagattcttaacaatacgtgactattgaattcctgcatattaggctgttatttctaaatatgaaaagtcttatcttaacagagtaagcattgacctttagattttcctttcaactgaaatgtttcaaaaccaagcatattatataaatgcattgagtatagtttttataaatgcaaggcactgcgaagcatattgagtgatttacagatatatgagatgttccccttgtgtgcttgttgcatctgtacactctcgtggtaaaatatggatgaaccaagcataattccatattacaaatgaaaggacatggtaggaatattttgccttaacaaactcatctttttatgtatgaaaaatttcacttggctctgaccctaatgacttaaatattacccatgtggagcatttctcaagccttattaatgttttcatatcttccagtaacagagagtgatttaaaatggaataagatatgcagaattctagcaataggtatcattcttagaattgttactgtaaatgaaaactagtatatctggtagttcccccaaatgtagccactttcaaaacaatattatgatccttttttttttttactgttgtgtactccaaatgatagcctaaatccaaagtaataatgtcacctggtatctatctaaaccaagtcaagtacaaaaattggaaactgaaatactttattttgctagccactctggggctggtgatatgaacaggaagaggcagtagtcataaaagcacgggtgtttataatattgtagatttaacgtgaaaatgaaatgaggaaaagcatttgtaaataaaaagtcttatgggctgggcacggtgcctcatgcctgtaattccagcactttgggaggctgaggtgggcagatcacttggggtcaggagttcgagaccagcctggccaacatggcgaaactctgtctctactaaaaatacaaaaattagccagtgtggtggtggaaccggggaggtgaaggctgaagtgagccaagatcatgccactgcattccagcctgggtgacaagagcaaaactccatctcaaaaaaaaaaaaaaaatcttatgaaaggtgtagaaaggtgtatcaggattatagtcaagtatcatgtacaaaatacatgtatctgtatctgtacacataatttgtacatgtaacttttatttcctgtgccttctttggactttctatgagacatagtaataacaacctaccttttagagatgtaatttagattcattgtgagatctaaatgaatcacattcagtaatacataacttttgttcattatgtgtcatagaactctacgacaaatatataatttagtttgaacaatgtgtaatcactgaataatttttcatgtttgcaggtaagttttgttttttaactgatgtttacattagtatttacatgtggcatatagaaaaaatataatatttgttataaccattttctggtcaaatatttaatattagctataatacaggtctccttacaagacgtatgactaactgccagatcagtgtctttcacattttggtaaccatattgcttgagagacatcaaataattttatacatttgttttcttatgcttccttgcagtgtttctataattagaaagcttagagttgtagggatattttatttatttatttatttacaaggcatataattttttggaaaattttcccaatttcttttcttttctttttttgtttttgtttttgagacagcgtcttgctctgtcacctaggctgctgtgcagaggcgtgatctcggctcactgcaacctccacctcccagttcaattctcgtgcctcagcctcccaagtagctgggattacaggtgcatgccaccaaggctagccaattttttgtatttttattagagagacagggtttcaccatgttggccaggctgatctcaacctcctgacctcaagtgattcacctgcctcagctcccaaagtgctgggattacaagcatgagcctcccaatttctgtctttaaaaatgttgctctgatcttcctgattctctctagctgactgtcaccactgtcttccctggattactagagtatccttttatctattccattcccctctatgaatatgactgttcctccaataatggatctcatatacccacgtacctatttagaaacattaattgtttaccatttttcacttaaagggtgtgagatttctaagcatagcactgaacaccaccaactgctttcttttcttttcaaaccttatttcccccatttaatctggtctattcattctggatcagtttaagaccccaaatacgtgatacggtttcatgcctccatgcaattacttatgctgttcccttgactgtaatgctcgctgtacccccactccattccttggtggtcaaaagccaaccatttcaatatccagattaaatgcattcccaagggagaattcttcacctaaacaagggctcctatagcataatgctacagaaagtgcattgcagttaaagtttctcaatatttgtctttttcagtatactgtgagctcttgcagtgcaagcacttagttctgtttatttttctaccaccatagcacccagaatggtgactaacattgaatctgctcagagtgttcagtgaaatgaactgtgtgaggttttgagtaaatgcattcatccctaattgtactaaattatatttcctgccaaatatacttaaagcaagtggaagaaaaaaacatctagttttctcatacgcaccccttctctccacaatctctatgatttacactgggaagaaatcagtttgttcttttaggtaaatgatatagcacttaattgaatcaatgcttagtgcttcttgccagaatgttatcattttctatagcagtacacttgtccaagaaaatgttagtttttgtgtataaaaatacattaccatgcactctgtcttcccaaactattttgagcaactacttaaaatgatttaatttgcaggactgtgtgcctaataagctttctgtttaaaatcctaacactgagctttctaagagcgacgtggtctacatgtaaactctttacaaacagcatctgaattacaggcagagacacacattaggagctgccagaattgtgtttgttgtggctgcctggttagctgctgcttgaacagctgaagtatgagcgtattgatcaattagtgccagctcaaacaagaagtatgccaactgaaagggaagtcagatttgtatgcaaagctgcattggtaaaatttggctggtataggtggtaaaagggttggacaagctatttaatatgaaagcaccagtgtaccttaaggaacacatgacaattggtatgtgatatttcaaagacttcatttgaacttaataaaatggaaaacggcttcattttgacccaaaggatggcgcctaccttcatatgtaaagtagaatggggaataaagttcctcgttgaaaatattaaatcctaaacctagctttgaactgatgtgttcattctcactgaataattgtcatacttcatttacttctttgtgtataagtaaaggacactttaaatatataaagctattaagtcaattatataaaataacattatgagttttgtgacagtaaatttatatcctaaacctaacttatatgaatgatgagaatagcaatattctatttaacataatgcatgtgaatgaatcacaaaaatcaaggttttttgatgctaaattctgccagggtatcagtcagggaaatatcaggagtaccttctagaaaccacatacatatgtataagaacggttgggtggaagattgagaaactccctgaatgggataccattattagggctctataccctggaggtgcttgctctaaagagtcactttgctcactctggggatcagcaatatcactgaaatgaagaagcaatgttctcaagtccagaattcttttgatgacactagtgtaggtgtgtgtgcttgtgtgtgtgttaaacttggagctataataagtattgttagaaaataatggagctcattctatgaatgtaagcacagcatagaataagtatttttggccaggcgcagtggctcacgcctgtaatcccagcactttaggaggccgaggtgggcggatcacgaggtcaggagatcgagaccatcctggctaacatggtgaaaccccgtctttactaaaaatacaaaaaattagctgggcatggtggcgggcgcctgtagtcccagctgctcgggacgctgaggcaggagaatggcgtgaacccgggaggcagagcttgcagtgagccgtaatcgcgccactgcactccagcctaggtgacagagcaagattatgtctcaaaaaaagaaaaaaaaaatatatatatatatgtatatatacttttaaaacttcacagtattgtatgtaacaggagtattgtattaactttatggtttttgaaacagaaataaaataagacaaaacaaaaattcaaagtatgtttaaggcagtcctccctcttccaggccagttctgattccttttcaaagctctgccattgactttcttgtcccactttcttattgatcttgtgtctgtgctaggaagaggctttcttgaggtgaaaccttaatattaattgcagaaatggtcagcctttatataagcgattgtgcaaaaatttcctgacaatacaaaatttttagatgtgctgctagggaggatctacttttcttcctttagtttctgtggtacgctagtcaccaggtaagtgctaactatagaatgtagctgttcttgctatttgcatggctctttctgagtgcgatgaagtgaggtttccctgtgtcctttgttgatgaaaaggaggttttatactctgctcctttggatggaagagccacttcctgattgggttctgggctaaaagtggatctgcctttaggcagaagtatgaatgtcatgttacttcctatttaacattattaaccatacttcctggccccagaaggccagagtttgactgtttatttcacatcagttatcatgaaattattcataacaggaaaacaatactgggtgaattggccacactcatgttgaaggaatcttatttagacatatcatactggttctgaagtatggtccatttaggatagtattctatttctggaagtagcatgtggtgtgattgatgaaaacacacacattttatctttgacattagtctgtagattttgatgtttaataaaagatgagcatctcatcctttcctaataatccattatggttttctaagcattacgctcttaacttctctatcctactcatactaataacttttacttcttgaatgattatttgcttaaggtaactactcacagtagaggaatctaataccattatttattttctacatttccctttttttagttttccaactgttttttaataatagttcttgttcaaaagtttaacctttctacaatcttcatgggcactcaaagcagggtatatatctgataaaattacccacgaaatttttttataactaagtactatgatatacaagtaatgacatgaatacgtgggtgaaataatgcaaattgaaggctaaatggtgatagaaatgcattttgcatttcgattcttttttctttctatctcacaataaagcaaagaaggatgatacaaatatatgtgctagaaggcccattaactggcatacaaaatcgctgaagcaatgtagttcagcagagagaccaaagacatataatgagagtgagaaagcagttttgataattataatgagtcaaaagcaatctcctgcttgcttagctcgcacagatgacagaggaaggaaaatgttcttttcttctgagacagaaacaggacatcagtcaaaatgataagagatgtcagtataatattcctctgagtcaggtaccactgagttagtcatctgggatgagagtttctaatctttttctttgcttcagtttcactttgggctttggggtaatagattccatatcaatatatatctaaaaaatgttcacagttcttagttgggagaaataaaagtagtttataatctagtgggaaaaatatagtctttgaagtcagtcaaactagactttcattttttctatgttaacgtgaataagtaatttatcttccttaaaatgggtatgaaattacctttctcaccggaattttgtggatatttatgattagatatatgtaaaatacttttgcaaatatttttattagtagttgttattaaattcacttaaggggcagccaaaaatatcaaccttttttatagtaacaaaatgaaccaacacttaaggtaatgccttaacatacaaagtatagtacttctgcattttttagtttgttgcatttccaaagaaaactacagaaaaggacatttctatgtcactgatgctagccaaaggcaaaacttaattaaaattatcttaatttccaaggccaaaatagaccagatcatgtttatggtatgaaatctgtaaatattcaacctattcctctgtcctaccctagtaaaaggtgagtttttcttttcaaaaataaaatgtagtgtaataaagaccactgaaaaagttactaatgagaaaatgtggaattcagccagtgtgtactgacatattctaaaaatagagcaatgactatagtagactgtaacatacagcatacagtaaaaaaaaaaaaaaaaaaaaaaaaaaaaaaaaaaaaaaaatcactttctaattatacaggaaaaagagacgggggaaacgagtgccaaaagattgaataatctttttaactaagttaactgctaattcgatgaatcagtgtttgtgccacatggttttctactatcagcaaaaatttcagaagagacaaatcttgtttttgtgattgcataggcacctatctcacagctggaaaagtaaggctcacagctgctatttttatgggggagaaaattaattgtaagtgcaaaatgtttagaagatggctggtgtaaagcaactgtgcaatacattgtagatacataacatattagcaaggatcaattcattttttttttcacaactacacattgagcattatatgcattagtcatataagaagaaaggataaactgtgcagagaatactatcagccattgctgtgcaacaaactacctgaagacctgaagactcactggcttaaggcaataaacatttcttaccagctgggtatttcttctcacctgagccatagtgagctgttcttggtgggacacattctgcttctgcggtccactaggggttgtgttgggttgctttgctaatgttggctgaactcttccatttgtcctttcctgggacaacagcccacctttgccccatcaggctggctcaggcttgttcccatgccatgacagaaatgacacaagtgtaggaacatgcaaaggctgggagtgtaacaatgttgcttccaccccattccattaatcaaagcaagtctcaaggctaagcctagtttaaaaggtaggaaaacagactctaccatgtgaggggaaaaactgcaaagtcactttgcaaaatatgcattgatatgggaaaggatggagaattatgaccattttagcaatctaccatgatgactatgctaaaagaataattgacaaggctgcttttgaaatatctttaagcatatttattaaagtaaggttgttagcttcaaccttttcccatgtaaaacaaaacagtgcaaaaaaatcaagccatgaaatagtcaaattataagattgtaagaggataaagtcaagtttgttgttagaatgttacatgatagagatttatttattcaaaggtaaaattactgtaatgaatagtgtttagctaggtgttcatgactgctacctctaggtttgaatgtgtttatttattttataatatacagagaatgggactaatatatgctcattgtcgtgtacttctcacaagtataaccatttcatgggtttatctctggcagccttcaccaaattaatattcctttagttgaaactattgaagaagacaaggtttgctttccaaaatacgtattcctaaattccaaatataagtactctgccatgtcccacagacaatgccattggtacatttcagtacttcacctgatgctgataatctaagcaatggatttataaattggcttccatatctctatacataggcagacgctgttacaatctaaccttgacttcattggaggccctcctaaattttttaattacagcataaactggtgtgaaagaaggtttgttgttcatgaatgctcaatattattaatcagaaatggaaagtatacctagaacaccataagaatagcatttactaaaaattcaaagcatttatggctacctaggcttgttctgagtactttctctgaattgtttatttcacttaattcttacaccaaccatgaatggtaaatactatttttagcccagttttccgctgaggaaattgaagagtattcttggggcatatttaaggccatgtgtcttattagtgaatctatcattcaaacacggacactctagttccaaagtgacaaccttaacacccacagtttttattttcagcaaagctgcttagtggaaagagaagaaacagctaataaaatatctcataacctcgtacaagttttaaattgtgttcatgatttgctaccaacattcatttttagtaatcttttcctaaaaacaatgcaaagattttatttgttcacttatggaaactaggggttgtgaagttccattagatataaaataaggaattttgctaataaaactgaaaactttaaaactagttgtttatctctctatatacaaaaacgtattttgtttaaggaaactcattattttgaccaagtagttcatggctttggatatcagagaacaaatcttaaaacattgaataccaggccgggcgcggtggctcacgcctgtaatcccagcgctttaggaggccgagtcgggtggatcacgaggtcaggaaatcgagaccatcctggctaacacggtgaaactctatctatactaaaaatacaaaaaattagccgggcatggtggcaggcacctgtagtcccagctactcgggaggctgaggcaggagaatggtgtgaacctgggaggcggagcttgtagtgagccaagattatgtcactgcacttccgcctggatgacagagcgagactatgtctaaaaaaaaaaaaaaaaattgaacaccaaacactaacttagatcatgtaaaagtcaagtttaaagtaatgtaggacattttgctacaacatgtttcaagttattaaatttaacagaattccatattgactgacaggaattacagctatcatagtgtcaccgtgaagaatactgtgattgagggtattagtatatttgtgaattcataatgtacaatatatggttcatatttattctaggtaattattattacaaactgcaaacaaatatccttgatgtaccttatatgtagcccaaagtgtattttgtaattggcagttaaaaataagattaaaaagaaactcaaccttttcagtaatttactatcttgaaaactatagatatttgttacaattttttttttttttttttcctgaggcggagtctcgctctgtcgctcgggctagagtgcaatggtgccacctcggctcactgcaacctcagcctcccaggttcaagcgattctccctgcttcagcctcccaagtagcagggattacaagcgcccgcaaccacacccagatgattttttgtatttttagtagagacggggtttttctgtgttggccaggctggtctcaaattcctgacttcaggtgatcggcccatctcggcctcccacaaattttcatgtgtggatataatctccatcatgataaaacaaacaaatataacaacaacactcagaggtacggaagtgtgaaacagggtatgttctaagaacaataagcaatactatattgtagacactctaagaacaagtagttagaagaaaaggcacttctcaaccctaacatgtaactaactcgaaacctctgcagtgccaaatcattcctgcaaagaattatagtttttacattcttttctcttatgctctgttagtatcaactttacttttctattagtatgtcatagtctctgaagatagacaagagttcaaatccagcctggagcatttaaaagcataatgatttgagcaagctacttaatgattttgtgatccatctctaaaatgggaatcaaaaaattgaataaattaatgagtcagcatttaaaaccatgattggcaaataataagcattctataaatgtgttattgtaaaatctaaaagttaagtatgggaacagatgcttgttaactgagatatttatttttcttgaaatttctttcaatcccatttgactacctttttatatactaacttgccacttagtttctagtgatagaaaccttctttcagttgataactgattagttttgctaactttctgtctttccttaagcaaacaagattcaggtattaatatgtggcacagaaattttgcagacattttattcttatggttatccatagttttgaatgaatatgtccagagctgtgtcttaaaatgttttccttggaattcattcagtggaggtaggactggcatatttaatttatgtaatgatttacattttcataaaatctactattaggacagcaaatttataatatttaataattactactaaaaaccaaagctattttaatctctacttaacatctttcatgaggcaaaacattttgaaataagaacctatcaatactgtatgttcagttggcgtaacatgctgtgagctctcaggatgaacaggaatctcaaatccaagaagcaaagcctctctgttgtttacagtatttaaaataaattgtttcagttctctgtgggattgtttcctattgagaagaagctcataattaaaaatagcaactggaatagaattacaatgcaggtatttttacaatgtgggcacctggtatattatcttgaaataaactgacctatagtcattactgatagtgttctttctaggcaggatttgcataaccacagagaattattccctctgcccatccttttgaaaagagcatagagtatttagtagagaggaggtaattatgctatttgggataatagtcagatttactgtctgggactgctattctgaacactacatgaatttcagtataattgctcagatcctgtttagatgaaagctgattcatttttttcaggtcttctttgtgctccctttttattcttattggtattttttttaagcaagcaggtctaaccattgcaagcaaaaatactatttaatactaaaattgaccttcttttgtctgtatttagagattgtttattggaaaatttttgagttgtcatagatcaaaattttgttcaaatgataactgccttttattccaatgtttcattagcatacctgtcattgcccataataattacaaataaatgaacttccatttcttagactgtttagcacccaccaacatcaacaaggtcaagtggtaagctgaaagaattttgcatttgactttgcttatcaaaagaaaaccataattgcattattaaagttaagcatattttgctgtattttaattgtggtgatacttaagtattacatcttaaaagctatacttaaccagaatataaaagatcctcatgtaggacatgttggtaatatttcctccttttccatataaatatattatcatttttaatttctgtgacatagagaagctaaaactgaggtattttatatggcttgtcctataaattacccatgtatagtctcacgctgcataaacaaatccaaagcttacttaaataaaatagtttattttaatttgtgtagtttcaagaattatctttatacattttcagaaatagaacaaagcattttacctattgagttttgagcagataggtacaaaaaatttttgcagtaacacaaaataactcttagggaccatctgccatacttttaatgttaacatttaatttagttatagtttttgaaatttaaaagttaacctttcttttttttttttttttttttgagatggagagtcactctgtcgcctggctggagtacagtggcacaatctcagctcactgcaacctccacctcccaggttcaagccattctcttgccgcagcctccctggtagctgggattataggcacccgacaccgggcttggctaatttttaatatttttagtagagactgggtttcaccatgttggccaggctggtcttgaaatcctgacctcaggtgatccacccgccttggcctctcaaattgctggaattacacgcgtgagccactgcagccggcctaaaatttaagcatttttaatctatcaccaaaatgttttgtattattctatcctcatttttcagttaaaaacttttctaatcagtagaaattgcctaatgtaattacacatatactactttagacaattagttgatgagtaattaaatatctgcatggcatctttgggtaaataataaatcagcatattggtattatttaaaatatccagaatccattataatgcaagtattttgacactatggtaacctagtatattaccttgaaataaactgacatatggttatcaggtatactgtttcctatgtaaaatgatcacaattcagatattgacctataaattaccccaaatctgcattcaaaatacttttggtaatacaaaattgggcttgtttttaggccctccatgaaattgcatcattaaagtatgaagtttattggatctattttatcaatgtttattccaaagtcactcaccatgcacacactcacacatacaaacacacacacacacacacacacacacacacacacacgaagagatggggagggaggaggaagagagaggaagcaaaggaaagtggcagggatagaggagagagaaagggagagagaggtgaacatatacagctaatacaacaagcaaaattcctgttatttaatcagactccttaaataaaaacatgtgagagctatctttcaaagacttctcttaaagcatgaaattgttatatggcattctaatttacagtccacaaagctatctgtgatagcagaaaagggttctttcttgaaatggatgcttcattctttttctcccattagctattcaacgccctttgtctatttatattcattattgccgctgtaagaacagtgcgggttttcattacttcattggcatgggacgcaatgattcagttttgctgtcacttctgacccgtttccctccctcctccactttcgcttactgaaaatctacaaatagaaggaaaaacatagacagtataatacagtacaaaataaacagcacatacaaattaagttgtcatgtttagcttgaatttaatagaaatgcatgtattgaatgataattgcaaagaggcttatgaacaagcagtatatttggaagatttttctgtataaaatgatttttaaaagtatgttaactggtattatcaatcctctgactttttattatattattatattatggataatttttattccctctaagatattcaactgaggaagaaaaagtagttttcttaaataattgacatgatgtgtttacatatttgttttgaaatatgtgtagctatttaataagaattctttattttccgctcattctttatttttctgtggattgtatgatcatgtaacttatttttcaagtttctcacgtatgtatattgtataagctgtattcaccagtatggaaaacagtaggattcttgttttctcttaaattttactatcagtaataattatcaatgtaatgtgatgaattctttattatgattcacataactaggaaaagaattcttagaaaatacgtattctgtgctttccctctttctaatagtcatggataggaggaagctatattgaattttaaaacattttaacagaagtaattggatctcacacaacagaaaatcagtttaaaatatacattttgccagctcagaaaattcagtccattatcactactgaattcacatttattctttttcttccaaaacagataagaaaaacctccattgtatccagaggccttaagtttggcttaattcttcttcctccagcccaccaaaatattatttgcaaagaatttagaaaaatgtaatgatgtaataactcttcattgtcttattcctgggagctatagaatatattaaaatccctgtctatatgcaggttaattagatttctacaagactccacctggtcaagggaggggagagaaatgatcctaaaaaatctaagccctctaaaataagtgcctctgacactacaagagtctgttttatgctcaaaatacattgaagcatctctcagtctttgttgagttcctgcacacatcatggtacctgagcacccttacagctgtaattctctggaaaagcatgaggcatctttagtttaccaaaagtggatttggttataaaaagggtccataaatgctgtttgcatacttttctggttgttataggcagtaaccaaaatgagcatgtgtttcatagaaatgtgtaacataacactatgaaagcctaccaacacatcaaagctttagtggtactctattgatatcacttttcctgtgagggaaccgaagtagacaaactttgtcttgatcactgtggtggcattttcggtggcactggcaccattgtttgcgcaagtagttgatggggctgcttgagaaaccctatgcagatcatagcgactttgttatccttggaaaaaaatcttacctcaggcttttctctcaatatggtctcaaatgcaagttgaatacaggaagttgagtaggataaaataaaaagggaaaagaaagaattaatacaactgtaaaatatacaaaccaaggtgagtgtgagtgtcaatagtaagtgtgtatgtagcactataccataaataacatattgtatattatctaacattcaaactgaatatttgtggggtttttttgttgttgttgtttggttttttttgagacggagtttcgctcttcttgcccaggctggagtgcaatggcgcgatctcggctcactgcaacctctgcctcctgggttcaagtgattctcccgcctcagactcctgagtagctgggattacaggcatgtgccaccacatctggctaattttgaatttttagaattttgtatttttagtattttgtattttatccagctaattttgtatttttagtagagacaggcttttaccatgttggtcaggctgaactcctgacctcaagtgatccacctgccccgaccttccaaagtgctggcattacaggcatgagccaccgctcccggcctaggttttatgtaatatatgccagattgtgttttaaaatttttagcaactagggaagttaaagatgctctggaatctgtcttaagcaaaatgtcagtaaacctaattacctgggctaaactctcacatgattccaagtcaattcagcaaatgggtgctgtaccctagagcttttttattttctctagttccattaagggcactgagctttacattgagtaacacgttcaagactcccatatatatttgaagcatttgacagaataagaaatattagaattcagagacatagttaatattttagaattcattaattcatttatcccccaattttttatcatgtattacaaaatgtgccaagcagttttctaggcaaaatattttatcaatccagtatgtttttttcctcctgggatgttagcataattataatattgctattgctaaaaccatgaattttccagtttgaataagactacatttgttccttgatagaatataatgatggagataattgaaatttacaaggaaaaaaccatttgccatatttagggatgaaaaatatttttatctgtcatccaatactgagtaatgacacatggtaggactgtgatgtagaggtcagtctgtagtagaaaggatgggtagaggggttgttaaggaattctgtcatgaaggtaggtcagaagtgttagggaccaacatttcatttctattgacaggctcaatcagaaaagctacgttttatttgtttttatcactcctggaacatttcacttaatttattgcaattatcttatgaaagtcagtgctttctaacatggattaaagttacttctatacgtattccctttcctagattctcccaccttgaagataggattcacatttaaattgtgtttcctccacaatccctgggaaggagatacatagtaactatttgttgaataaatatctgagtgcaaaattctgcatttaagtaagatgttccctcagtgacttataaaaacccatggttcttttaaaaatccatgtccagcattgtaagaaagtagctaagcttgggtaaattatgatgaaagctctgctgtccttatagcactcagatttactttgaaagggaattgatatcagcgactgggaactgtaaattatctactaattttaggtcattagttgttcttcttgtggaatattaaacaattcccaactaacattttttttaatgttgttctaaaatatatgcctctgcctagccaagtcatttggcggtctttccgtcctgcaaagctgatccatcatctttccagtttaagaaagattttagctgaaaacatgtttagtgtcagtaactcctaaaaaagaaaaaaaagaagaacaaaaagaaaaacaggatgtcaacctgagtagtatctaatttcaaatctgtttggggatagtctgacctcaatttaaagccataattttggtactgatggtacaaatgaacaagagctaaggataaagtaagaaggaacagatgaagaccttctaaccaatagtgatacttatgtaagatacctaaaacactaacatagaaagagcttaaagtatatgttctttaacacaatgaaaagactagttaaaacattcagaaaacttgatggttagatttggatccccaaggatcaaaattttaaaaaggaaaagaaaggaaaaaagagaaaatcgtaaacctcaatatatatgtaacagctcctgttggcttactcctcttttttaacctctagggcgctactaaaaactttttgagattaaaggtagataatgtaaaatgtgcaagtctttggtgtcatcaaactacattttttttttcctaatgcagtttttctttcttgctaagaccatagtttttcattaacttgcctaccatgtcctagttttagattcatttcataaggcttttatatgttttctttcttcatgatgggaaatgattgatcaactcacacattctctgttatgtttcatgccaatgaagtaatatcctgtagagtcattttttaaattatgttttggtcttacattacaacctgcccatacctgtaaaaaagaagactcctagctctaacacagcatctaattaattgagcgcagatcaatctgtcataggtctgtaaccattgagagtcaagggttataattaatccacaccctttaccttaaggcagagctgaaaatctatataaagtttttaccaactgcaaatccatatgggtctgcagcaacctcaattcttgcttcctcagaagaaagaatttgactcaggggcataaggcagaagaagtgactgagacaagttttagagcaggagtgaaagtttattaaaaagctttagagcaggaacgaaaggaagaaaagtatacttgaaagagacccaagcaggcgacttgaaggacaaatgctggagttcgaccttttgacatgaggttttatatgtcggcattcttatggggtcttgtgtcctttacccctggattctttcagtgtgggttatccacatgtgcaatggtttgctagtgcttgggaggcgagcacatgcagtgtgtgtactggagttatacacatgctccagaagaacctgaggcattcttcccttttccagtggactgtgccagaaggtcttacgccagttaaattctgccattttccctcttagtgcgtgtgtgtgggcccactcgcctaagtccacagatcttatcagaaagctactggtcaccagtttcaggttttttttttttccatctataggtaaatgccttttcctggtgctggctgcgaccaattattattttagagaggcagtgtgacaactacctgaccatcacctgatggtcacctgactttcctggtggggtgtgagggctgtctcctgccctgttcgtgtctgactagctacccgctgtaacaaagtcaatggcaaatataaattattctacaagtcacatatcgaattaagaaactcattacctttctctattttattttttccttcctgttttttctcccatttccctcttcttacttcccttatacatctttccattctttcttcctttcctgttcatccctatttcttttattttttcctcccttccttcttggttttttaaattcttcttttttccattcctttcctctttttattttcttcctcaagcttcctccattttttttttcctttcagtcttgtctttcgttgtttttctttctatttttttcttttttttttttttttggtcaatctgtatgttacatctcctgtatgttcactgaaaattaggtataatggaaagaggagatgataaaatcaggatccagctttccttattttatttcctccttcttccctttcttaaattcatatttattgaaaaccacttaagtaagtatatctagaaatttgaggtgcagaatctcatttgttcgctgcaatgtccaaccaagcaaataaagatgcagtggctaagcaagggtaattaacttgcataaacccataggtgaatgtcaggattagaaagcaggtatggttactccgggggccctagtttagccaaatccttttacctctttcactgtctagattagctagttgaacaaatcatttggtatctgtttcttatttttaaccctctgggaaatgaatacaacacttgcctgtttctcttcttcattcaataaagaagatgccttcaattgtgccaggcatggaataatcaattcccatgatgatgattatggtaatgatgatagcttacacttacatagctttttgtgtgcccaaagctatccttacctttaggtggataaatgcatgccactcataatgataacttagccatttatcttaattaacgctggtgtgctggatgtaatcagtacatgttcattattcacaggtcgctgtaaagataaagagatgttttggggctgatacatcctttgcacattgtcttcatttttacatccaggtgctgcaagagaaaaaaagacatgtttaaccaaacttgatttaggttgaatacaatattcacttaagaccaattttgaggagaggaggtagcatatataaattatctatctttttaataacagaaaatcattaggaaggaaggaagtgtaagaaaaatatcagtggctataatttgcttccttaactgtagagatacaaattagaagagtttcatctgtaaatgtttgcttataaatttaagaataattaatttaagaataacttatttatttaagtccgatatcctgtgccttgctgcaagcagcagtataataatctgtggatacttggacatcagagacattttatctttgtggactttttatgttcctgtatctttttatatacaatcaggaaaatatgattactagttgagaatttgtagttcttgttagctttctgtatgtatagataagcactcccaatgtccaaataagaacaagtttgaacatttaaaaacagctcagtggtagaagaaaacgcgtctctcataaaaatttatttgttttaagttactccaacttagtttaaaataacctaatttagcataatgatagtaacttggtgattcatctgtaaggagttccattttgtaggaagaaaaaaaatatgtgggtctctttagttatctacaaggtagcagattttattatatcttgctcaggaggaaaaacttcatggtgcttctccttgttggttagtagcgctggagttaagtattcaacagaatcattattacatctgaatcacaatgtagccagaagttttcggagattttattttttttttccccaaaagaagcaaaagcaagtctgatgatgactattttggaatatttagccataactatctggacacaccgtgagcagcatattgtactgttttccaaatttcatgaataatatataactcatcagatacttcttagatcatcttattctgaatcctgaatctgactgcaattctaaatatatttaatcacaccaaatccccacgtgctctttggaagccatgtaggtatatcatgggctgataattagtcctcactttgactggacatttttaatagttaaatgacactacttaatccagcctaaaggataaataaatctcataagtcattgctagcttttttttcagagaagcaagttttcactgacagttactttaaaagacaagtcttctcaagatatttgttttcccttttaattctcttgcttttgcacttaagctgtgcattgtttagcctacttaacatgcagagcaggaagctgttttctaacttttccccctctttttgaaggttatttaatgcacatttactgaaatactgtaccttttatactttctaatctgtttaaagattcttcaaattattttttttttcaaatgctgatatacttgtaaagtccatctaagtgtagggtagagatgatagcgtgttgaagacaaacattctctttaattttctcaattttaccttcttttaatgtcccttttttttaagtaaattgggatttaagcagtaaaaaaaatatgattcgaaaatatataaaatagcaattatataaaaattgtttctttgggggaaatgagagattatacctagttaagtagatgacagagtactaattattatttataacctttattattatatatctgcaagtcacaaaagattaagtttcagttaactttgaatagctagtaattataaaatacaatgccaactgtcagaaaatcattaacttttgtacacctaatctttgaaattaaattattttataattatttttctaagcttcttacaatgtgcattttaatatttgttaattttaatacttttaagataagcaacactaaaatgtacctttttaagccacttttctgggggtttatttaaaagaaatgtatttggtactataaatttataacaaaaaaacatgaatctctaatctttcattttcttattggtaaacataacaaatttaaggttttgacacctttaatttttgccaggaaagagggtattaagtaaaaatatataattaagaatcaatattcgatacttaagaatcaatattctatctatcaaatatgtgtgggagaaagaatacgtagaatagtagttaaagcaatagtagtgagatgggagagatcacttgacccccttggacttctgaaaggggtggcttgtttactcagctgccactgtgctcaaaccccttgcgggaggaaaagcatgcaggtaaccgggtgcaagagccagggcaagtgcctttgggcgccaacaggaatgaaacccatactggcccatggcagcatctaaaggttgcccatgacctctggagccccagagggtgtgtgttacaaacagtgctcttttagctttgctgttcacggatggcttaagtgttaaacagctcagtgaagaatcagtgtcacagcctttttggattcccacacccagtgcacccataattcttgtccagcgtccaggaagaaccaggtcccacgaacagattgaagggtggtgtatgcagaggattttatggagcaatggaagtggctctcagtgtgatgggggtctggaaagaggatggagggagaagagttcggagaggaggacaaactcctctccaaccgtccccagccaaactcctcttcatccatccccagccgaacttctctccaaccttagtctccaatgtccagctgcctcttctcctctcaacgtccagatgcttcttctcttctttccttctctgccatgccactctgcttttctgccagtggagcttggggtttttatgggtacagggtgaggcggtgtgacgggccagggtggttttggaaaaggcaacattcgagcaggagaaaaggaatacaggttctcattagggccgtgagtccagcctcgagggtggagccctcaccagggaccttgcactcttctacgcagtatttgcctgcctcctgtctatatcagtagtgataacagcagagaatatattaggtgcttctatgtgtataccataatgctaagcactcaatgtgcattttctcatttacttctcagaacaacccaatgagatagactcagatttaaatcacttgctaaagaacatagttgataagtggcagaatgtggactcaaagcagacttcctttgttcagatacctgagtgttaaccaccccgattcattgatttctctaaatcacaagtgaaagtgaaagattacaccatgcatggttccttggcctttgtgctccaagatacaattattaaaattactaggtataggaatgtacttgagtgctctactaccttcttacctcactgtcttttcatatacatagcttttccccattcctacagattatttattagatttatggattgtgaccgtacaaccaaaataaactaaaatttcagatattatccaattacttgattaatgtagtaagtcaagttggtgaagcacagctgaaatagtgctttgtgttcattttctcttaagaaatctgtacattcttttccaatagaagaaacccaattgtgattaatatatcctacataatctctttgatgctttgtttgccagaaataactgtccaaatcatactccttttttctgttgttaagcatttatttctgcttctcacatctaattcgccaaggagtggttcagcatctcccattcttagtttggcccagcatgctgtggtttccaaacatggcttttctttctgtgaaatgacaataatccaaaacctcataaatgagtggtcttcttgccatgtaggatctaaaatagacctatcccgtgaagataaacctgttttttttagctgaatatggctttaatgatagtggaaatttgaggctttttaccaacacagtaattttgtctattttgacttggatacaaaattttccatctcattcaaggaccaactgagggacagctgtgggagaaaacctccaggaaaaacaggttggacaccaacagtcacatccgagtgtggtttggccctggaatcttcccaacacacactctcaagttgtcacctttctatctgtccaagctaaaaatgtccctcttatttaaagctaagacttttgtagttaccactatatctgacatccagagatgctacttttcacagctttcttcttccacatatagaggagtatttttctgctttgattcagcttagacaaagaagatttttttctttctgagtttatagtacagactgcccctggcatatgatggtttggcatatgatttttggactttatgatagtgtgcaagtgatatgcattctgtagaaaacgcagttcaatttttgaatttttatcttttatcttttcccaggctaatgacattcagtacaataatctctcgtgatgctaggaagtggcagtgagccatacttcctggtcatccagaggatctcaagggtgaacaactgatactcacagtgcactgtgttgtcagatgagtttgctcaactgcaggctaatgttctgagcaccttcagcctaggcttggctaagctatgatattcagtaggttagtagtattacatacatttttaacttaatgatattttcaatttgcagtggatttattgagccataacctcattgtaagtcaagaattatctgtacatttatgtcttgtggatcaagatgttgtataatattgtgattaagggcacaggtctggcatcagactacttgggtgtgtaacctaattctgccactcagcagatgcaagctcttgggtaactcacttaacttctttgtgccatagcttcctcatctgtaaagtggagtaatatacaactagtctatttcttagaacagtgcttgacatatcctttctttttttttttttttttttgatacagaatctctgtcatccaggctggagtgcagtggcgtaatcttggctcactgcaacctctgcctcctgggttcaagagattctcatgcccctgctgcctgggttcaagagattctcacgcctcagcctcctgtgtagctaggattacaggtgcacaccattatacccagctatttttttattttctttttagtagatagggggttttgccatgttggccaggctggtctcgaactcctggccttaagcgatctgctcacctcagcctctcaaggtgctgggattacaggcctgagccacctcacgcaggcaatttattgaatgtatgaataaatatagttttggaggttatagtactacaatagtgggactcatcttccttaatcctggaaacttcttgccagttttgtgcagttaagtccatttcttcttatttcttcttcatcttggaattttccccgagattttatgtcctgccttagcaaatctcaattccactagtccttggcttatttgcggaacagggaaagatgacaaattagaaagcagagattgccagttttgtccatctgatgattcactttagtattcacaaagtaccaccaaatggttaatatagttcacataaattttaagtgtgccatttaaaggaaaactctctttagtgatgatttctattgctaacaatgcctgtaattttatctatttgtttctgataggattgatttatttgaattgtacaagacactggccaatacacaaagacttgcagaaattaattccctgcagccagtcttctttgcctaagaactgcagaatagccagtgaagtgaattcattgctcacatgggaaaatctgtttacaccatgaaatctgctctcctatgtgatacccacttctggcaaagtcaaacctgaaaatattggcaaaaacaaaaacaaaaaagagagacttaaataaagagcatgtgtggcagatggtggagacgaatagttgatcatcactgtctgctagtctcactcactgtactcccttcaaattgttgcagtaccgtaattttgccatgattatctatgaaattatattgactgttaagctctgactcacgcttttcttaagtcatctatgggaaagatgacattctaattacactcctgatttttttacactatgagtttgttaagcgcagacacgtttaactaaagaagaagcctaaatgtatgtaatttgacattgtgacagattaatacttaggcattagaccagcagtacaattagatagcttgaatgtgtcctacatcttaatgtctatatgactttaagaagtcacattaaatcctccttttttaaagggtctgttgccattttgttgattgaaataaatgaaagtctaccagaagatttaagtgaattatgagtaggttcatcacaattacacctaattctagaaaattgaaatctagggaattaagtgtaaattcagaatatctcaaggtaagaaactatatttacattagatttcctgaagtggttgttgaggatgtaactaactcttattctttgagttatctgaattatttttaataagaataaaactttagtctctgaagtaatttgaaatgacagctaaaagtaaaatttaaaattcagatgacattgtgtgcatattaaaattatattatgctatagcaaatgtcataggataacatacagtttacacagaaatagccaaaatacaccaatttccatataatatgattaaattatagaggctttcaagctttttcagtgtgactcaaaataagaaattcatttttcacagtgatcaagtacctatatgtgtgtgcatatatatgtgtgtccatgtgtatatatatacatatatatatgtatgcacatatgcatacatatgtatatatgtgtgtgtatatatatgcatatatatgtatatatgtgtatatatatacacatatatatgtatgcacatatacatatatacacacacacacacacacggacacacatataaaagtctgaaacaaaatcttctttaagtaacctgaacttcatgtaaagctggttagagctccttaaatggattcagtcaccatctcatgggtcatggcgctcagttgaaaagcactgatctaaactgtccatgattatacccattttaaatgtattcatcaggttactaccatgaggcagataaaatttgtcaaactgtattaggttggcacattgcctacagtagttcttatcacaatgccctcagttacaaggatgggagaagagagccttctgctattcatctcttctatcagaaacatttcatctgtgttttgaaaattttcatctatggaatgagctgtgcatgagacaataataaatattatctcccaagtttattcttaaaagacatgtataactgccaactagaagtcgtgacaacgctaaaataactataaaatagctattatccataagcaaagaagcttaacaggttagttcatgtgtatttccttgtgaccactaaatatagaattttcccattggacttcttcttagcagcctctactgactctactgacagcaccctgctccctaggctgggtttgaagactgcattttgtgttataaaacacttccatgggttattcccattgactacattgttctgttagaaagaaaatctcaactaaaaaggttataggacaggtcctaaaaggggatgaggagagtgagtggtgaagttcattcagatcagcaaataccaaacaaaaaagcaaaagccacattgctttctcagcttggccagtgacattgcatttaggattaacagatatcttgctaataattctacctgtggccattgtgaaggtagatataatcatcagggatgacaggtaatctgtctccctgctatatccttcattcaaccattcaacaggcccttaatgagcatgggactggaatggtcctaggattcaaagtatgtacttgaacagcttaccctgcccatagagagtgatatttacagaaaaggtcatatgaataggtagcagacttcagtgccagacattaagtgctaagaagaggtaggcataggatgaagaccaaactggcaatgaggaatcaaaattccacaggctatccagaagaaatcttgaacgagatgccttggaacactgttttgaaggactcatgagagacagataacaagtcaaggaatagcagaagaaacacattaatatcatgaatacattgaacaacatgaggctttccagaaatgatacctaccttaggtctgtggaagtggcaaatggcaacatgtgagatccgaaaggctcttttgtgctaaaataaggggtttgtgatttatactgaagtttatggaggagagttttaaactaggaacagacttgttattctacttacaattcctaaaataatcatgaaattattttctttaaattttgttattattattattattgagaaggagtctggctctgtctcccaggctggattggaatgtaatggtgcaatctcggctcactgcaacctccacatcccaggttcaagtgattctccggcctcggcctcctgagtagctgggattacaggtgccaccacacccagataaattttgtattttagtagagacagggtttcattatgttggccaggctggtctcaaactcctgacctcaggtgatccacccacctcggcctcccaaagtgttgggattacagtcacgagccaccataacaggccacaattttttttttattaggtacagttttctgctaatcactaggagggaaacaggttaaagaaaacaacaacaaaaaataagtgatgaacaaataataaacatcagaaatcacaaaaatgccataaatcctataaagtatttattagagttgtgccctggtacctgacactgcttcttagatgttacgtcaaattctcttctcttcttgggaattacattacccaaatttagaatgacttaaaatgattcctttgattatagtgccagaggcagctatcactaaggggtagagaaaggaaaatatgatcacccagaaaggtgagctgtttgtactttactgaacaaaaataatttaaggtgtgttgattgatcatatacaaataatacggacagttggatactagagtgaagtagaattttcaaaactgcaaaatgaaaattctttagtgtattctaaaaaattaggtacgcatgactcaatgggaaataaaaatcagtttttccactccatatcttttaatggatgaaatataggtacaaagcacaaatgcagcaagtctatactaaccctactgcaaccagagaattgggaatgtgtttaaggttcccattgtagctataaacaataactacaaacttagagtcttaaggcaatgaaaatttatttaaatcctatagaccagaagtctgacataaatctgccagagctaaaatcaaaatctcagcaaagctgtattccctttctagaggctcaaggggagaatccgcttccttgcctcttcctgtttctggagcatgcctacattccttttccatcttcaaagctggcaatgacaagtgcagtctttctcacatcactttattcttacatgggcttttcttctgtctcccacttccacttctaagaagccctgtgattaaaaaatggctgagtcaggtcatccagtataatctccctatgttaaggttagtttattagcaaccatggcaaaggggaatgaaggtttcagatagcaatgtcacctgaaaccttcattcccctttaccatgttacctaacatatgcacagttccacagattaggatgcatacatttttggaggggaccattattctgcctaccaagagaggttgtaagagtgaatgcgcagagcagctcctgccccaacacagggagcactgagactgcctctaaatccatgcagcctgagaaggcataatgttggcatgaggggatctccagagcttgcttctccgtgcatcacaggctccccgggaggtttaacagtgagattttgccactctccaaagtaataggcagtaaataaaggaaaacatgtcaatgagcagggaaaatcaatgaagtaaactgatccagtgttgcttcattgatttctcccctttttatctgatcattgagttttgtttgctggtcaccagagatcattttcttccttttccttttatttacctgctctgcactcctgagctcttcaacactcttttgctcctaattgtgattgccaattttactttcaactgatcagcttattgatcagagtaaggagccagcatttcaaatgtttaaaactcttcccatgaatggtttttcagctcctaacaaaagctcccagatcttcatcccttaacagtatttcagaactcaatgtttgcttgaaaccttcctcagaggttgaaattttgtctttctctcaaatcacaatcactaatgaaattctattacaacacagcttgttattaaaagagtagttccaatccaataagcttttctgtgtgatttctgaaatgtttcaataggcaatcccaagcaaagagtttgagaatatgatttgaatatattatctttgaatatgatttgaaaatagccatgttattagaataactgtatagtttctcatgatgactacaggaaagaaaaatgcatgggtgtcatatttattacattaaaaaaattaggattacttcaataaatctaaattgctgtgatttgtccctgtgcaaaaagtaatcacctttcaattctacttcaaatatgatttgaacttcaatgtgattcattttagattttcacataaaataataaatagaaaataacacatggaaatacctcatatcacatgatgtctactgtagtgatactttctttcttaagacatcccctacaactgaattaattcgatttaacatatttgtactcattaagtattttaataagaactgcttattgcagaggctatttcttctcatttacttttagaaatgctttatcatggtttatatggaagaaaagagagtttaagaaaatatctattacattttttcaattctcatttttcccccatctttttatttgtgtaaaagtatatgtcatgggggatagcaaagataaaatgagcgcttccttcaagattacaacccaaaggtgatattcttacagttaaaggagactttatgtactatttttaaagtaaacatccattcctgaaggcaatattaatatttatcatagaatatacattctacaactttatcatcaataataaacatttagttaataatccagttacagaactaatgagtaaaaagatcatactgccatatgataattacctagttatgatgtaaaatttgataatttgagaccattaaaatgaagtggctctaaattgatacttacaactgttttagtaccacaccaatacactttctagtaaaatcattatcattgtaaagtagctaacaaattctattaacttataaacagtgccccatttgcatcattattgttcttatttggacttctgtgataacaagaactgattttacttcttatgacaaataaacaaagattcagttgctggcaattcaagacactggtttgaagcaaatgttgaacatggattgtaggaaagaagacaagttttttcaggttggtgatcagcaatcagttaaatccattcccaagaatcaattttctatttaaacagaatcttgcagattattaggatttttggatttgggcctccaaagaacttacctaaaatattgacataatcatacctgttttcttttcttctaaatatgagttttataatttgtttgttttaaatctttgtgtcactgaatggcagtttatttaccacatgtaatttctgcttgttgaggacaggtgctgaatttttaaacatttttgactttgattctaactcaatggggaaaaaaggtctaggtgtgaaaacacactgtctttttctcattcacctggatgttggaactattctgagactctaattcaggtatcttgaaccccacagaaaccatgcaaaattttgtgggtacatatttgcatttatgtgaggagacagtacttttagttttcaacaaattattaaagtatataattcccgagcaagtaattttgaatataggaaaatccaagggacaagaaggaaaattatgaaagctatgattatttcagtgaaaaagtaaacatgaatgaccaagaattgggtctattcttagtgggataatcaattggttattgtggaatatatgcccctgtctgttcctgggttttataaattctctttatctatatcagtgaatcatctcatttgcagcagttatttcctctccacgctgctccttcacatgagtaccgctgctgtctctaactccgcatgggtaaagaggagaaccaaagtgaagccacatctctgatgtgcataaattgatcgctcctaagcagtcctcgcacatttttctgctgtagtgcagttttcatgtgccagccagcagattcatgtttgagttgattcagcaagactgcttgagatgtggcgtacagaatctccactctatataataatgccacattcagaatgacagtggtctaagcctaagggcagtaaatgcttcttgagatacattcaattgctgtttgagtttagcctaaggtacaaagaaaagttgctgatgctttcagacatgtttaaacattttaatattgtcttggcatgtcagcttgaactagagcactcctaggtataacacagtgaaatcctgtaattaaaggaccagaatttctaaaggtttagatagtagctctctacttgaacttcttaattaaatgtgcttatatctctgaaaatgttctgttataagcattgtacttgcagtgatattggtcagtctattatccatgatgaggagatataaaagaagtagaatgggccaggcacggtggctcatgcctgtaatcccagcactttggaaggccgaggttgggggatcatgaggtcaggagatcgagaccatcctggccaacatgatgaaaccccgtctctactaaaaacacacaaattagctgggcatgggggtacatccctgtaatcccagctactcaggaggctgaggcaggagaactgctagaacccgggaggtggaggttgcagtgagccaagattgtgccactgcactccaacctggtgacagagctagactccatctcaaaaaacaaaaaacaaacaaacaaaaaagaagtagaatgtattgttgttagatcctgggttattgcttggaacagttaatttattgcacatagcataatatatctatgatcattatttcaggggcctattgctttgtcaatgaactatttcctcaaaacaaacaaacacacaaacataacttagtggcttcaaacaacaaagatcaattacttctcacatttctgtggattgactacatggtttttcatgttctgcctggctcactcatatgactgcattcacctggagaactgactaggatagactttgctgggtcagctgggtctctgtctcaagtggggttccatctgcaaagaggctagaccatgctttctctcaggatggtgatcccaaagttctaaaggtgaatgcaaagttgtgacctcttaatagctgggctgaaaatagcacagtatcacttctgccacattctggttgtcaacactagtccagcttcaagggatgcaaaatcgacagtaagagtagtaatgtcacattccaaagtgggtatgtgtagggagactggaagaatttcatgtccatgcatcatgaaatcttcatagctcatgctgaatggctgttttgttttatgatttttgatgtatggtgcattttaggtatttaccctgtgtttaggttgtcttgtcctgattttcaatttctcattcttaaaataatgtattgctaattttgacccatcttttaatggagctgctcctcgtgctgcccatgcaagcaaagcaagatagcacgctggcaacctagtatcttaggggcaagtttcaagtgaaatcattaatcgtgaggttgatctgtgaggttgtaaagataactccaaataatacatcatttgcccttgaattttgagcaaccatgacacgtgatgaataaatctttggcaaactcctaatagaaaagtagtaggaggatgcctaatgtggagtaaccaggatccagtggccagcgtatgtctctagatagatagtagctctgtgtatcacagactctatcagcataaatccattagcactactagaaaactaactgaaaataggtacccatttgcttgacaattggtatttattccataataaattatctgaaacccttggagccagatacatttcaaaatttggaatccttcatatgttataagacgttatatgttatgcatgtgtcatatattattttaaaaatctaaaagtctaaggccatgcttttaattaaacacattatttctatagtaaaacatatgaatattcacactaagtgagacaaaaaagatgcaaatagccttgcattaattcatatcaggttcgttgtaaacttatgaagggggaacaagatccttttgttttcctaagatattttgaagactgaatttggattagggattgtgcacctgaagcaagtaatatttattgagggcttactgcatgtcaaaaattattataggtactttatatatattaacacattcaattctcacagtaattctaagaaattaatacattcttaaacatttattacacagatgaggaaactaaaatcaaggaacttgtccacatttatacagctgtgaagtgacaaagttagaatgtgaatctagatcacctggctactgagcctgttctcttaaacaatatcctttttattcctggaagacttcagagaggaaaaaatctctacctccttaaatctctccaggggctatgacctactatttactgaacacctacacggcagccaggaccatattacgagctgtatagacattaactcttttatcccacaataaatgggggagtaggtattattatctcacatataaggaacttgaagctcagaaaaattatgtcagaagtcacacagcttctacgtggttgagcctggaatcacactgagcaatactgggactctaaatctcctgctctttttaaaagttcattgctctttgcaggaagggcccaggaatggtacagatgatgccacagcaaggattgattgattagccagtgttcctatactcttctattttggttaaatcaagtgatcctgtaataaattaaaaaactctttggaaatcttaatggcctttttgtggccagagtgacacttacttagataactataaatttctcctcttccagaaagtgttcctacatttagaggatcacaaactgctggtctgagtcagtgattcccgccctgaccgtgaactgtgatgtgtttgcctgtccagtcttcctaaattccccaaaccggcaaaaggcagggatattttagttatttacgtgaaaaagccaagtccaactcacttgtgcatcttttggatcttgtctcctcacctccaatctttattaactatgataataatcatccaaaaaaaagttttggttaaccagcatttaattatttttttctcagccctatcatataaaataaaagtaaacaattttctaacaggtattttaaaataaagcatttatttaatcatttgagtaaaagatattttcatttagactaatgacagtgaagggaatgttaaaacatttgttgtaaaacatttttcactgatcttttgtttttcttgtttacccttttgtaaaaccttttgtaagtccaccaaatttcactagcatttaagtgtgcttctagaaaaaataagtctttgtgtagagggaagtcaagaaacatagaaagaaaaccaaacactttaaaaaggaaaaaaggaaaaagttcctgcatgtggttttgttttgtgttgttttgttattttgtctctaaaggaaagaaataccaggccgggagcagaggctcacgcctgtaatcccagcactttggcaggctgaggagggcagatcccttgagatcaggagttcgagaccagcctggccaacatggccaaacctcatctctactaaaaatacaaaaaattagcctggtttggtggtgcatgcctgtagtgccagctactcaggaggctgagacatgagaatcgcttgaacccaggaggcagaggttgcaatgagccgagatcgtgccactgcactccagcctggatgacagagcgagacccttctcgaaaaataaaataaaataaaacaaaataaataaaaagaagaaaatacttcttatttttttgcagattttgtcaagtaatgttaatcatatgccagagcttgatgttaatgaacaaattggaggaatggtgtgggcatctgggaagtccatacgttgacttaacaatccgtttatctcacatggccagcaaattaaataatatgtgagttaaacaaataaatgatacatacagttttacatatctgatctttaagaaaactcattggaaatattttaatactaaatataacatgttcataccttctctcagcaaatgcaaagatccatgtatctctagcctcaagccaaggacctggagtagagtgagtgtctgggattctgacaggatgcaaaactcagcatacttaaaatccttcctggtgcagaactgtcttcaagtcttaatgagtctactgtgctctcctataataattttgtctctaatgggttctgaattatgtaaggcatcttctggaaacatgaaattcctctctaaacctgggctttccttgttatttctaaagattctattatctatctgtcacttcttgttgaggtcattgtaacagcatctagcagcatctgcccaccacccatccatctaccctgcctagtaaaaacaaaaatactatgtttttgagagataatctgacttcttaagaaaacatataattttctccactttccaaaatgtatagttttagggaggttgtttcattcttttcactaagtagtaaaatttgtgactctgtgacatctatttcctgtgctactcagatttttttttctctttctctgcagactgtagcttgttcagatggttatgagtagcagtcattgacctctaaataactcagctgttatattttaagaagaagcaatgggttgtagtgggaaaacagtaaattgaaagtcaaaacacttattcttcggcttcagctctcccgtagcttggacccgttcgctgttccatcctccttgctatatgattgaggtgctaaattaaagagatgaacttcatgtgggaagtacttcatgtgttatgaattgttctaagattgtttgctagtttgatggcttaaaaactgttactttctcccagcactttgggaggccaaggcaggtggatcatttgaggtcagaagttcaagaccagcctggtcaacatggtgaaaccccattgtattttgaaacaatacaaaaattagccaggtggtagtggtgcgcgcctataactgtagctactcaggaggctgaggcaggagaatcgcttgagcctgagaggcagaggttgcggtgaggcaagattgcaccactgcactccagtctgggcaacagagtgagatcctgtctcaaaaaaaaaaaaaagaaaagaaaaaaaactctactttcaagagagatattaaccttatgtctaggaaaggatcttaactttctaataagatgcaatgattctagtaaatagcataacttggttaaaatggaaacctctacaagtaatgctaagcaagaacaggatttgatggataccatttttttacttccagtcttctcaaggtttgatatgattgatggggtatgcgggcgttgagaaatacagaaacaacaacaaaaaattctctaaggaactggctttattgtggaaaatgcttacagagaatactattttattttcctgttgttcatttgtattgatttactcaatgccagctaagatttgtgatcaagtgtcttccatcttcactgagatcaaaatttaaaacaacagtactaaagcataaaataatgttcttagatgttagaaaagacatccttcagtgaaagactaagaagagttactaattgtgaaaggctttcctctataatgccacaaaaaaataggacagtttaaaagtatgtcttttatggaaagaagaaataattgcatgtgatgtttatctaagatcctgcataaattttgtgttgaaaaaattcataatatatgcatgcataattaaaataagaaaatatgtaaacaaagaaaaatacttttccactcatgcccttctttaataagttgcatcgtaatacagattgcatttgttaatcattggtatttctttggaagattcactttagtcaaccaaattggaagttttgattgcttgtgatgaatctcttatagcccttcttgattatttttctaaatttgatgacaaacattgcaacatgtctcagccaattaggcttgtcaacttcctctgtggtccccaatcaagtgttttactttggaaatgacaggagatccttattaaaagtcatgcttcttggatagagatgtggcagcttgcatgtatatgatggcacagaagacaagctgcctttcgttaaaagcaatagaggaaatcaattttggcagaaaatactccagactgtgaagtaaagactgaaggaaagaactgaagagcatctcacttatagctgattggagattcagtcaatctatttaataaatgattataatctcttatgagctgtaggtagtttaggtacacaagttaaaaagtaagaagacttgtttgagcatgaatatagaattacaagctgtttataatgcatctcaaacaacaggaaaacaagtgcaatgaatttcaaactaaaaacacaaattaatccctgaaaagcagccacctgtataagtcactgtgtaagtgaaatgacatattgtgtgagacataaatgtggagagatgattggagacaattcagggtcatttctgcagggaataacaaccacattcataaagatttttttatattttagaagctaaattcctgattattttcccatgtccttgctattcactatcataagaaaagaggagcaatttgaatttgttgaagcagtgaaaaaaaaaaaaggaaatattttgagtaaaatgcagacctgatcttacactttgcatttctatccttttttccccctgttcaaagcatttaggtcaggttaaaaaaaaaaaaaaaagaaaagaaaaaaggatcccaaaataggaaatattctcaaagaacttgcagtttgttcatttaaaccaactagattacaaaaaccactaataaaatttgtcaataatttgattattataatgcatctaagatacgtatttgagaaacagacaatttagggtaaaaaaatgagtgggaaagtacttttttcttttgatgaaaaaattaagagaatctgctcacttgtaagtcaaatggcagcatcggcaactggaataaataattaaccttacattttacctacaggaaagggtcagctaattctagatttccggtgtagaacactagaatttccttgttaacgcttagtcaagggcataaaaatcccaggacgctgtttcaataatcgatgggccgacaaatgtcaatacttcagttacccatcattgaaggaaaaaatgacaaacattagtggcgagccttcatttaggagatttagccaagtaaaacgtctaaaatatcctatacaaatgttaaactacaggggatggggtgtggaagcaaaagcagaaagtgtacatatcttgggaataatttaaataacttcctcttctattttaaacgaatctactaggattgtgcatatgcacatctcactgattccactggttgcaaatatattttcagaggtcaaattcgtcagtctttaagtcccaagccttgtaataaaatgataccatgtgataacaactggaatgcagtcatattatgttcttttgtttggcaataaaaaacaataaaacattttaaataaaacccttcaggttattgcctcagaatctgttgaagtagaacaggcttttctctctcccattctctctttctcaaacaaagtctgtaaaaacatgtttaatatttagaaaatacataaccattctccaaagacagacacatgctttcaattatacatacaggtaattattaactgtcatctttaatcttgtttcctaagaattctttgtacatgatttagccttttagaagtaaaagtcatttcccattccattggacagcaccattaattagagtacaggctagttcatccaaagtttagtaacttacccgtattcacccagtacattacatttcagataagatggcctgtgtattttgatgtgaacacatcagcacatattaggtcatttggcatggtaggaggggggtgaggggatgtgggctagggtgggcaggtgcgtgatattgctagtatgcttatacctgtaactactggttccttgctttttagtttttaccacataatgtgctgtcaatttaggttctacttatgagtcaccccatgtcttagaatgtattttaaatataaggttttgcatatttgcattctatgaataatgtataagcaggaagaaatccaattggcaaaagcacaccacttctgggataatttataaatccagaaaattgtctatttggatttaataatttttcttatggatgtggaaaatattagcacccatacaaatttacctatgtatttagagcttctaactgagaccatcctcatgtccctgtcctgtaacaaacacacatatatctgtttcatctacacacttaaatgtatcattttgtctactttcctgttctataatattggatgtccttgcaaaaccttatctttgatgcacatgggattaaaaactgtcctatggaatgatgagctagagggtgttgggaaatgagaaataagatggtaaggaatatatttatatatttcctctaatttcatatagatcaggggagcctgttgaggagtgtcaaatactaatggcttattctccttggatttcagattcaaggcctcttccagatgtagccctgactgggaagtgcactcgtgagtgtgatgagtatggccactcagactcctgctggatgccggtccgcacttctccggagaggaagaagagccagcctaaactgtccactttcatgcctgttgatgaacgaggaagccaggaaaagctggccaatggggaggccgccatcatgggtgaccgcaacagaaacctcctgaacaaaaagttgacctcatcctatgagaccttcagtgcagctagtttcagcaaaaatgaggaagccaaccctgaggatattccccttacaaaaacaggggaatataagccatctcctgtcaatactctcactagaagagaagtttacctgtaggctataaaggagcaacagcaaagttctttacatgtatgaaaaggagaataaggggcaaaaaccttacaaagcaaaacgtttaatcacaaagagggggctaccaaagagacaaagctttgcctgccacttctgcctccagatcaggcctttagtgatactgttagcctgattctactgtacaatgtagaaaccatccttgttacttgcatgtctaaccccttcactgattcccaacactcactttctcttccccaccc

SEQ ID NO: 27 - DNA, 149075 bp, Homo sapiens
aaacagagaagagctggtgatagctccagagctcagagaaaggaggtctctttacaagaagtctggctctcaaaggtaagctcggtcttcttgacctgccttttgccatctacctctctctttggatctcctgcccctgggtccctgcttgccctgcattctccatactcacggagaatcaggacctccagaacagcccagcgtgggcttggtcaggaatgatccaggctctgaagggttaaggctggagcctggatggatggagagggttattagttatcgtttggagagtggagtgaaggctcctcccctgttgcctacccgcccctttcacatgatctctgactatagctgtggaagcggggagaagataaaggagggaaaaaaaagttcacaaaataatttagaaagtccttataaatgcttgtgttttcatttagcagcatgaatccaggacagcaacagaccctcagaggcagcagccaactgggaattgagtggaaaaaaataggaatcctggattctggcagtttccagttgttttcttggtggggggagccgtggtgggaagggattaaatcaaatctttcgggggagagctcagctctaggctttcatggtcaaaatactaaaggtcagctccgcgtgtgtgccccaactgtcctggaagcttcaattggaaaactccaaactttaagttttgcttatagcttcagctcaagtaagaaaaatgaggtgtggggtaggcggcgggggggtggggatcacaggaaggggatcaagtcttagatggaggggaaggaagtggagatggatatgggtgggaataaggcagaagggagcggtgtctttaagtctgtcctatggttatacatattttttcttctatgaatgggttttgctgtaaattatagctttgcccatagtcccttgggtcaaaagaaatagtctccaaacagaaaacagctctgattggtgactttccttcttccctccccaacccccttcctaattgaaaccaaatgtgcaatatattggatgctgggatccctggcgctttcccaggaatcctcagaatgtgaggtttctctcaaaggcatcttgcatcagcctgtggatgtatgcctaccaccgggctccttcaccagcaaagtggaaaaagaagcgtttcacaacaaattcttctttttgggttggggaaacgcagtggattatagctctgttttcttctttccaaaactgtgcacccctggatgaaagtaagttatgtgggtcttttttctttattattttttcttttttgaaaatgaaagctccgcatatacttcttttggtgtttcaggaaaagttttaaaaaggaaacagaagggcgttttaagtcagacaaggaagggaacgtaatgaggcaccacagactcgagaaatcagatcccatgtttttgggggtctggatttatgctatgaagggaagaataaagagcagtaataaccaaagaagcctgaagcaaaataaatgaatctatagcagctgcaagatacaataaacagtgttagcagagttgaaattgttggcaggcaagacaggccgattgcagagttagtttcaggatgaagaaggcagagcaggagagctaagtttttagacatttagtagtggtgttagaaggtcctgagttttggagatagtgtagaccaagcactttttgtttttcaggggagttgctgatttacttgtgagaagggtaactttggatgaggggtggcttccccctgagatttggggtggctagggggaggctgggtgcatggaagatttttcagttgtgacagtgaaatacagcttcccagactcatctcctcgctggctctgggtgcctttccctttgttatggaatgactggggctgttttcatttgggacctctgagtcctggcctaggttcaagagtcccatccaaagggaaagagaactgttcccagtggctgaaactctcagaccagccatttgaggcaagagttcgtactgttcaagccagtagggggttcagcaccattttgccgatcattggcttcctacaacacagagttaagagtcctgaaaagggccttaggcctctcatctaaccccttcgctccacagatgtaaaaaatgataggaaggggaccgacctgttcaagtcccacagcacatctgtagtggagctgaaaatgaaattgagattctctctactgctagtccagtgttctttccactccatacctctgctttcatttcctttttaaggcttattctggctgagacaatagaggcagtatgatgagcaagtcaccacaaggacgttaattatcagtaatagagaggacgccaatggcggctcatcagctaatgatgtctatggttatatttgtgtgtgtgtgtaaaataaaaagaagctaaattctgagtattttctatgcagcaggctcaaaataatacataattcatgctcagagctcttcatacataatttgattgactctcacagctatgtaaggcattatttctatcgtacatgtaaggacattaacgcttagagaagcgaaatgagttgctcaaggaaaggtagctaatacatttgaaactcatgtatatctgactctaaaacctatgcttggaatcactattcaatgatactcccctcatctcccttgcatttggttacttttggggtcaaattccatatttcactggctgatcaggaggtgaaggtgtcaggctatgggagcagtatggattctctctcagaggccacttctgcacttggctgaacatttgtctggatatcagatgtggggttgatttctgggtctttggtatatacttacctttgttatgcaaagagcctgggacttagagtcagaagattcaggataagttctggctctaccttttactacttagcaaagttgctttgcctttctgcaccttgacttctgtatttattatatgggaacaattgcagtacctttcagtgtgattgctgcaagaggtattggacatgcatgcatgctgaaggctatcaagggcttacccatatcagctctttcgattaggatcggtaaacacagaacgtcatatgaggcagcccctgtggtgctgggtctggcagttggtgctgatgctggcaggagggcagatggatttggatgtgtgtgaaactctgaaatgggtggcctcagtcttagtgcccatctcctttgaatggaagcaggccttcctccctcccgggggaatattcctgagggctctgtcttaaattctgtctcttaaattctcctccactggcctggtttgatatgattccttgcccaaagcagtgcaggctgaaggacactgtgcttggtgaagcatcccctgtctctgaaaaggaagtgtttagtcaggaccagtcccctgattgctcctcagacaagactgacatttgaggagcttcgtatctagctgagggcagatccttgacccaggaccttcttgtcactggcaggcacatctcccttcatcctttccctggcattccctattctgtgcctgcagtcagaagggaggctgctgctcctggggtgggggtggagagccagcctgcagtggggaggcctcagcctctgtttctgggtaagatccatttgctttagaaaccttaaatgtaagggaagtgggtaaggtgtttccggaatgcctttcacttagattcctcaacagagtctccatgtccaagcacaggaccttatcacctgcttattctcccctagccactctgtgaactcgcacttttctttccttcttgtataattgctccccagtcttgaagtcatctgaattctctatcacacacagtgaatttacttcaaacctttccatgtatttgcatttttaatagacacatgaaaaaattggagcggccaccccccatacattcatgtcacaccattttcaattcgcatgagctctcagatatccttcccaagctcccttacaagatctgctttcaggcacttcacatcaccctcacctcaaacacacaatccaaacacatgtctcgcaggcatccaaaaagcaaacacacgtctaaaagtggacctccacagacatgctaacattcttgtgccagctcacataaatggtgacctgtccgcaacacagacacactggactctttatacctcttgccctgtttgaagctgtgcaacatatgaattgatcgactctgtcccaacaatgactagtcagtccagaaatgtgtccagcatccccaggcatcccagggcttctctgaatgcagcaaccatccataatgaggactgttcaccaggaaattagaaaccccaggtagaccttaaaagattttcagaccaatcaaatcagaatatctgaggttggagattgggaatcagtactttgaactgctccccaggtgattctgatgtgaaacagaattaagtacctctgctgataaatctccaactgtgttgtctttggcaattcaattttattccatttgatttagttctattcatcaaagatttagtaacactgtgctaataacatagtttagtaaagaagctgagatgtccagatacctgtcaaggatatttattggaacatcaatcacctcgtgtctaaagtgatgatctctgtaaatttttctctcttttaattatatttgtatatgtttaaatgtgctattattaagcctgcattattcatgtacgatttggctaaaaatggttctcttattttctaattgttttgcatagatatatttgatgtttcctaattttataaaccccagcatttggcaaattgtgtacttattagctggaatcttactttggctttgaaatgctgaagaaggtcagttttgagccagcccaagagttgctaaggcctggaagggcaatgcaaaggtagaggaattctaaacatgggtttggactcactacacagctcctgagtttagctgggcttctcctggaaattggatattgtctgtaatggatccactcattaagtcgtctgtggcttgtgatttgtgcctaaaagaaccccacaaaaatctgtgaggggccctttggatctatagctccgaggttagtgctggctggtgctctgtagtgtgagtgagagggagagggcatgtgataaatagaacttcagatgcgtgatgtagtgaaaagaacatgtagtgaggctctagtcccaccaccatcattttctagggtttcgacctcagaggagttttttaacttcattggtcctcaatttccccttgagtttttatccccttcatttgagtttagataagataatgtataggaaactggaaagcactgtacctgtgaagatggtaggtaatgcaagataatccttagggccttaatagcttaggtagccaaaataattgagatgggagatggattaaaaatgagggcaaataatctagcatttttgcattttttccttttaaaatttgaatgctcttatgaatccaaaaaaacatgaaacaatacaaatctcagtgaactctcatgtctaagatagttttccactgattttatttttctcttgaatagtggtgatttaaaaaaaaatcgcaggtatattttttatctattaaaaatatcatagcatcctggtaaactctgtcataattttgttttgctgtatttatttatttactcctcagtaagtagttattggatgcctagtctctgctggacactgttctatgttttatgatgaacaaaccccatgaagttacaagcatttataagcattcattgctttaggttctagggagtataatatgaatttgactgtgtgaaacttgatttagaaaattggtatccacattgggttaataaaatttagtttttaaagtttactgaactgtaatttaaaaataatacagaaatagttattaaatggtgattttcagtggagcaggtgttatgccataaataggaccccaaattttatattttttataatttttaaaaattatagagcaactttagctttacagaaaaactgagaacaaaatgcagagttctcatgaattccttctaccctttgcacaatttctctattattacaaccttgtattagtattatgttttatttgctatcagttactcaatgtgtatttattaaacataacaaaataataaataaatttattatttatgccctatttgttattatgaaaagaatacatcatattgctgcctctcaagctgtttataatgttatgtagctacagtttgaggtttctcatttattagaaaaattttttttctgtgcacttagtgcatgccttattcagtgctagggcttaacacattatctggacatagtagacatttaataaaatatctgctgagtatacagacaaatgaaatgaaggatccagaagtaaaagacgcaattcttgtccttaggaacttaggaaacaacagacacacatagcagtgactggagaaaatttcagaaatacataaaatatgattaaatctctgataaaggagacattggtataggcaaatgaggcataaagccattaacaagagccccatcctctttttcctcctttttgggactgtacttttttttaattttttttatttgtttgagacggagtctcactctgtcacccaggctggagtgcaatggtgcgatcttggctcactgcaccctctgcctcctgggttcaagtgattctcctgcctcagcctcctgagtagctgggattacagacacccgccaccaagcccagcaaatttttgtatttttagtagagttggggtttcaccaggttggccaggctggtctcaaactcctgacctcaggtgatccacctgcctcggcctcccaaagtgttgggattacaggcatgagccactgcgcccggcctgggactgtacttcttatcatcaccattgtctttgttgccatggtcttcattattatcatcataattatggctatcgttctatgtctaaatccaagcattaaagaacaaactcccatatccccatggtaaggttggagaagtgcgtgcaagtgtgtctatgtgtgtttttggcaattttaaagtacagtcacaccaatatatgccacttccatttcttgctggaagtaaaatgagtgactacttgggctttgtaaaagaaaatcgcactttggaagtccttgtgggagccataccaaaatgccttgcagtactgtaacttctcagaggcatgtaaaagttagaggattggtgaagttttcaaaagctactggcacttgtccttcaggatgaaccctcttgagatgcaggggagcaaattgacctcaataagagagtagtgggagctaaattcactcaagaatagcaatctgttcctcagacagatgcagttgtaattttagaatgtgtacataacagacagtttaaaatggacataataacgctaaaatagtatcaatggaaattaaaaataagtcctaatcccaaccaaaattctagcaagttgttttgtggatatcaacgaactgattctttttttttttcttttttctttttctatctttgagacggagtcttgctctgttgcccagactggagtgcagtggcgcaatctcggctcagtgcaacctccacctcccaggtccaagtgattctcctgtctcagcctcctgagtagctgggattacagacatgcaccaccatgactggcctcaaccagctgattctaaagtttatatagacagttaaaagaccagattagctactgcaatattgaatgagaacaaagtcaaaggactgacagtacctgacttcaaggcttactgtaaagctctggtaatcaatacattgtggtactggtgaaaaaataaacaaatagatcaagaaaacagaatagagagcccagatagacccatataatgtagccaactgttctttgacaaaggagcaaaggcaatctgatggagaaaaggtagtattttcaacaaatggtgctggaacaattggacatccacatgcaaaaataatgaatcttaggtataaaccttacatccttcacaaaagcaactcaaagtggatcatagaccaaaatgtaaatgcaaaacaatgaaactcatagaaaataacataggaaaaaatctcagtaatcttggatattgtgatgactttttagttacagcaccaaaggcactatctgtgaaagaaatccctgattagctggacttcattaaaattgtaaacttccactctgtgaaagacaatgtcaagagaatgagaatacaaaccacaggttgagaaaaatacagatggtgctgacttaaaacggttcaacttacgatttttcaactttacgacagtgcaaaagtgatactcattcagtagaaatagtacttcgaattctgaatttcattggacaaaactatggaaacagtaaaaactattcgtagttgccaggaattaggggtgagggagggataaattgaacacagaggatttttagggtagtgaaactgttctgtggttactacaatggtggatgtatgtcattatacctttgtcaaaacccatagaatgtacaacactgagagtgaaccctaagacaaacaatgtactttgggtgaaatgatttttttttttttttgagatgaagtcttgctctgtcgcccaggctggagtgcagtggtgtgatctcggctcactgcaacctctgcctcctgggttcaagcgattttcctgcctcagcctcctgagtagctgggattacaggcgtgtgctatcacgcccaactaatttttgtatttttagtacagacagggtttcaccatgttggccaggctggtttcgaactcctgacctcatgatctgcccccctcagcctcccaacgtgctgggattgcaagtgtgagccaccgcgcccagctgaaaatgatgtgttgatatcacagaccattaggtttattgataggcttattgattgtaataaatgtgccaatgtcgtgagggatgtcaatagtgagggaggttttgtagcagaggacaagggtgtatatgggaacaatctgtactttctgcttaattttgctgtgaacctacaactgctttaaaaagaattaaagtttaatttaaaaaatctgcccaatctccaaattctaatactttgattccatcttggctacttctttcttatttgaaggcagtcattgtaatatagttataatcatgagcatctgtattttaaaatgcttaattttgtttttcagataagtaccctaaacttaaatgatattattttatttattaaagctacctgaggcagaaatgtttcaaaatcttgaaaaagactaattcaataggttaatagcagataagtaggtatttttgtgtcatactcttcaaattataataactatcacttaaagaatagtcatttttgttcgtttgtgatccttccacctcagcccctcgactagctgggactatatgtgcgtactaccacacctggctaactgttgttttttgtagagatgaggtttcactatgttcttcaggcaggtctcaaactcctgggctcaagcaatcctcccaccttggcttctcaaaatgctagtattacaaacatgagccactggacccaccctcattgagctgttttaactacaacttggtatggtagaaagagtgatgggccaagggttaatagggtgagattctaattttaactttgccacctacaagcagtgggactttgtgcaacaatgttttaaatctttctgcatttaaatttttctcatctgtaaagggcaatatacaatttctgtattctccagttcagttatgctaatcgctgtcctgtcagcacccacatccccatattcactttcacagataagacttgagtcgctatgatcttcaccctagttgtcaccctgtccccatactctctgaatatgctcctctctcctctcattttagccaaataccactcttctttgaaggccagcttaagtttcagatcctccatccatcccagatcttcttggaatccctagttcttttggtcagtatcacttagtttagcaaagaccatgtcttaggtgattgctctaactcaccttatagcattaacccataagtgagtacttactgaactctcactgtatattagattaagggcttattttatatgcctggcacagttcttatttgttgttggaaaaatttttagagggcagtaattgaaatgtcatatactatagtctttgaggatggaaaagagctcagtaagtttctattaattggttatgccgttaagatcagcatctaaagagagctaggtcatggaaaaaatggcctaagtactggacttactatcagaagtactggacttaaattttaattcttatgatttgtgaacattgtagaaatatactaatgtctttgtgagtacagataaggaggaacagataagcttatgtgaaaactcggtttgtattgggtctatattatatacagggctattttattttatttatatttatttatttatttttgagacagagtctctccctgtcgcccaggctagagtgcagtggcgggatctcggatcactgcaacctctgcctcctgggttcaagccattctccatcctcctgcctcagcctccgaagtagctgggattacaggcacccacaccacgcccagctaatttttgtatttttagtagagacagggtttcaccatgttggccaggctggtcttgaactcctgacctcaggtgatccacccgccatggcttcccaaagtgttgggattacaggcgtaagccaccatgcctggcctattttatttatttatctatctatctattttttgaggtggaatttcgctcttgtttcccaggctggagtgcaatggcgccatcctggctcaccacaacctccacctcccaggttcaagcgattgtcctgcctcagcctcccgagtagctgggattacaggcatgcgtcaccatgcccggctaattttctgtgttttttttttttttttctttcagtagagatggggttttttcatgttgattaggctggtcttgaattctcgacctcaggtgatctacccgcctcagcctcccaaaatgctgggattacaggcgtgagccaccgtgcctggcctgttttattttattttaacaacaaatagaaggtggttattccaggagggtttcagaatactaccccagatttggtttctcctggtttgactacaggcagtgctggtgtctttctcttgatcatactcctttcctcatgggtgtgttcagtcctctgatgatagaagtgcttacctttatttaacctttccctctctcactgagtgttctctctttcctgaaatacttttcatttgttaaagcttttaagaaattcttatttgaacattcagtgttatgtaaaaaacaaattaactgctgcttaatatcatgtttggaggtgaaaaattttctaagccttttgcttagccatttattaccaaaggggtatcaagcttggatgtcaagctaggatgtaaattctagacctatacaattccttcaagggcggctgaaaagttgctttctaatccttttgctatattttggtggcaagctttgttttcacagtttaaagaggattgatggttttcctattgtctttccttcacaactttctgaagttcacttgcctgtttcattttcatgacttaaggtaccagcttcttctgcccctctcctagatccaccagcgccccccatgctccagaaaaattgagctacactgtgcctttccctgagctgtagaaagttccacctctaggtttccaggtgcttctgatcatcatttttcaatggattgagttgccaacatctacaaaatatattctaacaaagatgctcagaatgtctggtgttgacctatctatacaggtaaacttcaatgactctgcatttccctttcactgctgacctcatgccttttgcagaagtaatataggaaagaagagcattgaaatagggcagaagatctaattttctttttctttcttgagatggagtctcgctctgtcacccaggctggagtgcagaggctcggtcttggctcactgtaactccgcctccccggctcaggtgattctcctgcctcagccttccgagtagctgggattacaggcacccaccaccatgcccagctaatttttgtatttttagtagagacgaagctttgccctgttggccagtctggtctcgaactcctgacctcaggtgatccacctgcctcggcctcccaaagtgctgggattacaggtgtgagccactgcacccggccagaagatctaattttctaacttacaatgtactcgaatattgaaaggaatttcatatttttagaactaagccctcattggggttgggtacggttagggcaaggagaagcctgggaaggagttcttgggtagttaaattggaaaaagagagtctggcacattcagaatggctccatatttgttacccgcagactgtacataagaaatgagacctggctattaagagatatgatgcctgtgaaaaccctggatacacttgcaacttgctttttcccaagtgtttaggactctagtagggacacctccagttccttttggaaataagctaatatttggtttccaaaaatgtattgaagtagtcttaatgagacaaatagaaaatagaaatttgattgaatgttcttacattcttaaaaatgctactttttagcatttttaaaaataatgaagtacatgttggggtgggagtggagaagagactgtaatatttctgtatctgaagcctccataaggtcttaatccagccctccataggaacataagccataattgtcatctacaacttgttcctaaatttactcagctacagtttctcagagctattgagggaagtactacgatgctatttaaaaatactttcaaatccatccttatgatgatgaagttattatagttacaaatgcatgattcagcaataggcattaggaaaacatatccaccagacagcctgatgatcatggtgtatgacactttcttctgaatacatgagggttagatgaaagtggtgacaaacgattgagatatctagatccacattatttaccttttttttttttttgagacagagtctcgctctgttgcccaggctggattgcaatgacacacttggcttattgcaacctctgcctcctgggttcaagtgattctcctgcctcagcctcctgaatagctgggattacaggcatgcactaccacacctggctaattttgtatttttagcagacagggggtttcactctgttggccaggctggtctcgaactcctgacctcaggttatctgcccacctcagcctcccaaagtgctgggattacaggcatgagtcaccacgcccagccaaccacacttcttaaggctagataaatacatagctttaagtgtagagtaaatggtgtctcacttgcaaagaagaggatctcttggtcctctcctttccccaaccccaaataatggctttgctattggcaatgtaaggtgggtcggaaagtttgtgaagcaatggccaagggccttatggaacaggcatactgcaggggtggcgtggtcataagttgctgatgaagcagattctctgtcactcatgcctggtgaacaggcggggactcccttcttcaagagagacaggtgatgatagaagagtagacagccctgaacaaacctttcctcaggattgtcccttttggtattactcagacctgaataatacatggacatgttttatagggaattttttttcagctttttgggtgatctattattaggatcttattaaaatatgtataattttaaaactaggtatacacttcttatgcttatagttcttatgcaactatagagccaaaacaaattaataaatgaaatcaactatatctgagcagacctcaggatttgagagagagagagaaaaagaaatcaaatataactatgaaacccaataaaatttaaattattttaatgtgatagataatgtggttttgttgaaactaatcactagtgtggaacttaaagatagacacagtagaaccatgtatcctcagggtctggtctatgtttaaatctgttatttaaatgtattaatttcatgcaaagcatgcctgttagtgtaagtatgttgaacaaattgttattaatagctttgagggttcataagttcaggaaaataagatcttaacccaaactctgtagtaagcaatcatcgaatgtcagtttctatgaggtgtcatttgataattttttaaattgtttactcacttgaagatagggttagcattgtgttgatattaaaattggtactaaatggatatctaatccatttactaacagaatcagggacagaaccattcttctttgtgtgtttatgcctcaagtttctgcttataagctggtatgtgttagtatgtaaaaagccaaagtccccatagcacatctgctcacagcgtgaagatggcatcgaatcctatggctgagtagattgaactgcctcatgccatgcaacgactcagttttcccaacatttcctctatgtccagattgatccttgacttcatctggctttcactgggcatttgtgcaattgtaaacaccaatgaaaagccaggcagtgaaattgcatgatggttactgcttgtattaaaatgttaaattataatcgaagacagaaaattttttaaatcctagaactcttgtggactgcaagatatttatcctttgagacaaactgctttaaaattaaatttgggctccacggttctcaggaaaacttttctcatttgtggtctttcctttaagttccattaataattaaaaatgacaattgtgaggacttctgagtaatgagtgtttattatgctctaaaatttaagataagcactttacatatgtaatctcatgaaaaccttgtaattggtgtgaggtgagtgctttggctattttacatgtgaggacacatgacaccaagaaaaggtcaatcacatgacaagtaagtggcagcagcggaatttgaacctatatctttctcattgcaacgcccaagccttacacactaaagcctcttcttatgtctccatttcacattgtgaaaacctgtttaactgcaactaggaaccagtgctctacaattatcctcttacattcctgtcttttccattgggccagtgggtctcaatctttaatatgcatcagaatcacctggagtgctttttgaaaaatgcaggtcccagatgccactccgaatttactgaataagaaattgtctgtgcaaatgtccagggggcctgaatcttttaaaacaacctccctcaggtgattctgttgcaggtgtctgtctgatcacattttgtgtaaaactgcattagactgtggatgcctcaagaaccatgacttttgaaaaaatccatccttgtacctcaaggactcactcactaaatgcttgtcaaataagtaaaagaatgaatgaaggggcaattgtcaagaaagatgtgttcttgggaagaatacgcttttggccagacccttggaaaatttagagatgcatgtttaaatatcacttaatatactcggtctagactctccttcctggaggccaagcatggcaaagagccgatgagagggtggtagaaagtacaaatctatctataaaaaaaagaatgaaaatgctcctgaccatccaggatgagatagaataaatcttcccctgcgtttctaaaactaaagtcaattgaactagaaatatttaaatgcacttgaggcccagaaagagattcatttccttaatgttttgtggacttgacgttttctacttaaatcatagctctaaggtcaatatggatttgttaccggcaaggggtcccaatctacaccccaagagagggttcttagacctcacgtgagaaagagttctgggcaagtctataaagtgaaagcaagtttattagagaaggaaagaaacaaaagaatggctactccataggcagagcagtggcatgagctgctcaattgggtatacttgtagttatttcttgattatatgctaaataaggagtggataattcgtgagttttctggaaaaggggcagggatttcctttggaactgaggatccctaccctttttagactatatgaggtaacttccagatgttgccatggcatttgtaaactgttatagcgctggtgggaatgtcttttagcatgttaatgcattataattagcgtctaatgagcagtgaggatgaccacaggtcactttcatcaccatcttggttttggtgggatttggtaggtttctttactgcatcctgctttatcagcagggtctttgtgacctgtatgtgtcttgtgccaacgtcctgtctcatcctgggactaagaatgccttaacctcctgggaatgccacccagcaggtctcagtctcattttacccagtccctattcaagatggagttgctctggttcaaatgcctctgacagattcattcctgtatttagcaagaggttttttccttttttttttttttgagtacttactaagagtcttgtatttaataagacatagtcctttccctttctgagtttattttcagttagaaaattccgggagcagtaaaagagcaatgcaagtaaatggggggctagttgctcagaatctgcaaatgtaagagtgcatggaagggtttgtatagccaggggactggtgctggatgctgcaaattgaataagaattggaataaattggatagccaggtagcaaagagcagtggaacagacacttggcagtcagattgcttatggctggctggttcagttaacagtgaggacaggagcctagggtggtgggatatttgccttggggagcatggggaaataacattgcatagatgggttttctgacattaaatagagctttggatgttgtggaattttgaacatttcctttatctgaaagccggtgaagtgttgtcttaagatgtgacagcagtatgtaagcaaattgcaggggataagaaatcaagtcagggagacccattagagggctgcattctcagaacaaggagcactgaggaaaaaattaaaaaacaaacaaacaaaaacaaaaaaagaaggttgctttcggtagtccagatgtgaagggacagggtttagaccagggtggtggagtgcagaaagaaaagccagagggatgtggaaggacaagatggcatgaccacgaatggtggcaaaggcagcgtggaacaagcacatcagctgatgtggaatgtatgagaacaaaaacactcattttcccaccagaacccttagtaggagaaagtgccttaagcttacagtgaggattccaaattgaaattgctcagtagctgtttcaccctttgttactggcagagcagatggctctggaagagactaggactacttgttgcttctctttcccatctctcaccactccccaaccttatcccatagtgaggaccactcactagtgacatttctgcttgagacctacaaagcaagtcttgctaatgagacttaggcactttttcccaaagtgcaattcttggaaatctgtgggttttaagtagattacagggccacagttccgtggtcaaattagttcaaaaaatattgttagagaattaagcaagtttctttactgcaggatgtcccacagtctttaatatggtaatcaacattttgactatccaagagagggcgagcttagagcactccacaaactttttggatcatggagctctttttaaaagaagcaccttgagagaagaggatggcacagcatatatttaaagaaattagggactagaaagtttgtctcttgcactagaggttggtagtgtcatgcaaagaaacaagagttgggatttgggtccaggctttgccactaactggtgatcttgggtaagtcattgaatgtctctgagcctcagtttccccaggggttatgttcattctaaatgaactcttcagctcctttcaaaagtctgtcttcatattcaaaaaggaaaataatctgcaatttctctactctgcaataactctggtggtggaggcagtggtaggaaaagagagagtagagcggacagtgacaagaagatgaataagatacggtctgaacccctgcactgattagactgttgggcacaattacagtgctgggctgatgtaacaaagataaatgaagtttgtagtgtgttctcaagcttctctgactccaaccacatcatgtgatatacagcaactagttcagttgctaagcaacactaattcccaatggtcacttaatccatctagtctcagttctgctactaagaagctgtgaggccttggataaatcagttaaccctttgggtttgggttttcttcatccgtaaaataaggaagttgggttaggtctggaaccatttttaagttgacctgagtcttacctggaagaaggtaaaggaaacacagctattctcctctcacccaccccatgcagatgagccccaacattctgtcttcgcttttcttctcttccttcctcctggatcacttaatctgtctcagactttaattattgcatttatgtagttgaagttcaaatgtggatctctaagaccaacccttctcttgaatgccaaaatcaagatgtgtctacctgttttcattctaaggaaaccaaattacttatgtttcaaaccaaactcacaatctccccttacaaaccaattcctcctccacgttaaaaaaaaaataataataataacaggccaggtgtggtggctcacgcctgtaatcccaacattttgggaggccaaggaaggcagatcacttgaggtcaggagttcgagaacagcctggccaacatggtgaaagcccatctctactaaaagtacaaaaattagcagggtagggtggtgcgcacctgtaatctcagctactcaggaggctgaggcaggagaatcgcttgaacctgggaggcagaggttgcagtgaactaagactgcaccactgccctccagcctgggcaacagagtgagactccatctcaaaaataaatacataaataaataaataactatgtgctcctggtcacatgcagcccagactcccaggcttttcgactccctccttcttccctcctgtgctagtcattggtcaattctcaatcctctccacattattattattattttttgagacagagtcttgctctgttaccctggctgtagtgcagtggctcgatctcagctcactgcagcctaagccttccaggttcaagtaattctcatgtctcagcctcccaagtagctgagattacagtggatgtgtgccaccatgcccagctaatttttgtatttttagtagagacatgttttcatcatgttggccaaggtggtcttgaactcctggcctcaagtgatccacctgccttggcctcccaaagtgctgggattacaggcatgaaccaccgcacccagcccctctccacattattatatgtccacattatttatttccctttcctgatgtcattattgtacatcaggctttcattggtcatcctgccccaggtctctcctccaaagcaacccacatgccaggttcagcctcacagagcttctctgagcctgccatcccactctccaaagcctttcccggctctcttgtgctcactccttgctggcatttggagccctgcgttttcccacctcaatcatcttccagcttccagctttgtcttcgattacctgtgtgttcctgtcctcccaccaactatttattaatcttcttatcccataacttgcccattcaaattgttcccttttcttagacttttgtctgcattctttctatctgacaaaatcctagtgatatttcaagagtcagctcaaataatggctcctcactccaacaaatctttagggaacactcaactggcttgatttctccttcttttagcaccttgttctttcctttcttactaccttaccaacccagacatatatatctactatatcttgtaatatccattatatcttttttgaggccaaggaacatgtttccttcatctttctatcaactatagtacatattacatactaggaactcagaaacgtggttgaacaaattactattaaattattaagctattaaaacaataatctattgaaataatgtaataatcttaatctcctaacaaaatactaataaaatttaagtaaaataaataatctacaataatccaaaaatgagtcgaatcttggtttactctttggtgttttgtcattctactttcgtgtcaagcttagaaataattttctgaagaattttgattttgattttagttataactttgcgttagtaagaccatcagcctacggttaaggatatttgtctcacctgtgaaatctcactatctccatgaaaccgactggcttcgctacatcatgggaagggtgttatctttcctagttggagcatcatatgatgatgtggttgaaaacatgcactttggcataagacagacttggtttggaattctgactctgcccttgttggggctgcttggggaatttagttagcatctctaaatattagtttgctcatttgtaaatggaggatgtaattgcaggtgctggttctactcttggaaggattcaaaaattgtcatgcttacccgaggggctcctccaaacctgggcggggttttctgtatgccttatggacctacaaatgcaaaccacactgaccatgtaattttgggggcagattggaaagctgaaacagaagtgcagggactgttggtgcccatcttcctggcctggtggggaggaatgtaggaaagcagactcgtgcttctcatcttgaatcagacagacgacagacactccaggaaattccttttgtttggaaaagaaaaatgctctgccatcttctcttaccccagttttctacattcccagacttcctaaaagagtagaccactggggttccctgaaaagccagctaagtccagcacatacgatcagccccacagctcattttggttcacagacaataaggagagaggacttaacaattactgagtgctgagtacccactatgtggtaggaacattttgtacataattacaattatgcatcctcataactttatcacataagtatcatctctattttacaagtagacactaagcaacctcccaagattgtacagctagtaaatctgagtgaggaagtgaactcagatggtctacaaaacttttagcatttgtggccaggcatggtggcttacacctctaatcccagcactttgggaggctgaggtgggaggattgcttgaactcaggagttagagatcagcctgggctacaatggcaaaaccttgtctgtacaaaaaatacaaaagttagctgggcgtggtggcacacacctgcagtcccagctacttgggaggctgaggtaggaggatcacttgaaccaagaggtggaggttgcagtgagccatgatcacgccactgcactccagcctgtgtgacagaacaaggccctgtcttaaaaaacaaacaagcaaacaaacaaacaaagaaacttttagcatttgagaccttcagtgtgatcaaagcaaattagctttgtgaggtggggtttcctttagcttctacgtcagcaaaattgtgaaccaacaggattaaccttttgccgtcttagtactgcagggaactagctttcagaaaattgtttgggggccgggcatggtggcttgtgcctgtaatcccagcactttgggaggccaaggtgagtggattgcctgaggtcaggagtttgagaccagcctgggcaacatgtcgaaaccctgtctctactaaaaatataaaaactagccaggcatggtggcgagtgcctgtaatcccaggtacttaggaagctgaggcatgagaatcgcttgaacccgagaggcggaggttgcagtggctgagatcatggatcgtgccactgcactccagcctggatgatagaatgagactctgtctcaaaaaaaaaaaaatactgtttggggacatttgggtcctattttcttccctgatgctgatgtgatgctgatgatagtgagtgtttcaagaaccaggagaggctggttgttgtaaacattcctataaacgttggctcagagattgttaatgtaagtttttctggagcagtgaggtaagccccaagtagaaaagggcagaagtatagtaaaatttggttgttttgtcaactttgtaagacttcagctgcataccttgttaggaaactagaagccggaggaaagttgtgctgagatgtgtagcatttgttcttgctttgtgtggccattttattcccattaagtactgtatccttcactaaagaaatgggccattcagcagcccgcctgaacactgtggcactgtatattgttatagagagttatatccattcagagggacacaacagatcagaggaaaggaaagaggtaaccatgtatgcagacgtggaactgtccccaacatgtataatagacaagccaaggtgaaatgtatagcatactaatattcaactttttaaatttaaaaaactatgcatctcaaggcatggtggctcacatctataatcccagcactttgtgaggccgaggtgggaggatcgcttgattgcctgaagccaggagttggagaccagcttgggcaacatagcaagacctggtctctacaaaaaatacaaaaattagctgggcatggtggtgtgtgcctgtagtcctagctacttaaaaggccgaggcaaaaggatcacttgagcctgggggttcaaggctgtagtgagctatgatcactccactgcactccagcctgggcaacaaagcaacaccctgtctaaagaatacaacagcaaacaaacaaacaaaaaaccaaaaaccctcaaacactataaatccatagtttttatatatgtgtaaactatttctagaaaattactcaagtaactgataattagttatatctgaaggagggtgatggtgcggtggaaatgagactcacttttcatcgtgtggagcagtgattcccagtgtgttctgggattctggggagtccttgagaccctttcaggagatccatagatcaaaattattttaataataatactaagttgtttttattctcattctctcacgagtgtacggtggagttttccagaggctcagtgacatgtgccattgcagcacattgaatccagaagcagatacgataatccaactgtgtctggtcaagccaaatatttaagagattttaaaaaatgtaaaatgatgtcattcttctcatgttgaagataaagttatttttataacaattttgaagataaagttatttttataacaattattattcaacaaaattactattatttaatgagttaatacacaataaatttcaaattctcagttttaatttcttaactgggcaagtatcagtttaggtataaacaacatccctccgagatcctctgggatacatccaattcctttagtgcctggtgtgcttggaaggtttctgttgcacggcgctggacaggagtgccaaagaggaaagaaatgtgaatggaaccaaagtctataataaaatattgctttctctttttcccagcctccatcaagggagacctgcaagttgcctggggttcagtgctctagaaagttccaaggtttgtggcttgaattattctaaagaagctgaaataattgaagagaagcagaggccagctgtttttgaggatcctgctccacagagaatgctctgcacccgttgatgtaagtaggtccagtcactgaggctctgttaccacatgagattgggagtggtgtggctcacattgaatccccccacttatcctgcctggtgtcacagggaaagttgaacacttggtttctgtgcctagagctgctatcagatgagaagacaatgtatttgactatataggaaatctgttgtggactgtcaattaactcattttcacttccgttgatttggttgtgaccagccctagattagagggcagttttagagtgtcctggcctagaatgtcttcctcagttttgagtaagccagggtacctggcctctttctgggacttctctgcccttacaggacccactggaatctgtagggttccagcgtcaatctgtgttttctaatattacaatttgtttttattttttatttttaacaattattttataagttgttttcttctgggaataatttgaggtgatttagagtaaaacaatacttaatagaagcactacaaccaggataatagtacaagagtcctgtaattatattttgggggaattaaatgtaagaaaacctagcccagggatactgattgcagattcatacagcgcttagctgggactcaaggcaaaaagagaagcatgctatattgcagaacttttattaggaaaccatttccacatatcaaggtggtctgctgcaggtgaattttggtctgaatgggacttctcagttcatcctttggcaggctaaaatcccactgaggatctagaactgtagcaatttctagattgtgtctgagaccttcccagcctggagctccatatctccttcatgcctgtgcctctagcatctagcacagggtctgacacatggaggatgctcagcgagagccctcagattcaacttaggctttactgtattctgcacagcttctggaatgagtgctgaatgaatgaatgagtgagtaaataatgtgaatgattattgggataagggtggggctaaagtggtattttcttacattccccagaagatttcttctccctgtcaagatgctttttggattatctcttcctttctgtttattatctagggaatgcctcgctgctctttagcttcctggtggtaataattcacttcatagtttaatgtcttaggtttccttcttcccacagattgccttcaaatttgccttttcttcctccctccctttcttccttcctccctcctttccttcctcttttccttccttatgatagactcttggtatgggggagttaagaggtcttaacttgagccttcacagtgtatattttagaatgaataattcattgctatgcttcaccaccaaccagaaattattacagggtttctctattacatgagatttttcaaacattatttatctatgatttgttccgctttacctttcagaaactatcactgtggtcttttcttcccctgccactggagttttttttttttttttattttttttgttaacagggttttgctctgtcacccaggctggagagtagcagtgtaatcttgtgcaatcttggctcactgcaacctctgcctccaggctcaaattatcctcccacctcagcctcccaagtagctggaaatacaggcacacgccaccactttgtattttttgtggagatgagggtctcactatgttgtccaggctggtcttgaactcctgagctcaagcaatcctaccaccgtgccctcctaaagtgctgggattacaggcgtgagccaccatgcctgggcaccaatcttaaacaatgatttccataaattactattagaatattcaaggcatatgctatatatagccttgtcctgtgaagcctgattttggtgcactcctccacccccactgtcatattatccctggaactatctcaaacaccttggctcctccaggaagagtccttctggtcaccaattcaggctcattctctttctgggaacgatcagactgagtttttcaatctgtttagagatttactaagttttagtttcttgtgtttcttattaatagggagaccaaataattcagcatccaatctggagaactaatgaggacaggagaagttattaataggtaatctggaacataaggcatactctggatgggtagccacctgcttttcaaagatcttgcctctttaatgggtactgagagcagaagggtaacaacagcctttggagattgaactcctgaattctgttcagttgtctggggctagggaactctgacacagatattgtagcactgagtatttctaacaagctgtggggggcctgtcccctagtggatgttagagttcccagagggagaagtcaagaccactgcagcaccgacggccccgtgcttatgagatccagtggtggtacccctagtcagtcttcctccaccctctccttcctcttttcccttctcctccccttcttcccttcccctccccactccccagtctgctcccttctctttttgatccttattctctccctctcccttccaacgcccccacctcggctccctcttgttttgttttctctttccatcgccttctctttctccattttcttctctccctttgccattcacagtgtcttcctttccttttctcttctaaaatggctcttccaaaatcactggagggcagctcaaaagagcaactctgccaatattaatttctccttgaaagggaaaagcctgcatttccaattatgacttagtcttcattagttagaaactgtcttttttccacagcaagtggcctaggaatggtgtgtttctcgcaagtctctggtcggaggtcctggttttatgtattctgctgtgcacgctttctagggcatgaagacagggcaggctgggccattggaggtgggggtggcagtgaggatggcggtctggctgtgacaggaacacacctggaaatgtctgcttgtcacagaatggattgcagctgaagtaaacaaaactctgtgatcatgttgctgcataaacctcgatgtctgaaatttgggacgatggctgtgccaggattattttagaaaggcaagctcaggatcagtgttcaactaaccagagaatctacagctgctgtggatgtccctccaccagagagagagagagcctagcagaaactgaggagagaagctcttcaggccgctcaatggctcacgtctgtagtcccagcactttgggaggccgaggaggaaggatcacttgagccaggttggagagcagcttgggcaacgtggcaagaccttgtctgtacaaaaaaaaaaaaaaaaaatgccaggtatgatggggcctgcctgtcgttccagctactggggaggctgaggctgaagaatggtttgagcctgggaggttgaggcatggtaagccctgttcacatcattgcactccagcctgggtgacagaatgagaccctgtctcaaaaaataaataaataaataaataaaagttcttcaaagaggaatggaggggaggaaccaagggctgacatggacaattctaggtaaacagggctccagaaacattctgaaaagcataagctgagagcagacttcagtaacatgaagaaagaactggggaggaggggagcggtctagagaataacatgctcttatttgttcatgggattcataaactgtggacaatatttttatttaccaaaaaggtaacaaagtttattgagcacctgtgatgtgtaagggactctggaagtattttgaagggatacaaatataaataagagataactccagccttggtttctcatgggctaataggaaaggaaaggaatgaaaaagagaattacactcaagggaggtaagcatgagtcaggacctgacaaatggttgaaggaaggaaaggacacttgtagctgggatgttcaaggaacacatgctttgaatatggagggtgtggagcttgacctaagccttgggggctaggaaggaatttgatatgcagaaggaaagatgtgggtcattatccttggagctgacctaggcagtgaggacccagagtgatctggcgaacacagactgtgctgggcatgtggagtggaggggaggtaggaaacggctgtctacttggggcagaggattgggttgaggagtggtggaagataatactggaaaagaggacacttgccagaatgtggaaagccctgactgttggctgggctaagacatctggacagtctggacaccattttagggattcagcacgtgcgttttacgtgctctagcagggaaggatgactttactgttagagatgctcatttctgatgtccctctcgctgagtgtgagtgcagtcctgaataagattaaaggtgtcataactataaaccatttggaaaatgtaaaaatatatatgcatgagacacttggagcaaggattttctaaggtctcaatttcttgtttttgctttgattgttatagcttataagagtagatttaagggttagccacaaactctattactgtcagagcagatttgggctgctaggtagaatcttattttcactgtttcaattctcatttctttgtaattttttgtattatactacatattttagccccaaattgtgggctgcaggaacaacgttaagtatttcttgctggctgtgttcactgaattgcttcctgagcctgaacttgctcaaacttcctgttttttgggcacagaactcctggtttctccatttatgatggatgagaggggtttggagtctctcttctagactttcatagcatgtttcaggatttctcactgatatctaattgtcttataagagacattaaatttttttcacactcaaaaatccatgatcccctctaggtaaggtctgagtctctgtcaaacattttcgcttttgtgtaacatttagcacagtatttatcaggcattattttgtttgggggtagaggaggtaggcggcggtgggcagttgggaccccccgtacttatgttctgctccaatattgtcttgtagaaaatggtctaaaatagatctttactatctgaaatatcatctagtgagagcattggcatcatcaaagagcttgttaaaaatgcaggatctaggacctcagactaaatcagaatctgtaatttgattggcctttgagacttgctggtctccagatgtaatgtatacacatcacctagggatcatgttaaatgcaggttctgacactcaattacttaggtaatgatcaaacaaccagatcttgaagttttctaacatcaaagcagcaacttcctttctagagttgtcaccggacaccttccctcctgagagtgacacttctgcacagaacagatggtttatgacaggagttggaaaactgtggcctgctggtggcatccagcctgccacctctttttgcaaagaaagttttattagatcacagtgacgctcatgtatttacatattgtctgtggcttcttttgtgctgtactgactgagttgaatagttgtaaaggagactgcatgacacacaaagccaaaagtatttactatctgggactttatagaaaacagtttgctgaccctggcttatgtgagtgactctaaatatttccttaaagaatcaaatagctatactctcttgccccagtggcaaacttcgcaagcccatctgaatccatggctattcatagagaagctgaaccataaaccgtcattcccaggcaacccacaaagggtcttgagcctaaaattggtctggataatggtaccacagagcctgtgactttccaaaatccatttaatatgtccctcctcaaagaaatggttataattttatataattttattgagctgactccctcctccacaaattgatttcattaattgttcaacataagtctgactttccccaagaattggaatcaaaaggaaattctgagtaaaaatatatctgggaccaaggaaataaaaagacttgtacaagttggttataatacacattttactcctaaaaaggtagcgttggttttggccccactctggcctattcactgggcagactgtatgggcttggagtccttcttttaattcccttggagaatcccaccacctgtctcttatttgggtttttgaattgtgaaatgatggcacacacaagctccaagaatagctgcgtgtgtacaccaagcatacagagacagaaggcagagacttaggccaaggatcaggaaatacagaagagaagctggcatggaggcatctgctccacaaacacagtgaagccggaggttgtaggaggagggaggtgggacccgtgtaatcactggaggatgtgggcactctgctctgctctgcaagtcttggagatcttggttttctttccagaaccaaatttcagaggaggtgggtgtaggagaattgagattctttttcctcatccagagttatctggggccaaagaggtttagggtgagattctgtgggaatctttgctgtagctccagaagctttattcttacttagttccttttccctttgtctgcatagtccaggacactaaaagggtttgtgaagagtccgggtagacataagtggagagtcttctccttaattctagagtctatcttgacttcaaccaattaaagattgtaggagtgaattagagccccttatgttaaaccttgtttcttggaagccctcctggaattccctaagatgcagagctgattagcttagctggtcagaatgtgaaggttttaaagccaaagttattatttgggctgatattttagacattctcttcattggaagaagtacaatgtattcattcattcattcattcactcattcattcattcactcagtgaatatccattgaaaacctattgtgtaacaggatgcaggaaaaacctgaactggagagtcagacacatctgagttcaaattctagtttcttgatctgtgagctaactaacacctcattcagctttccatccaggtgacataaccaccccagcttccttccctgaatctgcaggttaggttggacatttacttctctgcttttgcagcaacttctacaccgtctgttctcataccacattatatggaaattatccatttgcagtctgtctctctctccagattgtaaagtcattgatagaaaagagcttcatttcacatacttttttacccttagtgcctgacatatattagaaattagacatatgtttattgcactgaaaagaacctaattgtgtggcttaatttccctaaagcatgtgtttctcatctgtaaaatgaaggtgataaaaacatgccttgtgagttttttgtgaagatcaaatcagataatgtttgaatgagtgttttataaatatgaagtgcttgcaaatactaatagttgttctaatatctggattgattgcgattcagtagaaaacaagcagaagagaatcaagaaagtatgtggaggtgtcctagtccactttttctaaactgaataactgaacgagggggatctggagacttcagcttctgaggcacagtttgggtgtgtggggttgacacgggacagaggaccctttccagcaagctcgatgtctctgccattagattatatactcataacagtggggatatgttttattaatttcattgcccctttattcaccctaagcataactaagaaagtgaatatgtaataattggatttcaatgggcattgcaaggccaaagtctcctgccccccaaatctcccagtatccctggcctgtatgtatcttttcttgagaacctgaataatggaaccattagattgaaaacatagattggggagaagagagtgagttgaatttgaaaaatgttgagtgtgacatctggcagtcaaatatgcagggctgactcatttcacttttcatgtgtctgttttagctcacaaactagacatagagctcattgtacagattccatagtgcttaatgcactggctaccccttaaaaaacctatagagcttgctggagggggtcccctatctcatgtcaactcaataaataaatatgtatggatttgttgcaaaatattggattttcttttccatgtaagtaacaaagaactgctgcagatatttgagcagagttgtaaaatgatatgaattttgctgtgagaaaacttgatcttgctgtaatgtatgaaaaagactagaagggaaagaagttgagggtggagagtcttgttaggagggccaggataagagcaggtgggcggtgaaggaggctgcggcagaaccatgccaagcagaatggagtggaggggacttgactacacaagaggctggtgactcagctttctgcctagtattagtcctagagaagtctccctgctctgggaagaccggtgtctagcctcatgtggcttcggaacaaaagccagtgattgcatccaagggaagataatgagaaacacacaggccgtgaaaatcaggaaagcaccactaatctttttgttgcaaaactttacttttcaaagtcctggggaagggtgcagaagcctcagcacgtggacttgagccctgtactcggaaatgcaaaatggaaaccccctaatagatcacagaactgaaaatatccaagagtctgagaggctgggggaggacaggagtgagaaaaggaagggggctggagtactgatcagaagataggagaaagcaacagtgcaaaatgcggggaagggctgagtagacattcaatttaatctggacttttattttgctacaaactaattttatgaagactttttttgcccaaatattaaatatttattaattaaagatattaaaacaggaaaaactgctttcattcaataaaaactctagtaattcttcctaactccagaattgtatgtatatgttttacctattaaataatcagaaatagaaacaaattagacaagatacgtgaataaccttaaaaattttccataatatttgacttaggaactttagttttatgaatgtactctaaggaataccctgaaaaggacaaaatctatacacaaagattatacacaaatttattatagaattatgtactaaaaaaccctaaatgaccagccttgagtatatggttaaatatataagttataagcctttgggttttgagagttttagataacacaagaaggtatttatgatattatattaaatcaagataaaagtcacaatgtaatataaagatatacaatcaatgatgtaaaagtacatagaagaaaactctaatgaaaatatgccaaattgttaactatgatgacttttaggttacggaattatgggaccatttttgtttccttatgcaattgaaaagtcataaatgagcatgcatcactttttcatcagaaaaataaatgagttacatatttttttaaagggaagatattgtaaaggaatatttgttgacagaatgcattaaaaaacctaggtaatttccttatttccctgggattctgagaatttttttactcttgggaatatctttccttgctcttagttattttcatatgttagtcttgttcctggggataaaaaatggtaagtttgctatttgagctctgctcgaacatatggagtagttctctcttacatatacagaattggtttgacattcaaggtctttcagagtcaaatcccaattgatcttcccaatttcacttcccttagtttcctacgtatattttctacacaaatcaaaaaccttttcagacttcctatttcttgtacatgtccataacctcccctttctgaaactctacttgttcctggggacagaatgttcacagagcatgcgttaaacatcataaagtggatcgggagcctcttttaacataaggctgtgtgattttgacaaggcagttagctcaccctctagatctcagatggaacacctgtaaaacaagggactatgttgtagatggttgccaacattccttgcagtgctacagctgagtgaaccttgttccctcatggccctaggtgtgctcattcatctgcctgcaccttgtctcaggttcccactgcatcttaagtggcccctgcccaccccactgtcaaatttgacccttcctagctcatgtaccatttcctttataatgccgtcctcagtgattctgattaacagggacttgcatgtatgattttttttttttttttgccactcatacaggctgccttttatcaaaactatggcacatgtcaatgatataacagataatatcatttgaataaaaagtcaactccatggggaggaaaaaaacctacttaagtgagctttagagataaaggtgaacacttctctaaatcctttgtttatggtctgttaatcaataaagtccaatctgtgatccccagatacataagaggagaaggatatgtagactatttatgatatttctgaaaatcctaagaaaaatcacacacaggcccacagtaagtctatgtttctttattttgagtcagaggatttcttttttccatttttaaccagtataaattggtttaaacttcatctcttgaataactcctaacatgaccagagcccttttcttccttcaaatttccacaaatgcattgctccccttttttcttttcaccacccatatgtccatgttggacaaaaaccatgaaggaaggaggttgagaaactgtgtaccaaaacgccaagagcatctttgccatgttccagcacaaagggcactgttagaaggaggtgatcagagtcatcttctgactcaacctcacaagaggagtcaggttagatgaacagttcccaactatttactctcctctctctctcattctctctctcgcattctttttccttctgttttttattagcagcacaaaagattttgaagtgcttaagggcagaaagcttgccttgttcatctatgcagctcttgctgggaccaagtatggtgctaaacacacggtagacattcagtaagtatttgtggaatgaatgaatgagcaaatgaaggacaggtgtggcttcgatggcaatgggtcagtgtgaactccggaaagagtatgcagagttatagtcaaagtggatgatggatcattgctctgacttactagttatgtaatcttgagtaaacccctttatcactgtgggattaatttccccagctgttgaaaaaatgtgtgtgggggaaagggggagggttagtgattaaaaatgtgttccataaggagcatgtatgtaaaatcatctggcacatggttgcagctgaatagctggcatttatgtagcactttattttttctgcattttttaaaaattaaaaacctgaaaattgttaagttgtactaacctcaaatctcaccacttaagaattatataaaataagaagtaaaatttctcttcccagccaacttttctaattccccagagataactacttttcttaacatttaagtttgatgtttatccttcttgacatttttctaaagtttcatatatatatattttttataattatttaatatatatgtaaactcatgaatatatatatgcaaactcataaatatatatatatatatctccatgcaactttggatggagatatatatacacacatatcattttcaaaatggaactattcatatatgtctatctatctatctatctatcaatcatctatctatctccaagtcaattatttttgaatgatggcagaatcatttgttgtttgaatataccatattttgctgccagtcacccagttccagtgttttgtgattacaaacaataatgcaagggtcttccttgtacatctatatctgtaagcttttgtacagtacttactttagtaataaggcacttgaacacttattattctctttactcataaccaccacaagaagaaaggacagaaattgttattctgtgttacagatgaagaaaaaggagagctaaagggggcaactggcttggccagagacccacacagatagactatggcagaccccgtgtttcccagtggcttgaatttttgtccagagctctttttgtcacactgcaataaagcacaagtcaacaggaaacctttacaaccaggcagagaagcttggatcagggagcaggcagtcacactaaattgtagaaaagaacaaacacacacacacaaacaagaagctcgaggccaaacacatttaaaggatattatttggaagaaatgcactggtggtgagtgagggaccagcataagaagagctgtcctttaactagttaccatgttttatgcaatgttctcaatatgatatccaaatgattaggatggcttagattgcataaatgaggcaggagaatgacaaaggacacccccacaaccccaacaatgacactacccctctccctcaagggaagtgtctagggaaggccagtcagcatctggttaggcttggccttaattgtcatcttcctcaattatctgcaggaaatattagctgttattaaaatttgcagatgcagtcaattgtcagagtcactggagaccaagaattattactcagagcattggagagaggctggaaagaaaaagaacaattcagcctggaaaaatgtaaactaatggataaagtgaggtagggggagtgggggaagaatttagagggataaggccagtagtagggtgaggcagtgaagcactcccctggagtacaaactttaaggggatgccaaaaactcagctatcaagataaataaaattttaattcaatattgaaaaaaatcaagttggcaaatgacagcctgtgggccagcagcctgtttgtaaatacaattttattggaaagccactggaagtaaaggtactgtggcaggggagatccaggctaattctttgatgtgaaaaccctggttaggcttgtgaatgttagacacattagaccttagcttgtgattgatgggaaaaatatttctgaagaaaaggaataatggatctgactgcttttatgggtttcctggggttactgtaacaagtgatcacaaactgggtggcttaggacaacagatattgattgtctcacagttctggaggctagaagtccaagatcaaggtgtcagcagggccatattccctctgaaggttctagagaagcatctttctttgacatctaatttttgatggctcttgcaatcactccaatctctgccttgatgtttacatactcttcattgtgtatgtctctctgtctttgtgtccgtctctctgtctttgtgtccacatctttttctcctttcccttagatcctagtcattgggtgacatcccaatccagataacctcattttaacttggtaacatctgcaaagaccctagtttcaaataagattacattcctaagattacctatgaatataaccttaactctttggttccttatttggaaatagggtctttcttggacacgattcaacccaccacactgttaaagatatctttctaggacacaattcaacccaccatgctattaaataggtagggatgtggagagatttgacttaggcgcagcagaaacattatccattcacagaaatctggcagcggagtcaggggcagactcctgacatgatttaaatacctaagaaaatatttaaggaaaagtactttagttcctttggggcgcaaatattataacctttgctcatgtcacatggtgacaaatacatgcaggatttttaagggtagttctgatttcaaacatgcaaacaatagtgactggaaatatttttactaaattttatattccttttgttactattttattcttctcaatgtaagcaacttattaaattattactataaccgaatataacaacttttagatatttttcacaaaaattcaccaaccggggaaaaacgttgtttgtaaaatgcagtattctgatttttaatttatgaaatatggctgttatgcttctgaagcctgttcaaaggctatgaaacaatggagatgatcgaataccattagaattttaagtaagttgaaatgtaaatgggaaacaaatctattttctcccattttccaaacacatcacagtcaagtccaaaaatttgaatgttacatggctttttagtgaacacttttgttataaacatgcgtgtgtaggtatacttaattgtatcagcaacaataacattagttattttaattattgtatcaccaatcctaatcactaatcaataaatgtatactcattaattaataattcaataataatggctaatatttatgaagtgcttatgtgctagacagaagaattgatccctttatgtgaattatttaatttatgaatacagtaattcttccttagaattggtattctgtttatttgggcttgaaatgttctacatattatttttcctgcttttggtcaggagtcaccagcccatttaaagagagacagctgtatctttctgtaactgggctattttctctatgagtgcattaatgttaacagagaagcatggccagcaagggctgctagcacaaagtgaagggccctgctgtgatgaacagagaaattgggaactttatcattgctgctatagacattatcaactaataacacgtttttaaaattcctgaaaagagtttgctttctaaaggttaaaaaggtttaagttctccctgtaattttgtttatatagatgatttgctttgtaaacatttgttttgtttgtttgtttgtttttgagacagagtcttgctctgtcgcccaggctggagtgcagtggcacgatctcagctcactgcgacctctgcctcctgggttcaagcaattctcctgtctcagcctccccagtagctgggattacaggcatgcgccaccatgcctggctaatttttgtatttttagtagagacgcttcaccatgttggccaggctggtctggaactcctgacctcgtgatctgcctgccttggcctcccaaggtactgggattacaggcgtgagccattgtgcctggcacagctctccattttaaggctttgcaattgattgaatcaggctcgttcaggttacctaggatgatcttcctcacgtaaagtcaacccatgatggattctaatcggtctacagaacttcttcacagcaacacctagatcagtgtttcagtaactggggtctacagcctagccaagctgacagatcagaagagccatgacaacaatgataaaagaaactgttgccctctagtttcctcctgggcattaataatttagctaatataaacccaatactttggatacgattgactgaattcagctttgctgatgcctctgatttcagttgctttaaccaaatgcaaacccctagtgcttctgttgtctgttgatacccagaggctcatgtgatctggaagggtaagtggcttctctctgatttgccagaagaaagtggttatgttagctgaggagccagaacactaatttcagtgatttgactctggtacaagtggtgggaggcccgagggtgggatgctgctttttcctttggccctggtaaacattttatgcttgttatggtggttgaaatgctgtatttaaccttttcttcatgtgccaggaggttcacagtaaatgaggggtgtggtctgtgaagggaaaagtggctgtggcttggcctctttgtaccctgtcagcacacatacacgcatggtctgtaacatgtgaacctatcacgtgggaactcattactgagctgtgagggctgcccctgaggagctgggggcagtggtcgggagaggagaaggtcgtggggcacagtagaaatggcaccggactgggaatgagttcctactgccaacttctcatcagctcagttcctacagtcctctacttactccttcgttgcccaggacatttatttaatgccaggctaagcacaaggcttccaggattcagcagtgaacaagacagatgctacccttgcccttttggagctgactgttgagcaattttaataaatagcaatgatcatatcattagcatttcccgagggttaccatgtcccaaatgtgtgagttatgatagaggaagatggggttattctaggtgaaggccgagaagcttctgggaggcagtgactaataactactgccttttttactttggagtcatgtcctttctgtgactcccctttccttctcctctgtgttctctcccttggccttgtcaggctgcccctggctttggttctctcttcctagtctcctttctaattagcctttctagcccaataaattaagctcttgtctggaatctctagctccctgatggacacctcctcgtgaaagccctcagtatctcaaagacacaacatctgtgaagaactcaactcttccattgtattcttccttccctttcctgtctctgataatgttatcacaattcgttttgtcatttaggtcaaaaacatagtcatctttgacctaccttccctatcatacctaccagtcactcagccctaccctgtctattcccatgatgtctctcatctctccctccatttgtttgtcactctcaatggtcagactgtcttggtcacttttctgggcaattgctatagtttaatgcttgcagttttccctcaactttagttcatcctctttagagctaccagagcacatactcttgatacatcttcttgcgtcactctgttgctcaaaagccttcagtggaccactgctgggctctgcagccaggtgcttgtgttctaaacctggctctgtcacttaccagcttggtaactggaaaattattaaccattctgtgcttctattatttcatctataaaacaattgtgtctgtctcatagagttgtgatggggattaaatgagtcaacatgtaagtagtgcttataaaaaaaagtctgacataattttagcattccgtccaggtagatgctctggctcctggtcctccacattttccctcttgtgccttgactttttgcgtttctaacttttccctgttatatttctgaatagttttttgcaaagtagtgcacaaattagtgcctggatctacacaaactacatcatacatgatgctcttgtctttcttcatattcttttaaagactatatgttatatatttaaacacatatgcatatttatactaaactaagtatatatatgtatacacatatatacatatagattcatgtatactttattgtttcttcattaattgaccaaatgttttgatggtgcctctaaataagtagtacttaggcaaatctccactcatagtattgtggtaaaagattaacttttgaaaactgcccagagaacagctttctatcacattaatcatgagatacagttttgttttttccaatgttctggcggccattctcatgaggatggactgtgctgactgatctcagtgaaagttaccagtgggcatgttctcggggcctctctgtccccatgaagcatccccactcagagacatggaaaacctgtgagatgagctcatacaaatgatttctgggatgaaaatagcaatgtgagatagtgccaggaacttcaggttcacagagtataattaagatttttcctgaatcattgcacactgtaatttcatcacatcattatgtacgttctttaattatgggctctaattgcccattttagttctgtaattagacataaagacattaattttgtaggtataacaatcagctcaaatgtacttccaaattctttcccctacctttcaagaaaaattaatacatcattaaaaagtttgtgcacagaagagcctcttagagggcagcttttgggagccagttggtgttctcaaaggtggggccccagttcagaaagggtatgggaacatcaccctcttatattccccataaactgtgttgcttcatgtcagatagaccctactgggtccagggcagggaagagctccattaattcacatagggccgatttctcttaatcgtaaaattttaaggtgacatcaatgcttaatgagtcatgggagaggaatgaactaatgttagggcaactctggctttttatttctcttgtgtcctattaaaagatgagaagatgaagcattttaggctcatggggtttgtatttttcatttgtgcatgggtagctgattatcatctgtcattatgtgcgtgtgtgtgtgtgtatgtgtgtgtgtgtgagagagagagagagagagagagagagagagagagagacagcaagagagagccagaatctgttttttaagaactctcaatgattcagatctccattttttcccttcacctacagcactttagttaaaacaaaacaaaacaaaacaaaacaaaaaaaccgacgagttccagcatttccccccatggaccatgctatgtccatttcagccgacacattttacatgtgtatctatttgcctccacttacaaatccaaggaaaaaaaggcagtgtggtagagtagaaagagccttagtaagggtcctggcccctttttcttccctttttacacatactctctctctaggtaatctctctattctcgtccttaaaggccgtttatatgcttttgtccctccaatttatatctctagctcaggcctcatctctgagctccagattagataacaatcagaatgcttatttctacttggatgatttacagataatttaagcttgctgtgttcaaagctgggtttactttcctccaaatgtattgcttttctattcttcccaaactcaataaatggcaaaaccatccattcaagtactcaagctgagtcatccttgattattctttcgacatatgagccatcagcaaggcttgtttcaccctccagaacctatcttcaatctgtctgtttccctctccctcaattcaggctgcaatcccaatgcagagtgttcagtaaagcaaaaggggtggtctgctctcaccaaaagcaatttgcatgctcttaattcacggatggattacctagcacttaacacagacccagatatatttggtactcagtaatatacactgaagaatgaatgagtgagttaatgaattaatgaatgaataacagaaactctacctcctaggacttaataatacagagcaggattaacctgctttcataagtaatcagtgaacctggtaaagtgtgacatttatcttttggtgaaagcagctcaccccttttgctttactgtttcaccagcaatctctgttttatttttacctgttcttttggacacacaatttagtcagaaatttgcacctgagtcttacttctgccacctgctagtataaagatcaactggtgcagagcactatacagagattatttattgtttgctacaatgttggatatagagtttcctctctaggacctctttaactgggagggataaaaatggcacaactaaattttcatgatttggataagaagagaaacattgggtgggcatggtggctcatgcctgtaatcccagcactttgaggggctgaggcgggtggatcacctgaggtcaggaatttgagaccagcctggccaacatagggaaaccctgtctctactaaaagtacaaaaaaaaactagccgggcatggtggtgggcacctgtaatttcaactactagggagcctgaggcaggagaatgcttggactcgggaggtggaggttgcagtgagtcaagatcatgctattgcgttccagcctggccaacaagagtgaaactccatctcaaaaaaaaaaagtagaggagaaacattgcttcattcagaaagtgcttcctaagagattcccatggtccagggatgatgctggatggtggagatgtagaataatgtagagattacagggtagcagggatggggatgcacttgtaagccaatgagtagaagaaaggggttctggcggtggcacagcagcaaccacaggacgaaagcaactgcagaggacatgtgctcaattctgtgaggggacgatggcgggacatggaagggtcctgatcatgtcgatgttgatggcaagtctaccagtcaaaaggaacaggtgagcaagggcctgtagcctggaggtggcttggggctttcaaggaaccactttgttagacctgctaaagcatgtgtttcaaagagaatgtacccagctcgaagacttgcacattgtaggcacttagctaatatctgtttaataaatggataagtgaatataagtggcagaaagacagctgagttgctgggacaggtgagatcatggaaggccttgtgtatcatgctaggatcagtaatgggaagtagagaagtggtcaatgaagttttatttaagcagaaaagagaccctattgggttgagttttagaaaaatccctgtggctgcagaaaagaggatggtttggtgggaatgagactgaagtcatgagcacagacaggaagggtaactgaacattttgagagagctgaaagtgtagacaggaagggtgttcaaagattgttggagttcagagagaagtcctcggcctggcctagcagtgtagacagccaaagacagacaagtagtggaatgtcacattctagtaactgattgaaatgtgtgtgtgtttataggcaagtgagttgaaaactgtgtgtgtgcttaagttggaatgtacatgtgcatatatgaaggtgatttgaagtgtgtgtgtgtgtgaatgcagtgtgtggtagtgcattggaacgtgtgtgtgtttacatgagtgcaagtggacagtcaagaatggtgtctaacacttacctatttggtctaaaggctcataaaacttctgccttactcctggtcacatgctccaagtcacaagcagaaatgggcagaacagctcggccttgtaattccagcctgactcacactaagctgtttccaaccaagtgaattaatttctccctccttatgcccacacagcactttcctctacaacaattgttacaccactgttgttattagtttatataatactttaccccctgctaggctgtgaaatcctgaaggaggagaaaatatgttatgtatcatttatctccagagtctagctcattcaggcacatgctaagttctcagctaatgtctgttgaacgaactaaaagaataggcacacttttatagcttattaagctcaaacatagactccaaagcaaaatctcatcattgcctcttgcacattttggaaacaacagcaataatagttaccatttcttgagaacctactgtgtgcaaggcacagtgccaaatactttgggggagccagtgattttatgtgcaatgtttttaaaagtccctggagttaaaaaattcctaggaggtaaatattatccaccccttccacagatgacggaagtgaggctcactaaggataagtaacctgccaagttgcacagctagaaagtagagagctgaaacaggaactcaaagcctgggctccgaacaagcacgccctgcagacttcccttccctgtgatgccccatgctcagttttctattttctttatagtggaaaagtcaatgcccttcctatgagaaataaaagggtttaaagtggtcaaaaggaaacagtgtttcctctgtgctcacggggttttggccaatcacagagggtgaaccaaaaacaatattatgcgagatgtggccagtttgggttgattccagctttggatgctgtgagctggatcccaggagcacacgaggaaaaacgataatagcatacttgagatccaagcccatgttggggtgaggatagaggttttgctttcctcaaactattgcatttttcttttcctccctaagggtccgggcaggatgcttcctaccccagggggccacttccaaatgctgctctgtcacttggtggaaaacttcaaatttactgagggtttactgtggaagacttagtcaagagggcaagtaccctatatctccagattgctttgcacatgttggcattcaattaatattttatttgtcaatggatttaatagctgattacagtttgcaatgctctactcatggataaatcagttgatcttctcaggcttcttatgccttttcccagtggatttttcattgtcgtggataaccccaggaaaaagaggaggcacagaggaacctctcttacatgaataggtggggggatgcaagggaggacttctagcttttcttctcctgacttttctacattccccaggttgagtgactcgtctccatcttttaatttagcatcttggaactgaacagcacctcccaagcaaccctcacctgggaaccaggcagaaacaagtgaaaatgtggaggaggtgtttatgaatttttgggcagtcagtgatttcagggatccaggaagttattctactttctaaaccacttccccacctgctggatatgaatgtaactccctcagctttcagctttcacatctactttatatacaattctatactgcctctcccattttatattatttatacctatgtgctgggacttgagcaaaggtttttttattttttatttttttttattttttaaactttgtacaagggaagccataaagaatttgggcaacttgtagggaagagggagagtgaatttggtgaaaccgaaagtcagtaaaggtcacatgggagatgctgagctctgcagacagatctttcaacgtgaagcagcagtgaagaacatggctctggagtcaaactggctgagctaaagagttgactttgttacctactagttacctattggtagttacctactagttatctactagttacctacctctgttacctactagtgtgaccttgggcaggttaagtaactttttgaacttagtttactgatacataaattagtgataataataattcctgtctcataaagttaccgtgaagattaagtgaggcaatgtatgtggagtgttaaaacagtgcatgacgcagagtaaacacgttaaaatgagctgttattaatatttggttgctaaaggtctgtcctacctgatgtgtctatctctttcaaatacatcctctgggatttagcactagaaacagtcttgcagaaagttagagcagggaggaaccctcaagatcatctaatccaaagtcctcttttgtaaatgaggaatcactggcccaaggtcacggagtaagtcactgagtaatccctctggtctgttgcccagaatgcattccttcccacaaatctggccatgcttgtcctggagggcagatagactagccttccccaggtaaccttgtatcttcccgtaaaaccgtctgtcctcacaaagtggcacaatttctaaggctccctcgggcaacaaagtaggttgtgttcagagaccagtgaggtggagaaactgcccagccactgaactccaggctggacttggtgagtggcactcagtggagtcagagtcctggagacctgcacatcagggagagggtcctgaagaggtcttgaaataatttgacatggaaagagaaaatacaaattttcagagacacagataagcatcatatttttaagccaagaactcagttatatttttgacagtgtggtgtctacagtactaaggcatgttcttacaagagtgacactcactagctcttttttttttttaactttcattttagtttcagtggtatctgtgcaggtttgtcatatagtaatggggatttggtgtacaggtaattttgtcacctgggtaataagcacagtacccaataggttttttttttctgattctctccctcctcccactgaccatcctcaagtaggccccagagtctgttgttccactcctagcatccgtgtgttttccttgtttagctcctacttgtaagtgagaacatgcgatatttggttttctgttcctgtgttaatttgcttaggataatgagatcatgttctctgacatggaaagagaaacacacaaattttcagagacacagatgaccatcatatttttaagtcaagaactcagttatatttttgacagtatggagcctccagctccatccatgttgctgcaaaggacatgatctcattcttttttatggctgcatagtattccatggtgtgtatgtactatgttttctttattcagtctaccattaatgggcatttagtttgattccatgtctttgctattgtggatagtgctgcaatgaacatgtgtctttatggtagaacaatttatagccctttgggtatatacccaataataagattgctgggtcaaacggtaattctccttttagttctttgaggaatcaccacactgccttccacaatcgctgaactaatttgcactcccaccagcagattatgtgtttttttttcaaccttgccaacatctgttttgttttgttttttaataatagctattctgatgagtatgagatggtatcttattatggttttgatttgcagtgctctaatgattagtgatgtcaagtatttttttcgtatgcctgttggccgcatgtacgtctttttttgaaaatgtctgttcatgttctttgcccactttttaatggggttgtttggtttttccttgtaaatttgttcaagttccttatagattctggacattaagtctttgtctgttgttcccctcctagtttgcaaatattttctcccattctgtaggttatttactgttaatagtatcttttgctgtgcaaaatctttttaattagttctcattggtaaatttctgtttttgttgcaattgcttttggtgtcttcatcacgaaatctttgccaagtcctatgtccagaatggtatttcctaggttatcttccaaagtttctatggttttaggttttacatttaagtctttaatccatcttgagttgattttcgtatgtggtatataagataggggtccagtttcaatcttctgcatatggctagccagctatctcaatatcatttattgaatggagagtccttttcctagtgcttggttttgttgattttgttgaagatcagatggttgtaagtatgcagcattatttctgggctctctattcaattacattggtctatatgtctgtttctgtatcagcaccatgctgttttggttactacagccctgcagtatactttgaagttaagtcgagtaacatgatacctcctggtttgttcagctcatttctttcttgttgaagacttcagttcaatggccttagtcatctttggaatggcatttaggattcagttcaatgaccttagtcatctttagaatggcatttaggaaaatggactcctttaccaaaaaggtgaaaaagaaaataatataacccaaccttaaagactatttttttaaggggagagggagaggactttattcataatcctatcagctgaacacattccagtcttcttctataaaaacacaattttttataaagttgaaattatggagctaagacatttctaagaagacttaatttcagttagggacttgctgattatctttgggtaagtcagtctggcttcttttctgggaggagtgttgtgtccatagagacgtgaacatcgacgtctgcttgtttttgtgaggaagcatggtagaatgaagagaacgctgtctggagccaaaagatccagattgaaaccagactttaagcctgggctctgcttccccttttgctggatgaccttgagacagtgtcttaaccttcctggatctgttttttagcttttataaaatagatcactggcatatcagcttgttaacgtgcactgtactcagccttgacacacgggagaaaggttttcagggacagggtgaagatttcatctatatgacctttgactgcagtttggttggttgggttacacaatctacaattgtagattgattgagagtcttttgaaatatgtttttctttatgctagttacccaggtcctctcctctctggtgacagtggtaatttaccagggcattgtgtcctcttttcattaattaggccactcaggcctacccgaatcccaagagaccatttatggatgatgaaggtggtaagatagggttgtagtatgttggacctgctgtcacaaactaccatatgcagggtgacttataattaagagaaatttatttttcacaattctggaggctgggaaatcctagatcaaagtgccagcagatttggtgtctggttaggcctgcttgctggttcagagataactgttttcttgctgtgttgtcacatggcagaagggggaagagaactctctggggtccttagtataagggtactagtcttatccacaagagctctgtcctcatgatctaatcaccccacaaaggcttcaactccaaatgccatgactttgggggtcagatttaaacataggaattttaaggggacacaaacattcagtttatagcagagagtgtatgttcacagcacaggaaggttcacagcagaagggagccattaattgtgtatagactttcatgtctctgctctgattcattgtataatctgcttcattcaaaggaagaaggtaaattttgggtccctcttggaacatttaggtgactcccaccaaatacaggatagctttgagttataacctcatgaagtccctggtcatgtctgtgtgtttgctttggaccagacccaagggcctgtcctgtgtcctgcccgggctcctcccacctctttcctggagaaacccacagtgagagtggagggtgggggtccatgtttatcttggtgggcctcactggagctggacactgctgctctgtttgcccaggcttaagtatgcatctccttttttaactggccagggactttcccccagtcacttggcctgccattgatttgggacttttctgcctaaaacttctaggatgataaggagagcactattacccactgcctgcccaaacctagtagcaacagcagctagtcatgaccagcattcatggctgcaagtactgtcaggccaggggcctgaccagtgaactggaactttacttctctcccaagtgggattagagttcactgagtaggtggccctattaaaatatgtatagcctgtgctaaagttaattctaggggtgagaatgaggcagctctgcttgctggctagcccaggctggcaaagaataatgggtgcaagcaagaataccagagccagattgggttcaaattccaattctattgcttcctaggtatactgacttaggcaagtacttctatttctctgtgtctcagtttcttcacttgtgaaattttcatattttaaggattttgaagatatcattttgaggcttaaaacaatgtatttacttatgtttaacacatgtaattactgatgtttaacttttttggacttataaaaatgacaatgtttagcagagtgctttaaaaacatgacccaactatgtgctttctataagaagcccctttgaatataatgatatagccatgttcaaagaaaaaggatgaagaaagctatattatataaacattaattgaatgaaagcaggagtagctatattaatacatgtgaaaatcctctacaagatattagcaaattgaatacaaccatgtacaaaaagaattacacatcatatcaaattagatttattctaagtatgcaagactggttcaatattttaaaatcatgtgattatattaattgatgcagaaaattatttgacaaaattcaatattcattcatgacttaaaaaaaactctcggcaagttaggaatagaataattacctcaattaaaaagtttacagctaacatcatactttgtgaagaaggacttaatgttttctccctaagacagggatcaaggcaagaatatctgctcctgccactcctattcaacatagcactggaaattctagccattatagaaaagaaattaaaggcatacagattggaaaggaggaaataaaactatatttgaagatgacatgattgcctacagaaaaaaataccaacacatttacaaaaaactctcctagaactaataaattctcctagaactaataagagaccacaggatacaggctcaacaagctcaccggatacaaaaatcaattgtacgtctacatacctataatgaacatgctgacaccagaataagaaatatagtgctaattttaatcactcaaaaataataagtgtaagtacatttaaatatattatatttgtaatgtatattatgtaagtttaaatataataaaacatacataggacttgtatgttgaaggctacaaagactgatgaaagaaataaaaagatctaaataaacagagagacatactatgttcatggaagtacttgacatagtaaagacacaatatactaaagatggcaattctccccaaatcaatatatacatttaatataattcctacccaaatctcagcaacgttgttttttttaaaatagatagaaagaggattattctaaaattttgactaaaggctgaggaaccataatagctagaacaatttttaaaacaaactaagtgggaggaatcagtctaccctatttgaagacttattatatagctgtagtaatcaaggctgtgtggtattgacagaagtacagacatagatcaaaggaatgcaataaagaattcagaaatagacccacacaaatacacctctgtgttgccttatttttcagaaaagctctagactcagagtcaggaagcccaggtttaggtccttggccttgcacaagtgagttcttccagttataaaactttgattttctgggtctaaatcacttaaacttttctatctcagttttcttttctgtttaagggaacatccttccttcttccttccaagcctctatttgacaaggatgataaaatatctttcttttttaagcataaggaattctacaaaccaaaagaattattacattggttgatgtgaataacacatctcaacaccatgaggccctgactccgcaaacctgaagtcaaatgccaagaactttcatgaaatttattaatttattttttcttcccaactaacaccactaattctttatttggactccttaaggagcatgaagaatgggactcattcttgcagaactgtttttagagtttgctactgctcaaagctcagagtttggccatgtgaacttctgagaagtctgtgaataagagattttacagcaatttaacagtggttcaaagatagatgctctgtctcccagtagaatacttgtgcttgtgtgggcagaaaattcttaaaatgattcaaaccaaccacccaaagaggattatatgtaaattcatattgtgtgggtcctgggagctttgaaaaccacatacacagagcacagaaacacacaaacacacccaccaacacacacacacacacacacacacacacacacacacacacacatacatgaatagcacccttagcaccattgctaccttatgtgattcctaccatgaaaatctgcactttaaaaagcaggaaaatttgaaatctacagatgtggataacactcaaacttgaattgggacacaagaacttttccctctcgggctagtgagatagtacggcctagtggctacaagggtgaattctggagataaattttctgggtttaaatcacaattttacctttcattaactgtgatttggggcatgttttttaactattgggtgccttggtttgctcttcagtatgattggaataattatatacaaaatatacaatatctatctcacagtattgctgtgaggatttgaagaaatcatttatactaagcttttatgcatgaaatatatttagaacagagtgaagcagaagtatctgtgttctttcatagaatgtatgaatgaaatgggacagtgggtggtcactgccttaaaatactataccatatattttgtcatggtgctattgcaacaatactcctaacattatgtatttctttatttgagtcactgaaatacaaatatgttctgagaagagtcagcagagtgatttacaaactagctttttagactgggaggcacactggagatccaggttgggggcctgggtctaatctcagggctctacttttttaacaaggtatataattgtggacaagtcaactggtgttcctgaacctcattcttacctgcacactgaggaggctgaactgggtgatctcggaggtcctttctggctgtaatatcctaagagactggatgctccctaggcaaggaaactgttttatcgacgtacatactgtggaagcttactaatgcaagtctttattaagtagtttttctgtagcagccgcttttctaagccctttgacctatttaacccttgcagcaatcctatgaagaaggatttatcattatccccattttacagataaggaaactgaagcagacagaggctaagtgatttgcccaaagaccatatggctattaagtggcagggctgagattcataatccagtaagttgaggtacgcacaccaggcattctattcagcatcagacagtgctaggcaaagaataaccgaagaagagggactgtgttctattcactttgttttccccacagatctgtaagagtgcctggagctttttataggttctgaatagatatttatcattcttgcagtggcttgatcttggctcactgcaacctccgcctcttgggttcaagcgattctcctactttatcctctggagtagctgggattacaggtgcccggcaccatgcccagctaatttttgtattttttttttaaattttattttaagttctgggatacatgtgcagaacgtgcaggtttgttgcataggcatgcatgtgccatagtggtttgctgcacttatcaacccaccatctaggttttaagccctgcatgcattaggtatttgtcctaatgctctccttccccttgccccccaccccgtgacaggccctggtgtgtgatatcccactccctgtgtccatgtgtcctcattgttcaactcccacttatgagtgagaatatgcggtgtttggttttgtgttcctgtgttagtttgctgagaatgatggcttccagcttcatccatgcccctgcaaaggatatgaactcattgttttttatggctgcgtagtattccatggtatatatgtgccacattttctttatccagtctatcattgatggacatttgggttgattccaagtttttgctattgtaaatagtgctgcagtaaacatacgtgtgcatgtgcctttatagtagaatgatttataatcctttcgatatatacccagtaatgggaattttttgtatttttagtagaaatggggttttgccatattggccaggctggtcttgaactcctaacctcaggttatctgcccgccttggcctcccaaagtactgggattacaggcatgagccaccacgcctggcctatcattcttgtttttgttgacgacaaaaagttgttggattaaattgctttcagccttctgggttgctaagtgttgcagagttggctgtgttaaatttcattttcttttgttaatgttacccacacaaggtgaaggttttggttggggctcaggagggctcctgactggggagaaagtgggaagatccagagcaaggagaagacaatgaggctgccaggctttgggctgctctggcctctctgctgcctgccactgtcttcatgtccagcctcgctgtgtttctataaaggtggagttgtacctctctgatttcccctaaaggtggcctggatgtggtagaagaaagaggaggcaaggcattacctgcacctggaatactgatgagtggtttgctctttcttgtatgcccagtggcctggtcttaagcctaggaataaatgtagtcaccatggccataaaacggccccactgctgggcttgctttccctggcctctgtgagttccatgctcattatatggactccccatagcaacgttgagagcttgcttatcatttccagaagtgaccatggcagattaggaatatatgtttattttgaagtgggtttttttctttttaaattttacacattgttggatgaacataacatcaagggctgctttcccaactgtcttaggaaaagagctctaatgttggagccagtagccctgcgtgttctcatcccagttttgattataactgactataatactgtaatgacactctgacctgtgttcttttatgactgagatttccggtggggatggaggaggtgtctgatgtacagaaccagggggatgctgcctgagccaggttggggacggagagaagaggctgaatttcaagacactgacatcatcagtactggccctagtgcagttacatacctggtcctgcaacaaataatgagtatttagggcacatatgccaagcattaatggggtcacgaggtggatcgttcttttgggtgcccttttatatgccgctgcaatcagagaagcaggacaccatgtaggtgagcatctgctgttttcacagctatttgaagctgcaacccagtgtactaaaagtttccaggctgactcagtccaaaggtgactgttttggaaactttgaatgagattggttcggcaacttcagtgttatgtaagtaaaaggatgagagcagttgaaagagccactgctctggacatgttctaagtggcttctaccaatgggaatacgtgagcgtgcattaagaatgtagcaagtgagactgacatgtctccagtacaagcacagcacgtacaaggacacaacttcatgtttggttcaatgtgagacttctctgtggctcctttctcttcatttgcacagatatctgtaccacccagtataagtggtatactaatcgtagctagcctgtgctgcatgcctgctattttctgggtaattcccatgtgttttacacaggttaactctacttcctctcatggaaactacttgttgtcgaaataatggttatattttaccaatatggcaactgaggcacagagatgttaagtgtttcagcccaggtaaataagtggttcaatcaggatttgaactcaagcagcacctaccttggagcctaagctcttaaccacagcacttcactgaacctataaaatacatgtttattggttttaagctctgctagttgaagaacatttatacatgtctctattaaaaattcacttgtgtgtgggttatgaattcacccataaagaagactgccatgacgcacggaggagggatgtctgtggagcttcaggagacgtgataatccacaaactgtcctgggttgaacttagctattattctgccaggaaactgtctggagaaggtccaggaaagtaccaagaagtaaagaagtacctgagagtgctcagctcccagtgtgtcccttggcacctgccagtcacagcttggttggttctggctgtggggccggccttcctgagacccttgtcagggggctcataccctggtgctctgttttcactgatgatgaagcctcagagcccttggtcccctcatgatgttctgcgggaaaattgtgcacacttttgttgtgtgacttaggttctttaactcaggctggttgacatggagcttggttccagtgatcagtgctggctttagatatgatttgcgcatctctgcaggctagtgtcacgctgcactgtggatctggactgtggctcgggtgccagttgcaacatagtcttcaaggatagccaatggcgagacaacagcactctgtcatgcagctgaagttatggaaacacatgatgtcacatgaatgtctattgtgtgaggtgatggttaatacctgtgtttccaagaaagtgccaggtactggctagtcctcaccacaaccctatatgtggtaagggcagttattaagcttattttataactgaagaagcattagcaccaacagagaagataacttgcccaaggtcatacatgaaaaccaatggagaaattaaggtttcaacctaggcagttaaggcctaaagtctgtgctcgtgaccaccaagctatctcaccggtcccctgtcaggctttttaggggataaagtacagagtaaagtagaactttcctcaaagactgtcttattggtctcacttattttttttttttgttagtctttgggtttactttaaattgatgggctgctggaaaaaatgtaaattgtcatttaaaaagaaggcatcaaggttttgtcttaggttaatttttcaaagggcttaccaagaacacagaagacagaatgccagctgggtgccgtggctcacgcctgtaatcccagcactttgggaggccaaggcaggcagatcacttgaggccaggagtttgagaccagcctggccaacatggtgaaaccccatctctacttaaaaaaaaaaaaaaaaaaaaaaaaatagccaggtgtggtggtgcatgcctgtaaccctagctgcttgggaggctgagttgggaggatcccttgaacctgggaggcagagattgcagtaagctgagatcatgacactgcactatagcctgggtgacaaggcaagacaatgtcaaaaaaaaaaaaaaagacagaatgctgagcaattaagaactactttatttagtcctgtcttatcatttgtggcctttgtgtattgagcacgtcctgagagctgggcactttctaaatactttacatgtgtttcctcactttatgcttgtaactgctttctggaagcaggactgtgattattcccattttatggaagaaggaaatgaggttcacgaatattacataatctgctcatagtcacaaagctagcaggtggtggggctggcgtagaaacccaggcagtctggctccagagtccatgttcttaattaaccactcctctagggtggaaagctcactggttttggggttaggacactcatgccagctctgccaaaatgtcaacatgtgtgacactggccaagtcatatctcctcttgggttctcattcatttatttactgattcattcagcagctctttccagcatacctaccatgtgctaggcattgttagtactagatacataacgggtgataagatagatttcctcgatgcttctgtagagtttacagatggattttcagtttcctcatctgtaaaagatgagaattaaaatatatgaatgtttctcatcctttacaaaacccacacatctttttataaacataaaaagttatgccttccctaatgttatttgaaatttctgagtaaataaccatgactaaaaataaattaaagcaattataatagtgagtaatttttgtttgaatcacacaagccctcatgcctgttcctgaggagattctcctgcgctggccctctgagccctgggcattctttcggttaagaatcatgggaatagtattcttgctctaaaaacggacctacagttatattttttaattgctttgaaatgctggagttgtgtctatttaatttgtattcattctttcaccaagttttggctcttgggtttgtatggcagataaaactttactcattccttttactgaaaacctctttcccccccagggtatagtcgtgagtcacgagctctctcaccaactgacatttccccatcctgtttttggagggaacaacaaaggacatgcctggtgcctgacacagcgggcccacaggctgctcctttagtggccttgtgagttcgatgagcttttggctctaggaagtgcctgggctgctattactctgtgaatctcatgagattcacagacctcttaggagcaccagccaggttgtaaagatctcttgaggactgggctctggaaggactggccactccaacaccctgccttgcccttaattgtgcattgcctggtgttctttaattgcctcacaaatgcccttgaaaactctcagggatggcctcactgtgcatgacaaaggaatgcaacctactgtctggttgtactgaaggagcagagagcaggattctcataatgattgttcaaagaatttatttatgtggagtcctaaaaggagtgataggtgtgaaaaaatgcaatttaattcaacaaacattgatgcaaacgctgtgcttggtgacagcaatatagagatgaataagaccagtgtctagtgacgtgctggcaagtacaactggctctgtggggaggcggtaccctgatttgtaccttttgctgatttccattgagtaaatactcttgccatgtttgatttcaagctaccaacatggtgtcaattggctcacagaagccctgaaaatttaataatcagctcttatgagcctgtacaaactgaacttgcattctgctaccaatatctacttttgaagttgtcagtttagattggaagatacataaattgccatgcagtctgataaagacagaaatagaagtatgtagaaggtagaaaggtatcacaagggacactggttcaattctgcggtgggcatatccacatggtaggctgcaaacaaagacaggcaaggcctgtaggtgggtggagacagagaccttcagagcatcctcagtgccttcaggtcatggggaaatgccttggcctgccttaaggtcccgtgcagtctagcctcaccttacctggctgaacattctcccacatttactgacacaaaccttctgctctagtgagtccagcccagtgttttcagtcttgagagcacatccctgccttggctgacacccacctcctcccaccaccgtttagaaagtgccttccctccacctccacttccctgctctactcatccttctttatgaatgcttcctacaacagctccaagccacagaaagcactgacagaaagggaaagattgatcacgtgaattccattaaagtgaagaatttatgtttatcaaaagtcactgttaagaaaggaaaaggcaaacaatggagtcagaggaactgtttggaacacttatgaccaatcgaggatttgtattcaggacatgtaaggacctctcacaaatcaataagaaaaagacaagaaaagggaaaagagaccagaacaggaacttcacaagaatggatatccaaatgacatgaaaagaagcttgccttcactccacctttacctcagtcactagggaaatgtgatgccactacatacccactaaagtggctgaaaccaaatagacttgtattaccaagcattgttgaagacttgaaagagtgggaaataatgtatactgctggtaagaatcagacatggtataacctatttgaaaaacagtttggcaatatttattaaaatggaacatttgcatactctatgacccagcatataatctgaccatactctatgacccagcatatgatatgacctagctataatccaatgaaaatgtatatccatatgtttacctaaaagtatgtactggaatgttgatacagcatcattagttatggctccaaattggaaatacccagacattcatcaatagtaaaaaataaattataggctatttgtgaagtggaatctttttaaactatgaaaaagcatgacatactgctccatagaactacatggatgaacctcacaaacctaattttgagcgaaaggggccaaacaaaaaagaaaacaaatggagttattatatttatataaagttcaaaaacagacaaaactatatgaggttagacatcagtttacctgatacctttggggaagagcaagaggttagtgactgggagggctgtgttgggggcttctgagttgctgaggttgttatatttctggccctgagtggtgataacacaggtatgttcactttgtcattgagctttacgtgtgcaatttgtgtacttttctgtatatcttacatttttattagctaaaaagcaaaggagcttctgcatgaaagtattagaactagtgctggaaagtgagggagtgtttctgaaccgcctttgtgtttttcttttgacgttttctatctttatgagtttattcatcaaacaaagacattttgagagtgacaatgtgccgggaactattttaggtactgagagtgaaacaaaatagaaacaactgctgctttcatggagcttacattctcaaggggacagcaaggtccttgaacagacaaatgtataacaagtcaggggataagaaatactctgaagtggtattaggggataagaggataaagaataatggagctgggctgagggtttgggcactgactaggtgttgttttatatggggtggtcgaagaggacctctgaccaggcagccttggagccagagcctggatgaagtgagtaagggaggctgacaggtatgtgaagaacattccaggcagagagggcagtaagcgcaaaggccctgcattgggatccttggcctccgaagcaggaaactcagcatcattcttggcttctctctctcttcttcaccttcatatttgaatcaaatcatgatccatttgatttcatagctaaatctctcatagtttgcaacctctgcctcccaggctcaagcgcttcttctgcctcagcctctcgagtagctgggattacaggaacatgccagcacacccagctaatttttgtatttttagtagagatggggtttcaccatgttggccagggtggtctcaaactcctggtttgtctccatcccctccattgttgcctatttgggtaatagtttcttaactctgccttcccgtttccatttttttctcttctgattttaagtcactgactggatatgccactcctctgcctaaaagccctccagtggctctgctttgctctcagagtaaatgccctacaaggttttggttttcctcactggtctcatatctttctgctttgccgtacactccgtgcttgagccacaccaaggcgattccatgtttcccacattccctctgaggaaaggccctttagtctctgggtctttctttatgagggtgcatctacctgtggagttctttcccccacctcctcattttatgttttgcacatcccttagatctcagcttagatgttgtttagtctgggaagctgttcctgtcccttaaaccttggccaagtccctgtgttctcctatcgttgccccgtcatatcattttgtcattgatttttcttttttccagcctcccatgaaactctaagacacatgtgggaagtaactatgttacttattcatagtgcttagcaaagtttctgatgtttagaaatttctcaataaatattaaaaaaagaatgcatgttgagctacatttctgtgatatgtcaaaaatctagaagtatttttattagtaactgatagaaatatctttcagtcaaaacattattcatcaactcacaaaaaagcagactagctttgtgtttgagttttgtttttgtttttcctggtaattttgtgttccataatttctcagacacagaaacattatctttcaaattttaataccactttatttgactcaatcacatgtaaaatttttgttcagagaattttgaatgtatccgtgaaaaatattcaaatgtcgaaatccaaatgtcttgctttggctgtggagcaatatcattactgtgacttagttctagaatttagacttaattgctaaaaaaaaaattttgaattcaactttattaattttgtcaagtttttgatgtgctaggtggacattctttccaatttattacagtcccttcatatagacacaaaagcttttaacacgatgggaaagctggtgagacaagtcagaaaataaagcagctcttttttctttttttgttgagacagagactagttctgttgcccaggctagagtgcagtggtgcgatcttggctcactgtagcctccacctcccaggttcaagcaattcttgtgtctcaggcaccgaagtagctgggattacaggcagtagccaccacgccggctaatttttgtatttttagtagagatggggtttcaccatgttggccaggctggtctcaaacttctgagctcaagttatccacctgcctcggcctcccaaagtgctgggattacaggcatgagccaccgtccccagccagaaagccgtgatttttaagctgatgctttgtaccatcagtgtgaggagtgatgctattgatccctgctgggcatgagcattagaagaaagttgagcagggacttaaaatggggatgtggagcactgtgccaatgtctttcaaatgggcttttaaaaattattttaacaggattatttggagaatcataaatgtttgagcctcagatacactcatagctaccatttactgagtacttgctatatgccaggcactataaaaactgctttaaatagacaatcttgtttaattgtaataacagtcatatgggattgttaccatcattcccatttaacagatgagaaaattaaggctcagagaggttgagtggtttgccctaggtcatatagcaggtcaaagctaatgctgaactatgaacacagttcctctgactgaaaatgtgcaaggctactaacgactaggtcctactggcttatgtattgaaaagtagatcaatgaactcattctggagctaaatgttgtctattactgtggattatccatgacataacccactcattatattccagtattggttaaaaggtaggagagaagtgatagtaaatttcatgggttcggcatatcttctgaccgacagaagacatggaaatgttttaaatgtttcttttcctttttttttttttttaaaaaaaaaacaaaaacaaataacactaaaagtttcaccaaacaagggttcataaaaggatcgtctctaaattgtgagtgtggtgagtgtgcatgctctgagcaaaaagagcctcccctttctgagggaattgtgaccctggaaaggaggagagcaggaacagctggccatctccccctgaaaggccagggcccccctctcaggcctctgggctccagctctggctgagggtgtgtttgtttggctgtgactctttcccttctgtttccctctcggtgtcatatttcatgagctccaggctcctgcctgtttcagcttgagcctctggctttcatcgctgcctccttggccaaagctgagtgagggcttgaaaaaaacactgattggatgcacatttagtggaggcgattgctggaccagcacctcaccaatccccagccccaaatgcaactgacagctacaccctcctggctggagcctaaaccagaggcccctttcctccctcctctccacccatacccttgctgtttgcccaactcttcctgctgaaatcagaggcagcttgtgcctcccagccttcttccctgcccccgctgtctgcccagccaccagcttcccctgggctggaaagacccccgcttgtctgactgtgctaatcctctgtttgaggttccagaacttcccaattgttgggcctgggttcctgtacttagctgcccagagtccacttctctgctgagatttctattatacaagagattcaaccagaaccctctccgtgggcctccatgcctctttttgctgaattccccattctcattctgcgtagggggtgggagttggtgggggtacatgcaccttgagtctaatcatgatcttactggggagagctcagtaggaaagtaataacatattcatttaaacaactttttctctgttaatctttttattgaacttcatagaattaatggataaagactattggttagagtgcgtctttcttagacgagatggagttagagacacttaaaaaaaaataaggcttgccactgcaggagtgcacagagcacctcaactattggagcccaggtgatctcttcagtgggtcataaaatctgagtcataagaacctcatggcaaagaaaacttgaaactgcaaagtctcacatagtcatttgctgaaaactgaagtgtcccaacaaatgtcgggttagacctactttgagaaacacattccaatatgagatcgaacctgacaattttgcatgctaacctggactgtttcttattagagcaaaggggatgggctttttgtttgctttgggtgtatttgtttttgctgccaaagtgttgtaatgtcatgattatttaatatgtatgaggcctagttgtgtactagggagagtcaaaatacatttactacgaaatgagaccagctccagttgtttaaacagctccagttgtaataataagagctaagacttgatgccaagcactgtttctaggtattaacttattgagtcctcatgattactcctcacgatggtcctcttggaaaggatcctatttttctatgagaaaactgaggcttgagtgttaaggaacttgcttaaactcacacagttagtaaaggtcagcttttagatttaaagccaggcaccctcattctagagcttgtggctcaaccactgagctatactgcttgttagggttgttggtggagtgatagtagaagtagatgggctagagtttttcatttctaaccctaaaaatctatagctattaacactgaagacagcaactgccaattaaataaatcctcaacaagactgagaagagaatctgctaatctgttggtcactaatgtctgcagtttatctgcttatctatctgcagcaaaactgtcttagaacactttgctgaatgaaattgaacatggaaagctgactgaagggaaaacagagaaggtgggatagttgagaagggagtaagatcagacaaatggcaatgctctgtgggatactgcgtccaagcagaacagtcaagggattcagttctcagaagctgttcaggtagacgccctccttaccagagtcggttagcctcttgctgtatgcacacttgaggctgctcaaagcgcgagggaggcatggtctgtgctcattccaggcatccaaagcaccagggaggcatgatctgtgttcattccaggtgtcttatctcgctgccacttccaggcctgcacattataggcaatatatttactacactctcccttctcctttattttttacttctggatgtgccatggtgaatatttttcaggcaaatggggggaatcgtttccatttcaagctgggttgaaatctagcactatgattagggttgtgctaacctctgcctgcctctcccctaactcctgctgtgtataggtgggcatggctcaagcatcctcagggctgggagaaggttgcatcaggaatgtttctaccaacagaagctggccagtgggaggcttgtaggcactttgtaatttaccattctcttcttgaactatgcagcagtctgaggggctgtacagaggattcttcccagtcattcccattgctagctttggaggccttctcccacaattcatagcctcctagtaatgtgctttattcctaaagcccagtccttggggtttttgaagaaaaggaaggcagatcagcatgccttccctagtctgaaattaccctgtttgactcatatagtgtggagctttataatctgtaatccaaaattgggattgtctatactataaggatattctctgggacttacgcttatttaaccaaggttgtctgcaatgggaagctcccatgacgggagattcaggagaaggctggcataggcttctaacttacaccagtgctccctgatgcctgtgaatgtggggagagggcaaggagattttgagaacagataagagacatttgaatttctcaatgccttctgaaaacctgtgtgcagagttgaattgaaacttaccttgttagcattataaatctgaacactttccttgctaggccacaatgacttaataatatcgtctaaaggatctatgttcactctgcttgcactgatttacatctcctttttccaattctgcgtagtctctggacacttctacttccaaatatcacctgtttaaggaatagcacttaccttgtcttgtactgtgaacccaaatttctgtgaaaaatggactgtagcagttgttccagtttgagattgctgagtgtcatgaacattggttttgaagagtatggagtgttgttggaggacagctcgaggctaaatgtggttgtgcaatatggtttctacacactgtccagcaggtggttggatacagttatgccattctctgcttcttgtttgttgtcttcaaaacatgaaaaaataaaagcaaaatatagaatatcttcgatgaattcagcttctcttaatctcacttttatctcctttctgtaagacttagtctattatttccgaatatgccatcaattttatccaagtgaaaattcagttttagttttaaaacacacagatataaaaataagatgcaaagttctacagtaaaattcttagacataaacactgagatttttggattcacaaataaatagtttagataacactcagaaagatcttttcctcctaattagcttctattgtcacctcttcctaagttgatatgtagctcaatttgttaggaaatggatttcccatgcatgccctaactataatcataagcatctgcaactctgttttcaaacaaagcatctgcaactctattttcaaacaaaggtagttactcatgagagagcttctttaaactgcaatggaccacacagaggtggatgtctagcacatttacagtgaccatgatcctatctctcaccatttcttcttttcaatattgcaggattctaaccatatgactttcccacccctcacctgatgtttggcgacaatatcctggcttctactggcaacaccatcttttgctatttgggtaaatgtgctccttatcagccttggatcctacccaggctcagggccttgtgagtgcaatgtctattgggctattgtggaccccatgactatgacccagacactcagttttgtatgccacatcccttttcagggagctaggtcaaggacatcatgcaactcatttgcatgccatattgaagattcacacttgggggaatattttattctcaggcagctaagaccttgaaactccagcatagtatggagagtgctgagccttcagcatttttagcacatgatttcagccttggaaatctgatgtacttgcagacctctacacaagaggaggtatttgcatagaaacatgagcatgctggggctgggtcatccttttactacacatgttaaagcatacattgtaaccaaaattttggaagcaatgagaatctcttactctactattgggatttggggtcacagcaagactttggaagaggtattactgagaagatgcctctatgaggtgttactcaaagtcattaattacttacagggctctacgagaatggcatagttcatgtcttaaaaccgcttatagctactggttgagacagaaaaggaaactatgtgctgtgtgattaaaccggtgttttcttttttgcattctgtcttctacatgtgttgtggtgaaatgaaactttaccacattcagcagtgctcaggagaaacattgagcagtgttggtatatatttcaatggcattcaaaaccctgataaataatttaggacttggggagatctgggtatgggaagaagaactgaaaaaaaaaaaaagcagcggtaatttactaatatatgtttgtaggttaaaacactttttatagctgaccgtagtagatagaatcattctttacaactattaagtggtattaaataggttgacccaactcccttggaaaagtgattaattttgtcttccagacctgacttctgaagctcaaagttggtttaaacagttcagctgtagtagaggatagcctgatatcctagttttgccacagtatctgggccagatggcatttgcagtaaatggaaggtaacaatgatcagctctggtatttacgtgtgtaggtgatatggtcatgtgggagtgttcataggcttacaagccatatggctcttggccataaactattgctaggtaaggctttgactctgtatcagtatgaataaagtagctctttcagctcatgagtatccatttgctttgtgtcaggctgatgtcaagttaacctgcttttgcactctggtgaacagacacatagattattaaaactgaaagtgatctaaaaagttatctaaaccaatatcctacatgaagaaggatcctccctacagcctcacaagtaagatgattagtcagcctctacttgaatatttccagtagtggggagctcataacctcacaaagaagcacagcctgtttttggatggctctaatttttagggtgttccctcttatttttgatgaaaatctgcctctctgtaacttccttagtcatgactggagttctgttgtatgagctgaatccttttatttcagaatagggcatcacatatttgaagaccaacattaagtcccagtgtagttttcttttttctgcatgaaacattcgaaggtctttcagtaaatccccttgttttcttggtagggagtcactcatcaccacttttctcttcccactggagctgtattaagctccttgaaactttgcatcctggagatacagctttctagtcacaaagcccaatttaccttctctgagaagagtctagttctttttattagttttagttgtacagtttgggattctcctttttctcctctttgtcttatttttcttcccagcttcctcctcacgtggcgttgttgtgcataaagttctgaatcatatttttcatctttgttcgttgcaattattgtcactctgtcttccttcttggattatttctttcattctccttagaaaatttttgaattctcccatcagctggagaaaaggtatcttttaccttctcctccatcttatactgactatgcaagcagcttatacttaggtcccatgcaagcagtgacttcagaaaaaacaagaataccaacaatgtatcatctcctattgttggctcttggttttgaatagatattccctacccaactagattcatgtgtgcgactctgagtataggtcattcatcgaatgtctgttactgctagagtctttgagtatgtagtctgttgatgtgaacctaaatgtaattggtgttacatgcagtttaaatgtcaccctatttcaacctcatgattctcaatctttatgccaatagctacagtatatttattgtctaccataggatctaattacataagctttggtactgctcgttgtccagaaggatcataatgttagagaggacatgtcttcctcacattatgaaggactaagaaacagaggctcagggagaatatttggctcatccaagattacaccattagttcagcagctggtcagatgctgtttccgataagccactcagctagctaactcccttggcttcaatagagaaagtgacttaaactgtggcatttctggtcttttatactctctctctctctctgtgtgtgtgtatatacattttttcttctttatcacctagcatattttctgatatgtaataagttctcaataaatgctggttaatgaatatttcaagccatcctttccttttggaagttgggaacatgtgtaaaggaagaagactagattgagtgataaagcataaaatataactaggaaagtcatagcttgggatagagagtatatgcagtttgttcagaagtatataaggcattgtgctatgtgccacgatgcctatacagaacgtatagcctagttcctgatatcagtgagtttataatgagataaacgtattatatttggcattgtgaaaatgagataaaaatagagataagactgaatcatatggaaaaaattagtttccagttcaagagaatgttatcaacatcaatgaggagttcagagaagggaaggtaatgaagagcctgctattatgctattgttctcatcagaagaggggtgagtgtgagggaggaagagaggatagatggaagatgagaagagggtgtgtgccagagcactgttgtccatttagtgccagccctgtgtggcaaataggacacaaacctccaattggcttaagttcctgaggtagaagagattaagaatgttaaaaagggaacaaaatttattgagcacctactataggtgaattcatgaatatttcttgatcacctgtctgtggaaggcactgtgttaggtgttagagataaagagagatactatcttcaccttcaagggcaggccaagcagtgtgctaggaacctcacaaaaggaggtgctgaagtcacataagctccccttatgtagttattccagttcctggttttcacgtctaatggatttttccccatagcttctccccctccacccaaccccagcctttccagagtgtgtctgtcttcccaaaatgagtttgatactttgtgcgcatgccgggatccccatgggattgatgacatcatacgccattggctcctattgcacacaagagaggagacagatctgcacattcctgcagttaatgctgagtagaatcttggcagaggtggtggcatccttcatttgactttagaccttcagcctcccttttaaagccctggctcacacagttattgagaagccttatcctgcaaggaacctacagcttaggaaagagttgcccatgtgtctttgctatcaaacaaaagatattggcaaatcttttatcgattttctattctggcagaggtaccatttattatggggtagatgggatatagataaagcatctccctgcccctaatccctgccttgctgagataaatgcctgttccattccccaatcaccagaaaatgccttggagcaatggagtctaacagcctgagagttgtaaaggggcagcaaagccacttctgcaggaagagagtgtgcatgaaccttattcattgtccatgtgtggagttgcttcatgttcatgctcttcaccctgatttgacacataccaacatcaaataactatctactctaccccatttggatactataataaaaaaaagatagtccagttaccttataaacaacagaaatttatttctcattgtcctggaggctaggacgtccaagatcaaggtgctggcagattcagggtctggttagggcccactgcctggtttatggatggcatgttctcactgtgtcctcacatggtagaagcagtgaggcatctctgcggggtctcttttaaaaggaccctgaaagagggtgccaccctcatgacctaatcacttctcaaaggccctacttcctaatactatcacattgagggttagaatttcaatataggaattttgggggaacacacacatccagtctatagcactatctgataaggcttctgaatagtcctgggccattttacataacgggggtttactaaggactctcaacagcatagctcttgcttcaaggggttttccatgcggggcctgccagaatcccctgaagatttgcccttttgcttttgggagaatcattgagagaaaaaggacctggctcctgtgcttttcgcatgctcacccactccggcccttctgattaatgtttgctgttctgctttgcagatgcctcccaggacccagagggagactgtagcctcatttctgtggagacctttggctggactctcctggctctcccagaggtgagagaccgtggttcctgtagcctcaggcttggcaccagctcatctctggtggatccaggattccagatatccaatctcactacagccagggcctctttgtcccagtgtgaccttgtgggctgtccccctgactgcgtcttaacagcccctgccattggtgattttcattccagctacgagccaatggatccctgaaagcgactgtgtgggcttctctcaccatgtcgctctggcctcagcctggcggtgtgctcctctgtggtctggatggggatgatgaactcgggctgcccgttgtttttgttttgtgatatttaaagcagccgaagctctcattactgtaatacagtatgtgcctgggctaaagggggagcagcattccttctggatcagggggcaactctattctgttgtggtacacccgctggagtgtttagaaccacggctggtagatttacagtgccagggctgacaggggccttggaactcctccattttcattcattccagcctcgttgttggaatgaagagggagctgagcccattctgggtatgggacgattgcttaggccctggggtgatgagtggcagatctgggactagaactcaggcccagaggccagcttactgtcatctggctaagtttctgcttctgttctcttcacttgttcaagatccttctgaggccctgaaccaaatgaggaaaattcatgtaaatcttagcacactgcctgatacataataagtgctccataaacgtttatcagtgctctcataagccctgagacatgcaaaatattcttgcccttcagggacttacagtcttgaggaggagataaaaatttcacacatacacactaacacaattaaggagcaatttaagtcactaaatggttatctgctaagttttggggaataggtgcagtggatcacgcaagagaggagacagattattgtggcctagaagaagtgccatggtgaagataagagcataatgtgtatgacatctgtgtatgacatcttttcaactcctggcagtgagatgaacaggtcagcagccattcctggacactgcagagccctcaggccatccactcatctacccagcacattcactgattatctcccaactctgtgctctgcataagaatgtaaggaagaccatgacaagaccctttcctcaagcctagccagggagacagacatgcataaagatactaccactgaaaaattctacattcatatgtgttcatatcctcaaagcatcgtctgagcccacaggtgggtaggcaagtcagataggagcaagagtttgaaggaaagcatacatttacctggtgaaaaggggcaactcacaagccataagctcttgtgcaaaggggctggtaaatgtgagtcttctgcaggagaggtggagttgctgggaggttagacccaagcaagggcattctgagaatgagattgagaagcctctgaggccagcatggggcaagcccttggtgtcacacttggccctggcaatgtggtatttttaacctgggccagaaagtggagaggagcgggcctggtaggatagagaggagggctctttacttatcaagagtaggtaccagatgctggtgactcaaggggaagcttcctgagtggagatggagcctataggtgtttaatcgcctggaacaaacatattttctgcactgcttggttcagaggctgcaagttaaagtaacacagaagagaatgtccggccagcaatgtgaaggaagcatgaaatggaaagggttagaagctgaacttctcttgatcaatgactttattatcttggcaaggattgcagaaactgtaggtgctgagggactgacttgtttggaggaaggggtagggaccaggaaaagaatcccagacacttggtgctaatccaactgctgaatgaggctttcaggctctgggattcaggcaggaactcctgggccatattcttcctaggtatggggctagagagccttcaatcttagtgtctgtatgtccctgggccaatctgctttgttctaccatgcctaacatcagaaaaaaaggggtagattaagtttagagccactgctctgtgtctccatcctgcttctttttcctaaggcaattgagccttacaaggccttctaagtccctatgaggtctacagctgtcagggattggtgaggatggagaacaaaccagtctgttctgaattcaactcttgctttctttctccctctcacaattgaaggtcttcctgagcctttgcctctttcaacagctggatgttgagactgcaatttttcatgattgcttgttttgtattttttcttcatggtctttcctaaagtctgttattcatccaggtccacttatacatcttctaatctattgcaccaaccctgcagccatggcctggcatgaagctgcttgctcattgtcttgttggtttttccaaatgctcacaggcgctagtcatgtaaatctcctcctggcaagaaaaaaagactgactttttgttgttgttgtgttgccccaggtgattcagccagtcctgggctcacaatagatgctaaacatacgattgccacctcgactgctgatctttttcttcctatacaccattctattcataccgctattcaaaaattgatatttataagcacttactatatcccaggaatggtactgtaagttctttatatgcattattccatttaattttaatagtgataccattttctacttttaaccagcttatactttctacactgatagaaaagtgtccctaaacccacagactagttagtacctggctgttttagaagttcctcactcatgacatttctgaagttatcactacaggatatggttgcaaaggcctgggaggagaaatcctttctgtctctgatggtttcagagaaggtgagaggtctctgtctctttgtggtaaaaacaccagggtaggccttgatctcctgagtcttgagtatgttaagggaaagacactaagattgctctgccaaaagggcagacagaccctgcctggtgtctgggaagttgagcccaagtttctctccaaggagggtctcctgcagggatcaggaaggagggtctattggcatcacacatgatctcttctgggttcaggaggggttcctatagctagatgagatagaattgattgatgtctcagtgatgcttcaggccatgttgattgggcctgcactaaaagtaagcagcccttcagagccatgtgctctcaagaggcagcacagccataaccgcaagagtaggatggtcctggtggaaatggcacaatcaaaacaagctcctgggccttgtggctttgagtggctgaactggaaggttcttgaggtatgagcactctcactcacggtattgatcaagcagcgtaatcacatcactgcccccacagaagtggctgccactcagttctcctcagcccaggctgatttctgctctgctggttcataggaaactgcttgggtctttcatgactgctgaagcccaaggcactttccccagaggcagcatcactcacaggatggaccaaatgaaatgtcctggtcaaaggcaggaagtttgtattgttgttcttgcctattttactatcatgtaaatacctgccaaccaacctacacatattctctgagtacttactgagtacttactatataggtgttaatggatacagaaataagagtatggctaggggtggcatgctttttgcccctaacttgcaaatttattgagaacatgatgccaggcacagtgaaaaccaaagagaaatacaaataaatggtaacatttatgagacaggtactaggttctagacacttcttacatgttaactcatttcatccttacaacattcctgtgggcaggtgccattattactcccatttttacaggtgagaagacagaggtgccaaggttcaagtgtgtgcccaggtgcatgacactggtgagaggtgggagacaggactcaaacccagcaagcctggtctcagacaaggtgactcataaggagcagcaagggaggtaggaggcagaacattgagtgcaggggctcagagggtggagggaagtaacttcaatctggtttaaagaaaccagttatcagagacagacagggcctaaagaaggtatgggtggctcagagttttaggaaggaaaaacaggaagttgggctaatagggatagcgtgataagagaacaagtgctaggctggaataccaggggcctggccttgcctgtgagcagctgctgcccctggggaggtcactttgctttttgggctgccttatttttatcacctccaattggagagaattgagaaagatgagctttcaggtcccttcaggtttttaccgtatggttctatgattttgagggctggcatgtttccttggttgcttccaaaagcctctgaccacagtccctcaggctgaccctcttgtgcccagtaatgtggaaagatgaccttctgctcaccagcacatgcttccaagggctgcggagcctgggacagaaggtacggtgggaaagaaaatgagaggagctggttgggaaagatactcacatgcagaaaagtttccagcaagtcagaggtgagagtaaaagatccaaatgaaaagctagagattgctagggctcaccaaggttgaataacttgtccagggtcttagcagactgagggatactggatgataacacttctaaaatactgttttgtatctggaaaatgctctgccttcagtttgcattttctctccttcttcctcccagtaatcaaatgaagacgttagatttgacatttccagtgtgtacagtacagacaggaaactaggtgaatgaagtaatgcagtcaatgttctgtgactccattctgcccctggaagagggatgttttctataatagtcatgtgactcaacatcttcttgtcttcttagaaaggagtgagagaataagatagccatctagcactttcccccctcacctctcctacaaactctagcatctcattttacagaaggaaaggctgagatggaggggagcaaagtagtcttataacaaaggcagaagtggagcttgctatttcatccagtgtgggtcacctcaggtcacctggggcacatcctatgtgcccagatacttacggaaggggtcattctgggcctttggctccacactgaggggctgcattttgagaatcacgaggttgggactcccagaggaaagttgagagttaggaaaacttcaacaaatcctcaggaatagaaacagaacatgagatgagaatgtttgggacagctctgctgtttgtttctgtgtatgtgtttgagggcccatctcttgccaaaaccaagctcatttctgcatatttgtttgcttaatatgaaatactccaaaactgctcttcatatttgtttaatctgaaatgaaaatgactcagcagagaggaaaaacaagatttaaatgccctgaatggcccctgaattaaaatacatagccctaaatcatgggggtgttcttctccccaccaaatcttaatcttcaacacacacaaatgcaagtgccacacacagtcatgcacacacacacacacacacacacaaacattgtatttgcctgccccaacttgacctcagtccctttatctcttttccccttcatactccagcctttccagggtcctacctttcctgcaggggaggtgcatttgagcttaggtggagaggcctggcctgggctacaggccacagatgattttcctggagggccagcacttcctctccagtccagatcacaggctcagtgtcaagatccctgggggaaatctgaattttcattcttcagcaaagtcgaggccacctcagatagtccctagcttttggatctggaaaaatggactccgtggagagaatggctgtctaccaaatcagacatgtcttgctttttacacaagctgtattcctgaaaagttgggtataaactggatcttggtatgttgcatcaattttgaatgtactgaaaagatttgctattcaaaggaacccagcactggattcttttgtcaagggatgaattactttgtaatggctactcatctagtgatttatgagtttggtaagtagatggaatatttttatatactgaatgttattttaaatgtactgtgtgggattttttattcaaagttacccggcattgaatccttttgcgaagaactattctgtagtgtagataaacatttcatgatttatgagtttggtaactttaggcatttcttaaagtgggatatacccctagttctgcttcagagaaaaagttgttttttgcaatgatcagacttggagaaaaaagagttctaccatatttgagttatggtcactcctgaggggcttaggaagaatggaggtactcaaactttccattttgttggagcaaaagatccaggagttgcctgctcttcttactttccatattatcactggggtggaaatgatggaggtatttttccaaagaaatgtagttcactattatagctacatttcaaaggtgtttctcttcatatctatatcatttgaatatatatttatatatatatacacacacatacatatatacacacacatgcacatatgtttatacacacacatgcacacatgtacgtatatacatatataatctatcatgtgtatttagatctaaagcaaagacattgcagtagggcttgtgttttgaaccactgaagggctgctgtttccaccagtccagagtgctggggcttgctctgagatcaccaggggtataaaccaggcaagaggagaacttaacttcctgctcactctttctcacttggcaggtcaaaaatcatttcagcacttatctcccaaggttcctagctgtgtccccataccatcctatctgagcactagtgtgaagcttgttttgggaaatgatctgattgctaaggcagttggaaaagagaaatatggtgtcatgtgtgtacaaccaagagctgatctaggatgcccacatattcctggctcatccatgagccacatattcattgaagttcttataggtaggagcaaaccctgcctataagaaccctacatggactggaactgtgtcaggcagaatgttcagataacttaccctttcaccatgatttggccctgaatgtgtctcagaaaaaggcttttagaagctcacccaagtacagagataatttgtgagacatttaacctctcagactcttgcttttttctttcctggagagctgctaatttctagttgtggctgccacactcctgtctgcctgatcttccattttacttcctggtttcctggtggctttgacacatggcctgtccagatcccagtgggggcagtcctgagatggagagctggtggtcttttgtcagatctgggaagtcctgagccatgacttcctttgaaatcaatttggaatgtccatccagcttggctagggaagaggattttgactgtgaagagggaagtgggttctttactacaaaggacatattctctctgagccacatgctccttgatgttctttggtaaatattgggctgtggtcctagaaacactgaccttggagtcaggcgaactgggatccagttcttactctgtggtcttctaacttagtgacccaagcaagtcaaaattaatctcatttcgagatagagatatgcaagatccttgaccttcaatgactcatggtcaggcttgagagaaagtcaggtaaagaagccaactctaattcagcacaatgaatgggaagcaccagccagaccaggtaaaacagcctcaattgagggtgaagtgacttagggccgtacttttctattgtcaaaaggagatgataatttctctccacaggattgtggtgaggctcaatgatgtaatgcatctataagtaactgataaagttcaggaattctaaaatagaaacaggcagtaattctcaactgttttcttcttccactctattcatgtgcaagatgtgctaagacatttcccaatacaacaagtgattcttgaagtataggacgtgttccccccacacctccaactctcggaaatgcacagaaagtgtccttgagattctgatagcctgcttccaggaaaaatgttttgtttggttttgtcagaaaagctaatataaatgacattaacaaggaacacattttccttgttgaaaatcaaaacattacaaataaggctaaagtctccctttgatcaccattcacaatctcctctgacaaatacagcagtccatctcctaactctgtcttggagggaaccactgctgtcagcatggtgtttaatcttccagatcttatatatatataaatgtacatgagtgtgtgtctatcataaaaatatatagtgtgctttacataaactttgcaaccttcttgttcacctaaaaacatgtcatagacttcaaccgttgtaactgtgagtagctctaatgcattcattgttactattgcatagcatttcacagtaggaatattctatagttaataacattatcctactggtagacatttttctaagtttttgttgttaaaaaatatattgcaaagcacttttttgtgcatgcctcattgtgtacacacacaagtctttctttagggtaaataagaataaatgggatatagaaattatggtatatgtatttttattgaaattatcttctaatttatatatccagcagcagagtatgagagtatgcatttgccatattattgccaaagtttatattatcacactttaaaattttgccagtctgataggtaaaattggcattcaactactgctttaatgtttgtctttgtgactacttgagaggttgaatacttttagatgtttacagcattatattgtctcccctgttgaatgctttttatttacttggcccatttttctagtggcttttaaaaaatgatttatagagattattaatactagaagttatttcattatacaatttcaaatatttatcttagccagttgtttacatgttatgtttatgatgtcttttggtcttaaagaagttttgaattttggtggaaatttttattattcttttcatttctggattttgctttccatgtctcatttgtgcaggccttccttatctttagctcatagcaaatttttctagattttccttgaaatattcttatggttccatctttacattttgggctcatttttgtgaggtgtagatataccttcatttgcttttgaaaaggctactaaagcatctgaaacttcttcaccaagtttaaatacccaccttctcatgtagtacatttccatttattcatgagtcttttctgggttgttcattctcttcagtgttctgcttatctatttctataccaattgcatactcagagaggcctttgctggccaccttacctagaacagctctcattccctttctgttacattactctattttattttcttccctgtacatatgtttctttaaaattcttcttcatttacttgttttcttatgtactataagttccatgttggcaggaaccttctttgccttttttactgatgtgcttatcacctgtaatagcacctaatagatatttacaaaatagttgctgaatgaatgaatgaaggccaatggcttgaccaggggtgtttgcattttgagttttatttcttgaggcttaaataaattgtcaaaggggtttgtactactaactaaataagtgggtagagaagggctttcctagcagctccttgacatgcttccatgtatacttttgagttctgttcacatgtcacattgtttaaatattgaacccttggaaagactcattcgaaggtgcagaaaagggtgattctgctcacaataagctttagagatacttccttttagggtatggaatttagaatgaccagatgtagtcactgaatatatggctcaaggcaatcattaattcattctgcaaatacttatcaggcactctggtagtgttgagactacaacaacgaataaaatgaacatggagcttgtgtgtgttgggggggaatacaaattaaacaatcacagcaatgaatatataatgagaaactatgatcatttctatatagaaacattatgtttttagagcatgtaacaatcaaggggatgagagaatattttgctgagaaagtgaccatttagtagagatttgaactaggcaaagagaggagagaaacttcttggcggaggtccttaggcaaaagaaaatggaagaaaaagaaaagaagctccagtgtgactgaggtggagaggatgaggagaagggcagctctggtgaggtaggtggagcccagatcaaaggatgatatagtgtgatgatgagcaaaaacaaaagaaggaacaacaaaaacaacaaaaacccatgtggattttgaagtaacacaagccttaggttcacatatgagtttggtcacctatcaggtgtgtaacctgattagctttaacctctttctccttagcttccttgttgttgaaaacaaacctcattgagttactgtgaatattgtaagagatggtctctgattcgtagtagaagtacatggtataggtataatacttctaggtgctttacagtgctctgtttgttagctgacagtcatctaattttaggcaaaacagaaaaataattattgcttttggagattcgcagcttgaagcccggcaacagtttcaaaaagtaaattagtcaacattttttgaacacttagtaggtttggcttagttcagttaaaaaccatttttgagcacatactttgtgcacgatgtaaagtaatactttggcaatataagaatgaaccattttgaagttaatgattaaatggataattttataacaatgttgtgaaggatccagtagagttaaattaagcatgtgttttggtgaaggaaagaaaggaaatgatgtgtgggagacattctttgcagaaggaattattggggaaggttatggaggggaggaagttacggccagtaacccatgagagaggtgccacaggagagagagagaattctaggactgtcctgcaaaagactgctaggagagggcggtgagccaagtcagtcctgggcctcagcacttactggatggctgcttacaaagagctcgggtctctctggaaggacatcctggattatggtcatgagttagtgctcaactatagccaagaccaatgtctccaggattcacctgtgtgtttctttctctgggcatgtttatttagggacttatttatggaaatagtgttcccgttgctggaagtggctaggaacactgagacatgtattttatcttatccaaatcaattgctatgaaactatgctcatcaccctttgtagttgtagatcacatacccctcagcccctcactatggggccatttaaatcttccgtgttttatttgctttggatccatcctcttcagtcaaaaccatctgactacattgcttttttttttttttaacccctctgggtgtgtcagtattatactgcttagaaattgtcttagaaagcttctgtttcctgaaaaagaaaactccttactcatgtcatcctctgatttactccatccctgttattgcctattaaagtcttgtccatccttcaagaacctgatcagatatttatttctccatgaagccttccttaatcactccagcttaagggaatttcttctctctttataatattgtgtcacatactatttctaatattgcatccaatgcttgcttgattattagtgttactcagagggaattttttaaaaatcactttgtattctagaacagtttttttttttttgtctcactctgtcgcccaggctggagtgcagtggcacaatctcggctcactgcaacctccacctcctgggttcaagtgattctcatgccttagcctcccaagtagctgggattacaggcacccaccaccaagcctcgctaatttttgtatttctaacagagacggggtttcaccatgatggccaggctggtcttgaactcctgacctcaggtgatccacccgcctcggccttccaaagttctgggattacaggcgtgagccactgtgcctggctttctagaacagttttatatttacataatcattgtgaagctagtacagggaatccttgtatatcccacatccagtttcccctattattatcatcttatattaacatagtacatttgtcaaaatgtatgaactgatatagatacattattattagctaaagtccattctttattctgatttcctcagtttcccctaatgtcctttgtctggatataacattacacttagttatcatatctccttaggcaccctgagctgcgatagtttctcagactttcttgtttttaatgaccttgacagttttgaggattactcatcaggaactttatagaatttcccccaactgagacttttctggtgatttttttataagtagactgaggtaataggtttttgggaggaagtccacagaggtaaagtgtcattttcatcacatcatatcaagaacacatactatcaatatgacttatcaatgttgatgttaaccttgattacctgtcttgaggaagtgtttgtcagatttctccactgaaaagtgaccctttttctttctctgtttttacactgtacttcttgggacaaagtaactatgtgcaacttactcttaaggagctggggaagggagatagtaatgcttcattttcttaagagcagattatctacataaattatttggaattcttttgcattggaaatgtgcatattctccccatttgtttattcaatcattaatttatagcagcatgaactcatggatatttattttattctttggtttataattcaatactgctgtttttgaggggaggaactcattaagttggctactgtgtccctttgtcataccccatcatctttttgtgtgtacattttctcaatttctggcactaaaagatactccaagtccatcttgtttatagtctgctccattcccagaatcagccatttttctgaggaatcctgtctccttttattgaagaatgttattagaaatcaagatctgagcactaggtttgctcattgctactgggatgtcattgcctctaggccttttcagcggatggaacatatgtgtgtatactaacccaggcatatacacatatctataaatatttccatatgtaactatttgtatccttattaagctaaacataagttcatactgatgtctccaaatctaatctattatcatagattagatattatgaatcattttggggaaacctgaaaatacagaatcccaggtatcactccaaagataatgaatcgggataaatattgaacttatatgttttgaaaggcaaacattaaaagtaaatgcttctcttggttgaatattggaatcaatatcaagattatgaaaacatcagtttacatgataaatataagttttactttaccattattcaccatttgggtaagtatttatcttaggaaaacttcgtgtgtctgactatacttttgctaatttaaatttcatgagtgtgcaatctgatagagtttgaaaattattatattaggtgattattggatgtgccattcaactcccaaagtctgtgattcgaagtcccatatataaaaacaaacactgcaggaacacaaaattaattgtgagaattgtactcattcatgttggcagtatctgcctcactcatttcctctccttctctttctgttttcttgcattattggttggtggcagactccagttccaacaccatcttctgagatgatcctgattcccagaatgctcttggtgctgttcctgctgctgcctatcttgagttctgcaaaagctcaggttaatccaggtaacatggctattactcagctatatgctagaagaccagcagaatgtttaaacccatcaatgttcaatggtgggtctaaaagctgccaagagggactacaaagctctttctttttaaatctccatggtgaaatatgactaaaataggaagaaaaatgaatatactttatatatatgtattttaatacttacaacctgttgaatattgtaaaatattttcttatatagagtaggggtgcagtaagagggcattttaaaaaatgggaggtggcagaagcaaccatttgcttctgcatcttctgagaaaaacaggacagaatttttagatgtcttggagaacttcttcaggttggtttaccagttgttttgggctgtcttagactttgattttacttggatgtcctgttatgcttttgggatcctggtcctgtgggatctcaggcaggttctctttcctctaggatgtggccatgctaaaaatagataggttaggagaatcttttgagcccaaatttgtgggattattttgtattacatgcatttttaaagtttaaatggaagtaaataattgtattatttattacacaataatgctgcttaacaacctatccaaagctcaatgtctttaaacgagcatttatttggctcctagctggacttgtttggactgttctctgttctgtgttgatttactcaagcataactggaagtcagctggctattggctcatctaggatggatgtggcactgatgaatggggcaactttgctgtgttctgtttcatcctcctgcagactaacctgggtatgttttcctggaaattgcacaggaacaagaccagaagccagaatactcaaacatttttcaagccactgctgaaatcatgtttactaagtctcattggccaaagcaattcatgtggccaagcccagagtcagagtgggagagcacaaaaaattagatggtaaaggtctgggatgcaggtattggagaagaattggagtcattttttttttcattttgctacaaatatgaacatggaaaagtatacagcttaaatgttcaattttatgaattcataaactgaacacatctaaacagtacctggattaagaaacagaactataccagcactttagaagctctcttcatgctcccttccagtaacttttctcaccaccccgcaaaggtagccattatcctgctttctagcaacatagattagttttgcccatttttgtactttatataaatggaattagatgatgcataaatactctttgtgtctggcttctttcactcaacattttgtttatgaaattcatcctactgttgcatgcagttgtcaactattcattttcattgttgtatattactttgtttgaacattttatttagccaatctactgtagatgggaatttgaataatttctagtttgggcccattatgaacaaaactcctataattattcttatataaaacttttggtagagataagtactcagttcctttgagtatacacttagaagtggaacttcatatgtgtagcatatgatatactattctgcataataccaaaaattttttcaagtactttaccattttaccatcccatagcagtatatgcaagttccagttgttccatgctatattttgattcttgagggtgctttaattttgtcctcttcatagcataagggtacatttgtgaaaatgcttgctctcctcccttcataaaagttccatgtgcatgggtttttctttataccttcaataggaaatatgatcaaacatccttaaaatcaaagaattattggctgaaggagcccagtgccttgttactttctcgtaataagctcagctgttgcatctcagatcctaacttgggtaccattttttcctttttctgttctgtattcctctcaatcaattgttgatgtttggttgcctcctactacattcttcatgctctgagttctaaggaagagtgctgtgagtgcatggaatggtgggatgttttggtggtaagcatagtcatggagactggcatgccacgaggacatttaaatgactaaccaggagagctgatcttctgtgttagagtccacactgtggccctggagcaggaaatgggctatttggagacagcaaatagtcatcttaatttttttttctatttctggtgtcaggtatttttgttggctctttctgacagggaaagagaaatagacttcttgctttgcaaagacctttataggaaaacaggacatgttgaaggactaatccttctctctgccatttctttctattttaccaagtcaaaccagagatgagtgtttgaggcagatgagacattttcattcattatcagtgataaagagtctatcatgaatcctgaggctcatagaatgttatagcttgcacactgctgagcataaagtcagcatatgataaatgcatgttgatttaaggatgactcttcaggagtccttactggtgtcaactgaaagactgactataactgaaagtattgaaaggtaactgaaggcactgaaagactgagtgaattcttggccagttaggtttttcccacagaatggccacatgatataacaaatagaacttaagccaggagacctgagttataagcaaatccaatatgcaaccaattattaaattactgaaacattttagttggttattagctataacatattggttggttaatagtaactgagctaagcattaaactcaataaaataaaaataaaataataattagttgaagctcattgttgaagatcttacaatgactattggtcaataagccttcagtattagcatgatttagttgataacaaacattaaacatgatatgatatgaaatatcaatcttggtgtctcagcagataccaagagaggataaataatcttgtttacatttaaaaaaactctctagtatttgaaatcataaatgtctcacaggtgtcatccatggaggctgcagagtagtggtggtatgacagagatagttggctgaagcacgaaggcagcagagtttttggctcactgttctaaagtatctgagttttggcaaagcaggcagtcaggcagatggtgttagtggcatttccagtaatggcagtgttaaaggtagcattgtcaatggggcctggagcgtaggctacgcaagtctttgtgggaaatgctgacatgaaggtgtatatacatagtcctgaattgtgggcagagttctcagctatcttccagctgcaacagtgcaccaggaactggaacctaatcatcattaatccagtgggagaggttattggaagaattagaggcagtttcttatgtcaaaatcatggctcagaaataccatttagctagtgacatccaaatcaaacaaataatcatcccaataatttctgaaaatcatttatacaaatcaacagatgattggaatgttattagttctgatgaatgatttggagttaacttagaaaaaagtatttagcttaacttttgagtaacaaccctaattataatcctgacttggtcataaattaattgtgtgacagtgagggagttgttacgtgtctctttatacttccttaatattttcacttgtagtaagattaagttggattagataatctatgggaccctttctgctacaaaattactgtgatttttatgatgtgagaactttatagcccatactggaagatttcggcttggaagtatagcccctgaagttgcatggctgttttttgcaagaaagactacttgtttccaactccctaccacttcccaggctcagggatgtgaagtctgaatttcaggagaatcttgcctttggggctaagcacacaggaagtgactgataaatacttaaaaattttaaaccctaaaactctgcttagtggcaggtgaatgcagaaaccctgccccagcctaacctgcaggagagtcatagtgctacaagctaccctgctccagagcatcttttgctctagaggtggggccaagaggtagcatttcaggctgaagatatagcgtatgcaatggctgagaggagggtgaggaacatttggggctcctggtggaggataatgagtgagagagccagcggggctatgtaggagatccattcccctgtgggatccttgagtcaagttttcccttatttccagcttgggctgggactgccaaacttgataggagaactaagggcatctccatgggaaagagaccccacaatcatgcacaaaaatacggggctgcagtagttgtttgagtggacatcagtgtcaggctcccctaggggatataaaaccactgtttcagtggttagtggggaactggcaccttacgtttttccaggtaggaggatgaatagaactatcctgatgatcctgaaattctagcccagcagtctgaagccctgggacccacccagccaattagaggattgttgtgtataaaaaacacaggggtgcttgttcttattcccctgacttggcctgtgacaactgtttgtgctcaggaaagggagaaacatctcttcttctcagcaggcaaaccaggcctttaggatccatggtataaagctgaggcagggcagtgctggaacttcccattttcatgtcacactttcccctcataggaagcaggcaacttactaccagttcagagtcctggggtgggagtccccctttggtatccagaatgcttccactttgaaaaagagtggcaaagccattcagggtttgggattaggagaggacgagcttttctcctcctggccccaaatttattttaggttcaccactgtggtttttgttctttccagcatcaatcccacatgtcagtgagttcttagggtcaggcaactagaattctagactgttcatgttggaatggaccttagaaatatctaagtcactcttcctcactttacagatgaggaaactgggagtcaaagcaggtgagtgatttgcccatgctccacatttagctaatagttaagctaggacgaggacccagggctacctgtctcccaatcccaggtgacttctacctgggccctcagggagcaatgtgctgaagtgacctttatctaaaaatcacatatatccatgcagcctcatgctttcctttctgcaaccaacttccaatgtatatttatggggatgagatgtaattgagatttgagggacagcctgaggccaaagaatggagtcagacgaataggatatacagtgctcacacctagtctcatgctaaatgaggaaggctggagctagaagccctgcgggccaacttacccccacccagaaactgaagcaccagggatgctttggttcccttctgcaccaggttgtgcctttatcaccgctcccttgtcttccaccaagactgctatgtgttaattcacctacacatatttccaaattggaaactcatttttgtttccctggcttctcgtcattcgtgttcccagagatgtgctgagaaggtttatgtggcctcatctgttaacgagaaggtgatgctagtttcaggtttgtgaaaccaggcctgaggtactagtgttgtgatgtgtgtgtatgtgtgtgtgtaggtgggtggcgcgggggtgtagtgtgtgttagacagcctgaacaggccttgagaaaaagataaaaggccggcaaaagacctctctggttgaatttatcttaagtgagcaatgctagaagctgcccagattggctctttcttgcttgtgtgtttgttttttaagtctaggctgacgcctgagagtggcctttggcatccttcctgccagtaaaagagcctttctctgggtaaaacagaaactcatctgccccttgagccctcttggttgtgccaaatagggaaaaagagaatgcaaaactcaaagaatattcaatgaacacttaatatattctgggtaccattttaagtggtgtcaacaaatttaatcttcacaataatcttattagtattagtgttattatataatagtagtattattattccagttttacagaggagaaagtgaggccaagaaacattaggtaactcatagcaggttacagagaaagctaagtggcagaaccggcattcgactctgctccagcaagcatgctcttttcttctacttcttttttctttatcccgtttttcaaatttccaacaatgtatcagttaagagtttttcgcttgtttttttgtttgtttttggagagggcatgttgctctgtcacccaggctggagtgcagtggcatgaacatgactcactgcagcctcaacctcctgggctcaagccatcctcctgcctcagctccccaagtagctgggactacaggcatgcgccaccacacccaactagtttgggtactttttgtagagaaggggttttgccatgttggccagactggtcttgaactcctgacctcgccctcctaaagtgctgggattacaggcatgagccaccacacccggccacaagcatgctcttgacctctgtgctctactgcctttggagtgtgagactcaaggaatgtcagggcagaggaaacccagattcatggaccagccacgaatgggctacagagacccgtgaatcccctgaaattgcatcccaaacttaatgtgtgaagacaaaagtacatttgcaaaatgaaaaatgttttctattatcagatgctcaaaagactctgtgaccagttctagaaaagactaagaatggtggatttaatctaatcttgtacaaatgaggaaactgaggtttagggagataaagtgatgggaggaaacatgtttgaaaagactattagcagacctaaccaggctttgcctactcgctggacgagcatggtcagagttttgggttctctgaactgcagtcttctcacctatcactgatcgctgccttaagggctgttaggaagagtaagagaatatatgtaaagtacctagcatagtgtcaaacacacagaatgtgattaataaatgctggaacttctgtcctcttcctcaattttgtatattgtgctgtgataatggcagacttcattagtctttccattattctatactgtcctttatattttagtttaatcatttcattaattaattatttaacttaattactatactgtaaaaatatttcattttctttgagggcagacttcacctaattcctgggctttgtatcttgggataaaagggttccaaatacatctactgcatcatcacctttccatccaaagtagccaggtgaattcccggttcataccctaaaactttgccttcaccctgttgttttgcattctgaggcctagattcctagttgtaaaaggcagtcagaggagctaaaagtaatgcaagaaaaaacaaagctccactttttttctgttgtcagtagggatagaggcccagggagacctagtctccttgagtctaaactttggggccaggagcatgatcatgggactccaggaagagcttcacacaaagtcccttttctggacctctcagttttcacaaccacctgcagagctcagttttgctcagggctctcgtgtggaaagactaagagtctacagaagaacaacagtgttggcaggagcagacaaggagacagggaccctgcttaccatggaaactgggcgcactggggccattaggtccgtgcatcactgctgcttcacatatttgcttattaatgttttgttctgaaagctgacaagaactctaggggcttcaagcccataagatcaagacatacaatatagcgatataagtatgtaagaaacatagattgatacagatataaaataggaaaaggatatgaaacaaatataatatatatgataaaaattataaatattataataaatatattataaatattataatatttaatattattaatacattaaaatataaacatatatttatattttgtaaatataaacatatatttatattttgtaaatataaacatatatttatattttgtaaatataaacatatatttatattttgtaaatataaacatatatttatattttgtaaatataaacatatatttatattttgtaaatataaatataaatataaatatatatataaaatatgtataaaaataaacataataaatattataataaatatacacacatatatatgtgagtatatttatgtatgtatttatatatagatatatctatatttatgtgtgtatatttatgtaagtatatttatgtatgtatttatgtatatatagatatatctatatgttcacatgttacatgttatatagatatatctatctatatatagagttaaaaataaataaataaataaataaaaataaaaataaaaataaaaataaataaataaatacagagaagcctgggagtttccttgacttcctttttccccctccctcttcttattcatcaaacatttgttgattgcctatataagccaagcactgtaataggtgctggtcatgacgacacaacagattatcactacaccagagacaaagaccaaagtcataaaaacctctgaagcaggaagaaaaaaaaagttgcataaatttttttaacaactcatcacctcccacttaggctcataaaaaaacctcactgattttagtgtcttaacttctactttactgtgtatgtgtccaaactactgaaaaattctgtgagggctatcttgccacatccatactcttcagagacccacaggccaggaccaagagctaagtcgacaatcacactatatatatctatatatatatatatagatataatcacactatatatatctatatatatatagatataatcacactatatatatctatatatatctatatatagatataatcacactatatatatctatatatagatataatcacactatatatatctatatatagatataatcacactatatatatctatatatagatatatctatataaatatatagatagatatctctttatatatatatagatagatatatctttatatatatatagatagatatatctttatatatatacatacatagtccataaatatgtacataaatatgttcacattttacccaatcaggtcaaatctccaatgtcatgctagttgagatactgaaggtatgagagttagctggagctgaaagaatttgccaggccaggtaaaaagaggaagggaaagcttttgagctgaagaaaaggcacagaggcacaaatagaaaaacaagagtgaggatagtgattattgaggggtcatgaaggcaaaggtggggttaggatggcaccaaaagtaggaaccatataatcttgggatcctcagtatatgacaaatgttttatgatcaaaggccttgtcttcacctggtgttaacataatgctatgccatgctgtctttcccagagtgcaggttccttttgctatcacatttcaacaaatcctgggacaagcacattctaaaaattagacaagcaataatcctccctgggctctctgtccagattcttccccaacttggtgattcttgaccctagtgatcacatgataaacagggtgtgtgtgctggtagcagggtgtgatgaccacgtgatacggttactagacagactgtgacaatggagatcaagagatctagattctagttccagctctgtcactatctagctttgtgactttaggtaaatctctgcacctcactttgctcatttataacatggggtccataaactttgctctctgaacttcatagggttactgcaggggattgaaagagataatggaaataaatgggctttggaaaattacatgcaaatatcaaagactgtgatttgttacttttggaagaaaagaaaatgaaaataaacactatgaaacaacagtttctatcaagcagatgatgcaggaggaagaaagagaaaaaaactccattagtgatcattaaggtcccttgtggtccccaagaccgactcaagttgcttttggggaatggggcttctaacagtcctgaactctggccaccctaactctaaagggatgcaggaccctgtgctcaagccaagcatatccatttatatatatatatatatatattttttttttttttttttttccttgggagaatagtgtgattgttgacttagctcttggtcctggcctgtgggtctctgaagagtatggatgtggcaagataaccctcacagaatttttcagtggtttggacacatacacagtaaagtagaagttaagacactaaaatcagtgaggtttttttatgagcctaagtgggaggtgatgagttgttaaaaaaatttatgcaactttttttttcttcctgcttcagaggtttttatgactttggtctttgtctctggtgtagtgataatctgttgtgtcgtcatgaccagcacctattacagtgcttggcttatataggcaatcaacaaatgtttgatgaataagaagagggagggggaaaaaggaagtcaaggaaactcccaggcttttctgtatttatttatttatttttatttatatttatttatttatttttaaatggagtttcactcttattacccaggctggagtgcaatggcgcaatctcggctcactgcaacctccgcctcccaggttctagagattttcctgcctcagcctctcgagtagctgggattacaggcatgcaccaccacgcctggctaattttgtatttttagtagggacgaggtttctccatgttggtcaggctggtctcgaactcccgacctcaggtgatccacccaccttggcctcccaaagtgctgggattacggcgtaagccaccatgcctggcttttttttttttttttgcaaaaaaaaaaaaaaaaatctaaatgatgccatgtgagacttgatctcagaaagatgttgggaagctgggaaggaacccataggaatatcatccctttaaatgatgagatgctgagtatggtgtgagtaaattagaaggaagataatgaaccgaggccatttcagctgaagctaccaaagtgcagcaccaggtccagccttctagtgttagagaactgggagagcccatctccttgcagaggtagagcagcccgggactgcaggggagggtgaggccttcatgcttgttcctaaatgcctaaggtcttcgtttaggctacaagcggagcattttgattgttatacataaaggaaaatgtggttaaatttaattcaaatatatgtaaatatcttatgattggcatttcaagggaggaagtcagattcaatcttttggctactgtaacctatattaaagataggaagtatgcaatgatgtgtactgtctatgtacaggtattgctaacttgagaaatgtattggcatgggaggagccctgggcttgcccataggacaaatccacctcgaaagcagagcagagtgtcttcattctgggtagctggtaggatgtaagcctgaattcttggtcttccagtgcttcttaaaaactcccacgtgctctctttcctcaccaggtcctgaactctaatctgtgtcctgtccgactctcaaaaaatcagctcagctcttcagagggcttctccttacattccccctccacacagccccagcatttggcacatgtgctgagtgagatacactgcatgctcgagggataccaggtctccctcaaaaactctgctaattttgtcccgtagagaccgtctgctagtgccaaacccggagtcggcctcctgcccctgctccaaatgggcaaatggctgaaagtggctacagaagttccctcacctctctgagattctcccttctctgaagtcttggtctctgcattctcattgcctcagaaacaatcagattccttcaagtagatgatttatgaattttatttagctcttccagttacttttagagggagcactaattactgcacactactccatcccacctagaaacagagatattaataaaaagtgaatttatactttattgccactgtgattcatgttaactaatcatgttttactttttgacttgacttctaggaagctcagagccaaagttgaaacccatcatcagccagtggtatagaaccaaatgtaatactctttctgtattaaccttagctctagcttatctaattgttcctattttctttttcctttatccaaatttcttcacttatttatttatttatttttatcttatgcaactttggaagccgactccaaactttactgagtgagtcaaagtaaaaataattaaaaataaataatacctaactttattgaatattagtgctctaagtgcttgacataattaactcatatattccttatggcattcctataaacaagtgcaattactaccatgaaattgagaggctgaaagcttaagtaacctttctaaggtcataaaaccttttaattgtttaaggaagagtgaatgtactattttaaacaaatagttctctcttctcctcttagatatcatttattgagccccattacattctataaagtatgctaacttctttgtatacattatgttaaccttggcttggcaggattatgaaagatgaagaaaccgaagttcatagaggtttggtaactggtagtggggtcccataattcagaagtggcagagccaagtcttaatataaactttccatgattccaaaccgtggcctcagttttcttcttcactcctgatctgcatagctacccagtttcctcttcagcttaccttcttgttggggaaaggagatactatttactatgaaagtttcactgtctttgttaaccaggaagaagaattcattatctgatccctatgttagtatcctgaaacccactacagcttggggactgctctcctggggctctgcaagaattgtttctggaaagtattttgggcttccaggaaaactgcaatcctaaaggtctattcctaaggggaatttcaacttgtgcaagaggtctgggtgaccattatacccaaagaatagccctgtaggctgaagaaagaaacccaaataatctttcttggcccccctgtggaatcccattgtgtcaatatttatctgcacaaaggaccagtctgaaacagcctgctctgtgaagcttgtgggaagcagggcctcagtgacagtttctttaagtggactaccttgtcctttcagaaactggaagaactagaccatggtagcctagggttggaggaggaagaaccagggatcaggagacctgaatttcagtcctggttaccctagccctctgtgtgaacttgagtaagtcacttcacctttctgggcctcagaggttctgatatttaacacggagacattagagggattggcttcttaaatttgcttctgggctccaacgttttatgattgcagatgtccctttagattgtagactggcttgagaccgctgaccccaataatgcccctcagtcagtcttgtctgggcccagagaggcccaggtgtcaggtctctgcacctcaggcctcatgtgggccatgtgtgtgttttcctggaagctgcatataggacactcattgacggggagcccgtggtctggagctagtagtgagatggtaaacattatggaacaagcagccctttcaggctctcagccttggcaggatagtatgaaaaataattcttgggaagctggggactggtggcagctgcttctcctcagcctgcctgccaggccctaccagagcttggagggctggagctccctgctgggcctgccacagcctgtgctggtagttttccactctgggaaactggaaaagtgaattggcttctctgtccgggagattggtgggtagcggaagcatcagaaaaccgctaagacaactcagcaggaaaaaccaggagacacttctttgctgcagggtctcttgcttcccttgccattcccagctttttcatgcttctttacagttcatgatagaacaaagacagactggtgggatttgatgaacgaggaagtggaactgggggaaagcaaggagacctgacatttagggcttgggccaacttggcagttctgagtcttgactattggctgagatcccttccacagaaggagtttacccaaaataggcacattcaatgggaaaaccacactggtacagctcagaagtgccacgttggttgccctgggcttttcctggttccaaagattcagtaggatgagaaaggtcatccaagatcatcttgtccattttcctgtgccttttctctaaggcccttgggcatactgagtcactgagaaactttgcctattttcttaatgtgactattgctgatttactaagttcttatctctgaattgtctatcctcatccttatattactttgtcacaatttctagacctccatcctaactttcgttgtctggagattgtgtgcaatacttgtagccctctctgccttttcatctacttatttatttgccaaacgtgtgttaagcatctcatgggtgctgtgtgttggcaggtactgagggggaaaaggaagaatctgacatgattactattctcaaagttgctcacaatttcaacaaggaggtaaccaagcacaagagtaacagaaaatctccgttggagtttgttacttaatagagctcgcctacacaccatcatcactttaatcccataccacgttttagtattttccatagcttcgtcacattatctgaatagaaagagccagtaatagctactgtcaaatacataatcaaattgtgcctatttgattatgaaaaatctattttcttttttctgtctcccctaccggaatgtaagatccatgagacaaattattttatctgtcttgcttactactgtatcttcagaagaacacccgatacacagcaaaaacttatttattaaataaatacatacacatttgtaaaagaaatacatttgtgaactcaatacatgcaggtaaagataggttgcaataaaatatgtcatgactcagacttacaaggaagtttcctgtatctcctgtctgctaaaacaccattagccaaggctacccttgaccaaactcccaggactttgtttttaagccttgtaaagtgatgaacaacagaaaacacttcctttatcacttttcaatagacgtttattgagcacttggttaatgccagacatcctactagaaattggagatacaacagaggaagatagatatgatccttgccctcataacacatgctgtttagtgggcagaccaaaattaaacaattatttacattacaagtctaaaaactgttatgaacgaaaaccagtttgttataagagcatataatagaaattcctaacttagctggggacttgggggaattccttgggggagtgactggctgacagctgaaggatgagcaggagctagtgagtgaaggagggaggatgcacatcccaggtaaagggagcatcatgcacagagaccttgaggctggaagatactttgtgcattcaggaactgaaataaggtcagcgtgcttggtagagagcaaagaacagggaatagccagagatgaggccagagagtaggctgagacccaatcgtgtggacctcaagggtcacattttcttaagaagaatgaaaacctgttagaaggttcatgacagaataaagttttaggaagctaatttgggctattgtgtggagaagggatgatagaggaacaacgaagaagagctagaaggcattatagtggctcagatgggaggtcatggaggttgcgcactgcatgggaagaatagaggagagaaacagctggactcaactgcaggaggtaggatttgtagaacttgctaatggactggatggttctcaaaggccaagcttacttctcattccttgactgccgcctgttgagagtaacatcttacctatcattcctggactcttcctctccaagaattctattttggtctccaggcagaggttgactcagggagagcctttccagttttcatcaatgtcattgccactctgctgtccaccacacagttgacctaaaccctctgtatgctggaagagctggacgagtcgaggaagaggggagcgctgacatgtgtaacaagttatttacatgaaatgaagcctcatgtcctcccctacttcctctagttctcaagcttgagtctgcattagggtcatctagagtagtggttaatacactgtttgctaccccctcccagcaaccccaccagagtttctgattcattaggtcaaatggagactgataattagcgttgctaatgagtttccaggtgatgctgatgctgctggtcctggaagcatattttgaggatcacagctctaaatggtaactgaaatgcaatcacaatacatagatcaaagagctttcaggaaggaaactggcactcctttgacaccacatagcagagtatcctatatggatctacctccacatctgttatataggaaaattcctgaatgggttcagttaggacacaaaatataaagggtttctatgcctaggaaatataatttaactgaaatgtgtcataaaagcagctgcagcagcagtagctctgataaaactccttagttgccattctcagaatgagcagtacgttagaaggaaagttatttgcaacaatatcatgattcacctcatgtgacccacattccctatttctgctttactttagatattccaagaagcagaggctctcattgcattcatggcctagtgtttagagatgcattaaagccagggatgaaagcccagtgggacggtcagtgtggctttctctggtgcccagcatggtcctagagaatcattacacgtccaggctgaagggacctgggagcagtggctccagagcctggctacacagcacagtcacctggtggactgtaaaaatatgcaggttactgggctcagcttcaggtataccaaagcaaaatctctaacaggaggctcacaaacatgtattctaaaacctctccaggcttttctaatgctattggtccatggactggctttgggaatcactgccttacagaaagcctaatagaactctcttgctttccacatgaagaaacagaccgaaagagagccaggagcttgctcagatcccacatggtataagtggtagaaccgggagtggatgcgaagtcttgattttcaagggttgtgtgctcagtggaattacaggctttagagccaagttctaagatgagttagtatttactcaaggaatggcctttgcagttaaaacttacctgtagaatgtgtgattagtgggaaacatgaaatattgggtggaaaatgcttatcatattgcctgacacttggtaaatgcttctaaatggatgtcatcattactgcattttactgaatttaagcaactcacgactctaagatgcatcattactttatgtgcctctaagaaagaaagaaaaactactgccagttaaactatgacactatttgcttgcgaagtgcatccagatttcagagatgtcagtacgtgaaagaatgggcagtgtggtatttcacttctcttttctcaactctatgaagattcttactttactgaattagacacttaacagtacatgaaaattcctgaaggagaagtatacttagtgtgtttgaggaacaacaaggaggccagtgtggctgatggggaaagtggggtaaggacaaggtccaagacagccaggggatgtctgattccatgtcttcactattgtgaatagtgtgaacagaagagtttcatgatatgactttcatttcttttatgactacatagtattccatgctgtatatgtaccacattttcttttcttttctcctttgctttttctttctttcttttttttcgtttctttttttttattacagttttattttttatttattttttttggaataatttttttttttattatactttaagttttagggtacatgtgcacattgtgcaggttagttacatatgtatacatgtgccatgctggtgcgctgcacccactaacgtgtcatctagcattaggtatctctcccaatgctatccctcccccctcccccgaccccaccacagtccccagagtgtgatattccccttcctgtgtccatgtgatctcattgttcaattcccacctatgagtgagaatatgcggtgtttgggtttttgttcttgcaatagtttactgagaatgatgttttccaatttcatccatgtccctacaaaggacatgaactcatcattttttatggctgcatagtattccatggtgtatatgtgccacattttcttaatccagtctaacattgttggacatttgggttggttccaagtctttgctattgtgaataatgccgcaataaacatacgtgtgcatgtgtctttatagcagcatgatttatagtcatttgggtatatacccagtaatgggatggctgggtcaaatggtatttctagttctagatccctgaggaatcgccacactgacttccacaatggttgaactagtttacagtcccaccaacagtgtaaaagtgttcctatttctccacatcctctccagcacctgttgtttcctgactttttaatgattgccattctaactggtgtgagatgatatctcatagtggttttgatttgcatttctctgatggccagtgataatgagcattttttcatgtgttttttggctgcataaatgtcttcttttgagaagtgtccgttcatgacaaacccacagccaatatcatactgaatgggcaaaaactggaagcattccctttgaaaactggcacaagacagggatgccctctctcaccgctcctattcaacattgtgttggaagttctggccagggcaatcaggcaggagaaggaaataaagggtattcaattaggaaaagaggaagtcaaattgtccctgtttgcagacgacatgattgtttatctagaaaaccccattgtctcagcccaaaatctccttaagctgataagcaacttcagcaaagtctcaggatacaaaatcaatgtacaaaaatcacaagcattcttatacaccaacaacagacaaacagagagccaaatcatgagtgaactcccattcacaattgcttcaaagagaataaaatacctaggaatccaacttacaagggatgtgaaggacctcttcaaggagaactacaaaccactgctcaaggaaataaaagaggacacaaacaaatggaagaacattccatgctcatgggtaggaagaatcaatatcgtgaaaatggccatactgcccaaggtaatttacagattcaatgccatccccatcaagctaccaatgactttcttcacagaattggaaaaaactactttcaagttcatatggaaccaaaaaagagcccgcatcgccaagtcaatcctaagtcaaaagaacaaagctggaggcatcacactacctgacttcaaactatactacaaggctacagtaaccaaaacagcatggtactggtaccaaaacagagatatagatcaatggaacagaacagagccctcagaaataatgccgcatatctacaactatctgatctttgacaaacctgagaaaaacaagcaatggggaaaggattccctatttaataaatggtgctgggaaaactggctagccatatgtagaaagctgaaactggatcccttccttacaccttatacaaaaatcaattcaagatggattaaagatttaaacgttagacctaaaaccataaaaaccctagaagaaaacctaggcattaccattcaggacataggcgtgggcaagggcttcatgtccaaaacaccaaaagcaatggcaacaaaagccaaaattgacaaatgggatctaattaaactaaagagcttctgcacagcaaaagaaactaccatcagagtgaacaggcaacctacaacatgggagaaaattttcgcaacctactcatctgacaaagggctaatatccagaatctacgatgaactcaaacaaatttacaagaaaaaaacaaacaaccccatcaaaaagtgggcaaaggacatgaacagacacttctcgtttctttttttttgagatggagtctctctctgtcgcccaggctggagtgcagtggtgtgatcactgcacctccgcctcccagattcaagcaattttcctgcttcagcctcctgagtaactgggattacatgggcacaccaccatgcctggctaatttttgtatttttgatggagacagggttttaccatgttggccagtctggtctcaaactcctgacctcaagtgatccgcccacctgggctgcccaaagtgctgggattacaggcgtgagccaccatgcctggcccacattttctttatcgaatccactattgatgggcacctaggctgatttaatgtctttgctattgtgaatagtgtgagcggaagaatttcatgatttgatttacattctaaaagatacatgggaaaaggtggacaaagggagatcagttaggaaattattgcactattcctggcaatggaagacagtgaattagcttattatgatagtaaaatatgtgagaagaagtaggtgggatatgggaatatttttagggtagccagtagaatcttctctcagtggatggactgaatacagggtattgaaggagtcaagaatggcctcaagatttttggcttgagtcgttgaaagaatggaacctgaaaaaaaaaaaaaagactgaaggatgagctttggagggagtctgtattttactcaatgttatctttattccttatttacatctatctctaaagtttacctctttttttaaataaatatttttaaatacctattttctccccaatatgcactgagaaataaaaatgaataagatacagtggctttattcccctcaaaattttgccacctgcaggggagataggactcacacgtggtacattacaaagcagtatgtatctaatagtataagaaagatatttaaaatgtgagaaatcagagaaaggaggcattcattgtaattggccctatcctcccctcaaaatgcttgcttttgttgagtacaagttcattacattggaaaaggagaatgctagcataataactttaactagttttttcactttgggtaaactgcctccttgctgtacctcaaaccacctccacaacaagcatgctttttcctcaagtttacctttgcatttgctgttccccttgcataaaccatcatccctgcaagagtcacctggttgctgtcttccttcactcaggtctctgctccgagtcaccttatctaagaagcctaccttgatttctttatataaaagaatgcctattccttttgcatactttttcttcacagcacttgccatcttctctcacattatatatttatttgctttattggctgtttccccacatgagaatgtaaactcagtgacaaaaggcactttgttttgtttaccactgtattcccgcaaggccaatgaattgcttaacgaattatttaataaatataggaattaaaataaaccatgggtttggaaagcaataagcaaatggggttggagataggactggactctgaacacagcgttggtttcagaagagagagaagacactagagaacagctctctgactaagctacatgcctctgtggcagcctggaatcttgggacacacggcttgcaccaggccactcttttggttaaagcaaaggttaaagtctggtgtattgggacaaactttggatagagatacagaatgtgatctacgtcaatccctactacttaatagctgtgggccttctgccagtttcctcatacaggatgagtatcccttatctaaaatgcttgggaccagaagtgtttcagatttcagaattcttggactttggaatataatataatataatataatataacataacataatacaatacaatacaatataatataatataatataatataatataatatagtataatgtaatgtaatgtaatataatataatataatataatataatataatataatataatataatataatataaatttacccaggtgagcatcccaaatccacaaatccaaaatccgaaatgctctaatgagcatttcctttgaacgtcatgctggtgttcaaaaagcatcagattttggattttagatttttggatttgagatactcaacctgtatatattttgagagtaatagtgtgtactctgccaactacatagggttattgcaagggtaaagcaaagataagccatgggacagcactttgcaaactgttaagaattctattatcagggtcaagatggcaatcagggacactatgacatggactacagtcaaaagatccaggaatgcctgccttggacagctagatcttctccccaggaggtgcctgagggagacatacacacaggtgacagtcacaaagggtaagtgaagttctacattattagtagctgggcttgggtcctaaatgccaatgtgagcgttctgataaactgacctgggcatgtagcccaggttaaaggcctccagaagcctctctttattcattaagtcactggtgacaaggactaaaacacttagcacactcagcgacatgtaagatcagtgttgaggagggattagagcaggcccctgagagggccattttctttgtgtgattttcaaaaagtacattgatctcatccattggaaattttggccccattagcatcctgtgttagtgtttcctcatccttactcttcccttcaatttcacttctcagaaagtggaatttgagaatttgttgcttcatccccaaacagttcagatttgcccttaagattcaagcataatgattacctgtggcacacattacctctactggagaaattatacttttgataagaataggcaaagtgatattacattcatatgttcatctcttgattcaaaactgacttggaaatcatagtggatggtgtgttaggctgttcttgcattgttataaatacatacccaagactggtcaatttataagaaaagaggcttaattagctcataattctgcaggctgcacaagcatggcattggaatctgtttggcttctgaggaggcctcagggagcttataatcatcgtggacggtgaagtgggagcaggcatgtcacatggcgaaagcaggagccagacagagagagtggggtggcggggaagggactgcacactcttaaatgaccagatcccctgtgaacttagagcgagagctcacttatcaccaagggcatggcccaagccattcatgagagatcttcccccatgatccaaacaccctacctcctctcccacccaccagcccccacctccagcattggggattacttttcagtatgagatttgggtgggcacaaatatccaaactatatctgatggtgtattaatccattttcatgctgctgataaagacatacccaagactgggaagaaaaaggggtttaattggatttacagttccacatagccggggaggcctcagaatcatggcacgaggcgaaaggcacttcttacatggcagcagcaagagaaaatgaagaagaagcaaaagcagaaacccctgataaacccatcagatctcgtgagacttattcactattacaaggatagcacgggaaagacgggcaggcccccataattcagttacctccccctaggtccctcccacaacatgtgggaactctgggagatacaattcaagttgagacttggtggggacacagccaaaccatatcagatggtgaacatagaagtgttcctgtgggtatatggccatgtttcttgccaaaacttcctgcatatgattctggttaattgcagtttctggaagtatcagctaatccttggcctaaagctatctttcccttttttagggtgagataagactccaggagttctccttggtatgatacaagcagaagggccctcttgccttcagttcttcatggttgtagtggatatcctccttcttcaagcccatgatgttccttagggaaggtagttctgctgtttctgtgccaagcctgggcattatgctcacgtgaaacctttttcccttgatttttgctacttctccagggcacttcctgggaatggggcttggtacctattaggactataaatttgcctctctctgacccctccaagctgagagaagtctcgcctttctccctgccacctctactccaccctgcagtccctttctgagggcaggctttctaggaagttctttgtcttcatgtagtttcttttttcttccctgtaaacataaatgtcccctagggtgaatgaacataaaggcctggccacaggctttgaaaaaggaagtgataatacacaaaaatcttcaaaattatctttctccagagattatttcaaaaacagttttattgaagtacaatagacatacaatagactgcacacattaaaaatgcacaagttggccagttttgacttacatataaacctgtgaaatcatcaccataatcaagataatgaccacatccatcactaccaaaagttgcttgtgtccctttatgattcctctggccgctcctccttcccccaggaaacaactgatctctttctgtcactatagattaacttgtttttgttttctaaagttacatataaatggaagcatacagtatgtgcttttttggtctgactttttttattaagcataattgttttgaaatttatccatgttgttgtagcatgcatcaatagttcattttattgctgaatagcaaggcatgatctagggtaggacaagtgaagtgcctagggttaaaatgcagtcagttccttatgatgataatcataatgatgatgactgtaaaaacatttaatgagacctgctctctgaacaagtttttaagtgtaatataccgtatcgttaagtataggcacaatgttgtacagtggatctctagaacgtattaatcttgtataaccgaactttatatccctcgaatatgaattcctcatttccctttcctcccaattcctggcaaccatcattctactttgtttctatgatttaggccatttttgatatgtaacgtatgtggaatcaggcaatatttacccttctatggctgggttatttcacttagaattatttctaccgggttcaaccatttagtcaaaaatgttaggatttctttctttcttcttttttgttcttttcattattattttttattatcattatactttaagttctggggtacatgtgcataatgtgcaggtttgttacataggtatacacgtgccatggtggtttgctgcacccatcaaaccatcatctacattaggtatttctcctaatgctgtccctcccctagccccccacccaatttctttcttttttaaagctgaataagattccattgtaggtgtatcccacattttctgtatctacttatctgctgatagtcatttgtgttgtttccatgtcttggcttttgtgaatggtgctgcaatgaacatggaagggcagatatctcttcaagatgctgatttagatcctcttgggtatataccagaagtgggactgctggagcatatggtagtcctatttttaattttttgaggagcctccatactgactgcatcattttacattcccactaacagtttataagggttccagtttctctacatccttgccaacatttgttatcttttgattttgttgatgatagtcatcctgacatgtataaggtgatatctcattatggttttaatttgcatttccctaatgattagtgatgttgaacaccttttcgtgtaacttggccatttgtatgtcttctttgaagaaatgtctattcaacttctttgaccactttaaaatcatattttttgtttcctatcaagttgtatgagttccctatatatcttggatattaaccttcaaatatataatttgcaaatattttctctcattccaaaggtcttttcactttgttcattgtttcctttgctgtgcggaagtttttgttgttgttgttcaattgtagttccgcctgtttttgcttttgttgcttatgtgtttggtatcatatccaagaaatcattgcttagaccaatgtttttttcatgtatcttcttccaggagttttatacttttagatatcatgtttaaatctttaatccattttgagttgatttttgggtacaatgtatgataatagtttaattttattatcttgcatgtggatatccagttttcccaacaccatttattaatgagatttttttttttgcccattgtttatttttgacactcttgttgaagatcagttgacctgtgtgggtgacttccaggctctctattctgtcctattggtctatatgtctgttttttcaggtaccatactgttttaagtaactttctaaaatattttgaaattaggacgtgtgatacttctgactgatttcttctttttcaacattgctttggatattttgaaactttttgtggttccatataaattttagggtttaaaattatttcaaaataatttctgtaacaaatgtcactgagattttgaaatgcaatcagttgtgaatccgtttcaattgttcttttttttcttacaatggtttctatttttctgctttgtcaaatgcctgataattttttatagtatgggacacacttacaccttaaaactttttgttagatggctgaataggaacagctccagtctacagctcccagtgtgagcaacgcagaagatgggtgatttctgcatttccagctgaggtactgggttcatctcactgggacttgtcggaaagtgggtgcagcccacagagtgtgagctgaagcagggtggggcatcgcctcacccaggaagtgcaagtggttggggaattccctttcctagccaagggaagctgtgacagatggtacctggaaaatcgggacactcccagcctaatactgcgcttttccaatggtcttagcaaacggcacaccaggagattatatcctgcgcctggcttggagggtcccacgcccacggagccttgctcactgctagcacaccagtccgagatcgaactacaaggtggcagcgaggctgggggaggggcctctgccattgctgaggcttgagtaggtaaacaaagaagccgggaaggtcgaactgggtggtacccatcacagctcaaccaggcctgcctgcctctgtagacgccacctctgtgggcagggcgtagctgaacaaaaggcagcagaaacttctgcagacttaaacgtccctgtctgacagctttgaagagagtggtggttctcccagcatggagtttgagatctgagaatggacagcctgcctcatcaagtgggtccctgacccccgagtagcctaactgggagacacctcccagtaggggcctacagacacctcatacagctgggtgcccctctgagatgaagcttccagaggaaggatcaggcagcaacatttgctgttttgcaatatttgctgttttgcaatatttgctgttctgcagcctgcactggtgatacccaggcaaacagggtctggagtggacctccagcaaactccaacagacctgcagatgagggtcctgactgttagaaggaaaactaacaaagagaaaggaatagcatcaacatcaacaaaaaggacatccacaccaaagccccatctgtaggtcaccatcatcaaagactaaaggtagataaaaccacaaagatggggagaaaccagagcagaaaagctgaaaattctaaaaatcagagcacctcttctcctccaaaggaacacagctcctcaagagcaatggaacaaggatggacggagaatgactttgacaagatgacagaagtaggcttaaaaatatcagtaataacaaacttctccaaggaagtttggaggatgttcaaacccatcgcaaagaagctaaaaaccttgaaaaaagattagacgaatggctaactagaataaacagtgtagagaagaccttaagtgacctggtggagctgaaaaccatggcacgagaactacgtgatgcatgcacaagcttcagtagccaatttgatcaagtggaagttcaagtgaatgaaatgaagcgagaagagaagtttagagaaaaaagagtaaaaaaaaatgaacaaagcctccaagaaatatgagactgtgtgaaaagatcaaatctacatctgactggtgtacctgaaagtgacggggagaatggaaccaagttggaaaacactcttcagggtattatccaggagaacttccccaacctagcaaggcaggccaacattcaaattcaagaaatacagagaacgccacaaagatactcctcgagaagagcaaccccaagacacataattgtcagattcaccaaggttgaaataaaggaaaaaacgttaagggtagccagagagaaaggtcaggttacccacaaagggaagcccatcagcctaatagcggatctctcagcagaaactttacaagccagaagagagtaaaggccaatattcaacgttcttaaagaaaagaatttttaacccagaatttcatatccagccaaactaagcttcataagtgaaggagaaataaaatcctttacagacaagcaaatgctgagagattttgtcaccaccaggcctgccctacaagagctcctgaaggaagtgctaaacatggaaaggaaaaaccagtatcagccactgcaaaaacatgccaaattgtaaacaccatcgatgctaggaagaaactgcatcaactaatgagcaaaataaccagctaacatcataatgacaggatcaaattcacatgtaacaatattaaccttaaatgtaaatgggctaaatgctccaattaaaagacacagactggcaagttggataaagagtcaagacccatcagtgtgctgtattcaggagacccatctcatgtgcagagacacacataggctcaaaataaagggatggaggaagatccaccaagcaaatggaaaacaaaaaaaggcaggggttgcaatcctagtctctgataaaacagactttaaaccagcaaggatcaaaagagacaaagaaggccattacataatggtaaagggatcaattcaacaagaagagctaactatcctaaatatatatgcacccaatacaggagcacccaaattcataaagcaagtccttaaagacctagaaacaaagagacttagactcccacagaatcataatgggagattttaacaccccactgtcaacattagacagatcaacaagacagaaagttaacaaggatatccaggacttgaactcagctctgcaccaagtggacctaatagacatctacagaactctccactacaaatcagcagcatatacattcttctcagcaccacatcatacttattccaaaattgaccacatagttggaagtaaagcactcctcagcaaatgtaaaagaacagaaactataacaaactctgtctcagaccacagtgcaatcaaattagaactcaggattaagaaactcactcaaaactgctcaactacatggaaactgaacaacctgctcctgaatgactactgggtacataatgaaatgaaggcagaaataaagatgttctttgaaaccaatgagaacaaagacacaacataccagaatctctgggacacattcaaagcagtgcatagagggaaatttatagcactaaatgcccacaagagaaagcagaaaagatctaaaattgacactctaacatcacaattaaaagaactagagaagcaagagcaaacacattcaaaagctagcagaaggcaagaaataactaagatcagagcagaactgaaggagatagagacacaaaaaacccttcaaaaaatcaatgaatccaggagctggttttttgaaaagatcaacaaaattgatagaccgctagcaagactaacaaagaagaaaggagagaagaatcaaatagatacaataaaaaatgataaaggagttatcaccactgatcccacagaattacaaactatcatcagagaatactataaacacctctatgcaaataaactagaaaatctagaagaaatggataaattcctggacatatacaccctcccaagactaaaccaggaagaagtcgaatccctgaatagaccaataacaggctctgaaattgcggcaataattaatagcctaccaaccaaaaaaagtccaggaccagatggatgcacagctgaattctaccagaggtacaaagaatagctggtaccattccttctgaaactattccagtcaatagaaatacagggaatcctccctaactcattttataaggccagcatcatcctgaaaccaaagactagcagagacacaacaacaacaaaaaagagaattttagaccaatatccctgatgaacattcatgcaaaaatcctaaataaaatactggcaaactgaatccagcagacaacaaaaagcttatccaccacaatcaagttggcttcatccctgggatgcaaggctgcttcaacatatgcaaatcaataaacctaatccgtcatataaacagaaccaaagacaaaaaccacatgattatctcaatagatgcagaaaaggccttcaacaaaattcaacagcccttcatgctaaaagctctcagtaaactaggtattgatggtaagagctatttatgacaaacgcacagccaatatcatactgaatgggcaaaaactggaagcattccctttgaaaactggcacaagacagggatgccctctctcaccactcctattcaacatagtttggatgttctggccagggcaatcaggcaggagaaagaaataaagggtatttaattaggaaaagaggaagtcaaattgtccctgtttgcagatgacatgattgtatatttagaaaaccccatcatctcagccccaaatctccttaagctgatcagcaacttcagcaaagtctcaggatacaaaatcaatgtgcaaaaaatcacaagcattcctatacaccaataagagacaaacagagagccaaatcatgagtgaactcccattcacaattgcttcaaagagaataaaatacctaggaatccaacttacaagggatgtgaaggacctcttcaaggagaactacaaaccactgctcaacaaagtaaaagaggacacaaacaaatggaagaacattccatgctcgtgggtaggaagaatcaatatcgtggaaatggccatactgcccaaggtaatttatagattcaatgccatcccccatcaagctaccaatgactttcttcacagaattggaaaaaactactttaaagttcatatggaaccaaaaaagagcccgcattgccaagacaatcctaagccaaaagaacaaagctggaggcatcacactacttgacttcaaactatactacaaggctacagtaaccaaaacagcatggtactggtaccaaaacagagatatagaccaatggaacagaacacagccctcagaaataataccacacatctacaaccatctgatctttgacaaacctgacaaaaacaagcaatggggaaaggattccctatttaataaatggtgctgggaaaactggctagccatacgtagaaagctgaaattcgatcccttccttacaccttatacaaaaattaattcaagatggatcaaagacttaaatgttagacccaaaaccataaaaaccctagaagaaaacctaggcaataccattaaggacataggcatgggcaaggacttcatgactaaaacaccaaaaacaatggcaacaaaagccaaaattgacaaatgggatctaattaaactaaagagcttctgcacagcaaaagaaactaccatcagagtgaacaggcaacctacagaataggagaaaatttttgcaatgtacccatctgacaaagggctaatatccagagtgtacaaagaacttaaacatttataagaaaaaaaatcaaacaaccccatcaaaaaatgggcaaagaatatgaatagaaatgtctcaaaagaagatatttatgcagccaacagatacatgaaaaaatgctcatcaccactggtcatcagagaaatgcaaatcaaaaccacaatgagataccatctcacaccagttagaatggcaatcattaaaaagtcaggaaacaacaggtgctggagaggatgtggagaaataggaatgcttttacgctgttggtgggagtgtaaactagttaaaccattgtggaagacagtgtggcgattcctcaaagatctagaagtagaaataccatttgacccagcaatcccattactgggtatacacccaaaggattataaatcatgctgctataaagacacatgcacatgtatgtttattgtggcgctattcacaatagcaaagacttggaatcaacccaaatgtccatcaatgatagactggattaagaaaatgtggcacatatacaccatggaatactatgcagccataaaaaaggatgagttcttgtcctttgtagggacatggataaagatagaaaccatcatttgagcaaactatcgcaaggactgaaggccaagcaccgcatgttctcactcatgagtgggaattgaacagtgagaacacctggacacagggcggagaacatcacacactggggcctgtcgtggggtgaggggacgggggaggaatggcattaagagaaatacctattgtaaatgacgagttaatgggtgcagcacaccaacatggcacatgtatatatgtgacaaacctgcacattgtgcacatgtaccctacaacttaaagtataataaaaaaaaaagagaaaagaaaaaaaaaaacttttgttgcttatccgaaatttaaatttaactaggtatactctattttatctggcaatcaggtgtcctgagactctagcttcctttacttctctggactcccatttttgtctcctcaactcaggaaattctccaggctctgcctgagttcccactcattgtgttgtatcctggacacactctcatgccagtaagctgatgccaccgtaggggtcaacttttttgtttcctgactctcagattgttgtccttcgttgtcagatgctcattatcttaaaacataatttttcatatattttgtcctttttggttgtttcacactggagagcaaatctggtctctgttactccgtctttggttgaaagtggaagtctgtatccagaagttattgtttatagccaggagccagaacatggttctaaccagggccaaaaatgtgtgtttgatcccttcataggtgagtgtgtagtttctttatagtttttatgcaattaactactgaaaaaaataattctttgggtcataaaggcgcctggtgattatgagggttcctcactactgtcaggaaattgattagaagtaaacatcttctaataagagaatgggatgggccactggggttattaccaagtacaaagcataaattggcacattacattgtattacattgattgtcagagtttgaaccaaaatatagatttggctgggggtcaaatctcggaggcccaaattgtatttggagtcagggccaggaagacaagtctgatagagtcagggtgatcaaactggggccatagaggaatttaggaagatgtaaattctcttattccttgttcaatattcagtgatattcttcctagggggcttggaaataaaaataaaaccatgtcctctcttttctctttggtttctcttggtctagctatatgccgctatcctctgggcatgtcaggaggccagattccagatgaggacatcacagcttccagtcagtggtcagagtccacagctgccaaatatggaaggtgaggatggttacatcaagaaagcccatgttctggggttgggcagatttcctgggcacagattcctgaccctaggggctggggaaggtggtgttattggcaggaactgttgagaaatgaaggacagacagcaagtgggcctgtcctgctctgtatgttttcagggagagaatttaggacttagccacatgtactggtctggcagccccatctcaaccacagaggccccagggccacattacccacagtgaatgggttcattgataggaagtggatttgctttccctgactttctcattgtgagctgctgcaggaggcaggcaacagtggcacctatgggaaggtgcagattatgtaggacactgggagttagcatccactcctcttctcagtgggtctatgaaacatcactcactgcaaagcatcactcactgccaagcatcaagacactgaggcctccaacaagttctccacctctctcaaggatctcttacacagaagggccatccttgccaacagacagagtgtggcagtttcctggggcgattgatttcaggggtcttgtacatcaataaactccctactgctctactggttggacccaatactctacctggaatcttattattttgtgaagtattgattttattaaaatggaattacccataagaaaatgaatcctgatgaacctttccccttaatttcttagtgtatgaaagactagagtgatggtaggtggaattggaagggagcaacaaatgaatgggtaatatctgtgagaaaagggagcaatccaagggagaggaaaagtggtagggagttctcaaagtaaactttataataatttcacaattttgctcagtggtagctcagcctgaaggtaataaaatgaaaccagattatttactacttccttgacatgctcttccccctcatcctccccatgtgtttctatggctccttgctggtctgcaatgcccatcctgctgcattgcataacccacactggagaccctactatccctcctccctattgccataacttgatgtccaagcaaagggtggctagctttgttaggctgagtttgaaagagggaagggaaatatgaaatgactcatgcgggaacagagagtaggaagagttttatttctctttatgcttctaaatcaggatgggaagtgaaggctatgtgtgatctgaaggcctcagctcactgtctttcagggtctcatggtactccagggaaagggatctgaccacaaatgggtactgtggtggcagtgaaaactgtggcaagaacccaaaatgtttataaggacagcctgctctctcccctcagtacagggcagctgcttgcctgtgaaccagtaaacagctctgtggtttcatggttgctccctctctccccaaccctcacctctcaaggctggactcagaagaaggggatggagcctggtgccctgagattccagtggaacctgatgacctgaaggagtttctgcagattgacttgcacaccctccattttatcactctggtggggacccaggggcgccatgcaggaggtcatggcatcgagtttgcccccatgtacaagatcaattacagtcgggatggcactcgctggatctcttggcggaaccgtcatgggaaacaggtaggaagaagagacatccagatcctggatgtccaagaccatattttgacttaggctaggagaagaagggtacaggttttctgtgtggatatgtgtgtccacagaccaggcatgcccttgtaaatgtgtgacccagggtgagggaggcagggaaggaatatcaaggctgtggggaaagcagagtagatgcattctgctcctcgaattaagaagagagagtccatcaaaaacgtggtggggtgaagaaaagtgagcatgatttaataccacctcttcactcattctcttctctctcctcaggtgctggatggaaatagtaacccctatgacattttcctaaaggacttggagccgcccattgtagccagatttgtccggttcattccagtcaccgaccactccatgaatgtgtgtatgagagtggagctttacggctgtgtctggctaggtaggtcactagcccaggaagcctatagactttattaaaaactccaacttctgggaaatgaaggcaatcaaatcagaaagggatgggatcagttactcctggaatggtgatgccctcttgggaagaatagagacagaagcattgctcattaacccagggcttagggccccacactgagtcatgcattcagagtcattacgttgactgccatggaggggcactcctccaaagtcttccctcggtgtccagatggagtcctgctggacacgctgtgcaagcttatacccttgaaactcacatagttccctgaggtaatgggcctgagcagtaggcactcacttggctgtgtttcctttgcagatggcttggtgtcttacaatgctccagctgggcagcagtttgtactccctggaggttccatcatttatctgaatgattctgtctatgatggagctgttggatacaggtaaatcctgggaaactttattagaatgggaaattggccactaagaaagaataatattttatcatgtcttgggatcaataatcaatcaaccaatcagtatttatttagttcttgtacaaggcatttggaaataatttagatgaaggaatacacatgacctttatttccagggaacttaaagcccggtttgggaagacaagttaattacccagaaaacaatcaattacacaaagtaatggctaaagtttgtgatatggctctaagtataatagccatatttttgaccctcaaaacaggacatgtagtctgacacaaatattgacctacttatggaaacaaagggccagagaattgaagtaataagtataatactctgggcaagtcaagaagtcagaaagaatagaccttatacatataaatgctttgaaatttgtaaaaaggggactagtaagacttacaatagacaaggaaagttctaggttaagatgagaattgtagcagaggaaggtaggtagaaggtagcagaagaaaggaagcagggctgaaggcaagactgacctggctatagtagaagctggagttgagaagaacagaatggaacaatggataagcctgaagtggatcaaaggagtgccatggcaaagaagtgtgaccagatatagtaggaacttagggttgggtacaggatgctcccacctatactgtttcacttcaagcctttaagccttgccattcttctagcccacactaacacttttctctctaagcttggtctgcatctgcaaagtgagcctgggagagaattcagtccatcgtgaagaccagaccagatgatggaggttgacagggctcgagagaaggagatactagtgagtctcaggaagggagtgtggaattacagccttctactggcttaggtgtggagaatgaactattgccctctagctgccatcccctgggtgaagacctgattcatccactcttctactcctagtcacttcctttccatcttcttaatcactgttctttcctttttgcttaaacggtcttggcataatttcgctcagtcacaccccaacaggcatgtattcaaggcacagaggaaatcagagatcaaccgaattcagtttaatttaataagcctttgttaatcaactgttactatatacaaggaatttggccaggcatgttaggtattcaaaggtaatggagtcattgatcctacctttaaagtgctcacaatttggagtaggggctaaaacagaatataagttactatgattcaagtatatgagcaagagatagcctatgactgctctggggttcaaaggaaaaagtaaactatagtaggaaagcacaaaaatggggatgaaaacatctggatttcatataataaaagttacttctgtttgctacaaggcttaagggattaaaatgtgtgtgaaaagcatttcgtaagataaattgctatgcacatataagttgttatctgattatcatttttctgactgaaggaccagtaaagatatggtagaacagatgaaatctgaactgggtcccaaagaatgggtagtactttcacaggtgcagaatcttgaaatggaattttaggcagagggaataatagcatgaggaaaaaagaatcatggttataaagtttaggggactgtctgggagaaatcaacagtttatttaaccacgggccatatttatgtggcaaagtagtgcaggagaagcaaaacaaagcagattatgccatattttgaaggaacctgaagtcaaagccaaaaggagcaagaagtggaggaggaggaagaggagaaattgctgttcttattcttcataaacattatcattaatgtaatgagtcattgaagatttttaaagctgaggaaggacatgattggagctgtgctttagacagattaatcaagcagcatgcaaaggttagattggaatggaatgaggaggctatgaggaacattttaaaactcttagttctgccaagtaaaaagaattaatgaccaaggccataaccgtgactgtggggaatgaggaaaagatattcatttaggatgtttgaaatctgattggatgtatgaggcaaaacagtagggtgagaaaaagggtcagatgaagtttgacagtctaagtgactgaaacaatggggatgacatttatttattcgacaaatatattttgagtgcttaccttgcgccaagcattttccattactatgaagagaagtataatttatggaaaagggaaaccaaggagaaagacttagttcagtaggggatgatgatggatttagtttggagtgtaggtctgtgagactgagaagacattcagtagagaaataaggaaggtagccggaattatggctcttaactccaggggaaagataaaaaaaattacaaaaatgtagacatcattggctttcatttaataattgaagtaatgaaatatctggtggaggtggctgagtgaagagatcctctcagccactgagagatgacatcagagtctcaggaaatagtcatattagcaaaagttactttttaaatttaaaacaatttcaagaataatatatgcttactggtgattttaataactctaaagtatataaatattgaacatttattttcttatcccttcttcacttgatttaattttgaccaagggggaactgaacaggcattccttttaatttctgttgcttttcataaaactttcctgggatttatttttctgaggataatgggaaatatatttattgcaagtaaacttacgttctcctagctttctgatctgtagagagaagaaaaagatggcaaaaccttggaagggagatccaggctctggtcactgtggataaggccagtcaaattttataatttaccaaacattttcaatgattaaatatattttaaaaggctggcataatcacccttagtatttttttattttttgcgattcacaaattttacatattattgatctagctctaaacctcaagggtcacaccaattattgcttgagggtgagtatcccaatctcgtcatttgggaaatttgtgtcatatctgccagagcttgagatgcagagcttgaggaaagagaagttccacatgatggtttttgctctgtccctccataaaaagaaggaaggagcctcttcgtgttctctaagtagtcaaataagcatacatgcagttatattccatccagcagtcaggcttctggaaaactcagcctttaaaacagagcctcttactcagaagtcaaaaaagcctgctaagctagaacacaaaactaaatccaatacctgggattctcatgaaatccttgcatcttacttcctgggtctagtatcctacaaatttaattagaattaaatagaaattattatttaaatttagagcttgtattttcccccttagtttaatatcaaactgggttgttggatatgtggaatagaagagagtgtgactggattctctgaaattgattcactgaacaatgacaatatgtagttaaaggagagtcagcaccaagctctggaaacatttatatgatagtggggcaagtgctactatgtatggtagcattcattctatgcatttatccatttcctcatttactctatgaattagttcatcaaatgcatttgataatattaagtcattatgtgaagacatattcagtatataagaataggcaaggtgcaataaattatagaaagcttttcatattaaataagacattgtttaaaagttttactactaaaggagtaagcatcaaatattttataaaaattactaatatgaaattcttagttctccattgatgcaagataaacgagtcaatactataatgcaaatctgattatttacaatccttcaattccaagataataagctcatacaaaatctggagtgaagatgccgggtaaaagctcttccacgaatgtgtggttaactcagatttctctctccttttcctcctcttctcctggcctgagcagcatgacagaagggctaggccaattgaccgatggtgtgtctggcctggacgatttcacccagacccatgaataccacgtgtggcccggctatgactatgtgggctggcggaacgagagtgccaccaatggctacattgagatcatgtttgaatttgaccgcatcaggaatttcactaccatgaaggtcagtggggtcgggtgtggtggaacttctttaaggaggcacaaatcatagtgtggtagagaaaaggcatgctagaaaaaagtctaggctgatgccagttcaatgacatattctgttactaactagctaaatgcatttcacaagtcacttcatctctaagggcgtgattctccatttgtgtgtaagggagttagaataggtcagtgagctctcttttttttgttgttttgacactaaaggtgacatatccattaagccaataacacagtgtccagggcccacagatttttaagacgcataaaaatgctctaatttcttttaatatcaggtgaaaaaaataaatttttagggtcaaagattatctttttaccagcacagttgtgtgtgtgtgtgtgtgtgtgtatacacacacaactatatatatatacacaatgatatatatatatacacaactacatatatataaccatatatacatatacaactatatatatacatatacaactatatatgtatatacatatacaactatatatatgtatatacatatacaactagatatatgtatatacatatacaactagatatatgtatatacatatacaactagatatatgtatatacatatacaactagatatatatatgtagttggtgttctgcagtcttctgaatttttccttctaggaacctcacagtggcagtgatagttggtcaggccttataaaacctgggctgcaaccctggttacctgtatgcactgtctgcccttggccacctcacttcatgttgctggactgcagttttctcatctgttaaatgaggactgcaccagcatcttctcagcccttccttgccttgaactctctcgagtctataatcctctcagccgcagttgccgtctaccctgattcgtgtgtgtatctatacacatagatacatacacacatatgtgagaatatgtgtattctcatttagaaatgagatttctaaaaaaaaaaatgaaattgttttagattgtacactattttgggtttctcacctagccctgtgaaaagaagaagactggctctgaaatgtacctaggaggaagcaggatggcagtcttcctcttacctcagttcagaatagctcgaatcagggtagacggcaactactgagttggctggcactgtgtctccatgcaccttagcagggccaacctatcactcacatgcctctttctctaccaggtccactgcaacaacatgtttgctaaaggtgtgaagatctttaaggaggtacagtgctacttccgctctgaagccagtgagtgggaacctaatgccatttccttcccccttgtcctggatgacgtcaaccccagtgctcggtttgtcacggtgcctctccaccaccgaatggccagtgccatcaagtgtcaataccattttgcagatacctggatgatgttcagtgagatcaccttccaatcaggtagggagctcaggtcctctttgggaagtgggagcaaggtgatgaaggaggaatgcacatgcccagaacttctcattagcaggtctctgagaggagtgggattgtacaggcagcttctcattgacggatacggtgaatcctttgtgtgactagttttaactgtggaggggatgggatgagaatggaagtgaacaaaatatgcacgtaactcttcttagaaagaatgtttttaaatgagagtacagtgtgttaaaaattttatataatttaaggtagttaacgagtgcgctgttaaggaaaagcacacctaagcattactgagatatttaaatgaaaatttctaaatatacacaaaagtaaagagaacaataaaccactcatcactcagctttactaatcattgatattttgccatatttgtttcacccattccttccttttggctgtagcattttaaagcaaatatgagatactacttgatttcattagcaaataattggactgcatctaagaaaatagcatcattttcataggtataatgccatgataacatctaacaacctttattattaaataatttcttaataccacccaatatcctgtccatattcaagtatgactaactgtccatcaatgtcttaattcagttgactttatcaaataaggatcaaaataaggatctgttggtgagtttctttattctatttgctctgtgtctcttttaatctaaaaaattccttccatttttatttctttttaaatggattctggcttggctgatggctttctgtggtgtcattttacttgagcttctgttctctgtcattcctaatgactggtgcttacatctacaggttaatttgattccagttcaatatttatttttgtcaagaattctttataagcattctatatatctcagtaatgctgtatattttatgctgaacttcatcatggggatgtaatgctagatcctctcactttttgtgatactaagattgatttctggttcctcatgaactttttccctaagttttatcctccatcaataaccactgtctgaattatttatttcactagggttgctaaatgacgattttctaattcttttattttttctgcatttcttagctgaatttcttccgaatagagtaactattcttcatcatgcaccagtttactcagaaatcacattgaaagagcagcatacgtgacttatcttcccctttaattgttaattttcagagtaatgacttgataccgtagcaaccctcaataatgtctaattaattttggtttttacccttatttttttggtatcattataaactcattgctttttatcaatttaatgcttaatcgattgcagttattattattagtagtagtatgtttatttttagacagagtctcgctctgtcacccaggctggaatgcagtggtgtgatcttggctcactgcaacccccgcctcccgggatcgagtgattcttctgcctcagcctcccaagtagctgggattacaggtgcctgccactgcgcctggctagtttttctatgtttagtagagatagggtttcgccatgttggccaggctggtctcgaactcctgacctcaagtgatccgcctgccttggcctcccaaagtgctgggattacaggcatgagccaccgtgtctggccattattctttttaatactcaagttgtgctgtctttgactagagtttgcatttttttttttttgagacggtatcttgctctgttgcccaggctggagtactatcttgagtcattgcaacctccacctcccaggttcaagtgattctcctgcctcagcttcccaaatagctgggattacaggtgcctgctaccacgcccggcttttttttttttttttttttttttttttttttttgcatttttagtaaagacggggtttcaccatgctggccaggctggtctcgaactcccaacctcaggcgatccagccgcctaggcctcccaaagtgctgggattacagatgtgagccactgcacccagcctagagtttgcatttttaagggggctctttgctcttttgatctgaccctagaagcctttgataactttcttgttttccgaaagaacaaggtatttcaagctcattttgaacatgtacagcacccgacgtggaatcaaccatttcaagaaatcttgattccttttagtaggaaatggtatttagaaaacacaaactgggtagtagggatgctcattactaataggttgtcattgtttcttggatttttcggtggaagaaagcaatgaaatatgtatatttaaaaagaaagattgtgagtttacattgttacttccaattcaaattaaagataaggtttttatttaaagttgattttatacgttcatctctattatttatgctaaatatcatgtttcctaacaatgttaacagcattttcttcatcctattattcaaaaagcaataccaatattattactagcaacgtaactattgaacattaagatttcttagcaattctcttttctttgtcctgagaatatatcctactaagaatgtgcagtcaaagcactatgttctaaggtcagttgggtaacagtgggataattcttttctgtatatagttatatcaccagtgtggtatacagttagggtaacagtgggataattcttttctgtatgtagttatgtcaccaatgtgatatacagttaggttcattgtattccatttgtttcaacctttagggattccttttaaactttaaacactacttttgattgaacagtaactgcagcaaatagtgatttaacttactacagccagaaactgtgccaaatcttgaaaagttaaaaggtgtttagaacattgttcataccattaaatttaaatgggaagatgaaagatacagaatgctttaaaaaaaaaaaaaaaaaaagaaatgtccaaagcaatatgaacaataaatggtcaggaggagagaggcactagcgtgggtttgtcatagacagcatcaaaggaatgagacttgtactgggcctggaagaaaagtccaggtgtaaaataacataaaagagaggaagagactaatttaaagataaaccacactttgggaggccaaggcaggaggattgcttgtattcaagagtttgagactagcctaggcaacatggcgaaatcctgtctctataaaaaacacaaaaattagctgggtgtggtggcacgtgcttgcagtcccagctacttgggaggctgaggtgggaggatcacctgagccctggaggcagagcttgcagtgggtcgagattgcaccactgcactccagcctgggtgacagagtgagaccctgtttaaaaaaaaaaaaaaagaaagaaaagaaaaataaatcagaagaacccatcctttcagatttgatttttaagggaaaaaaatttcaagatggtttgcttattaagatgtactgataagaaaatagagcatatttttaggaaaacaggtttggtgtttaaatgccttctgtgctaatgatttaatctaagagtaagttgattgattgtttcatctgaatactgagagtagaaatcaagatgctcaaagtcagtgccacttacactgtaagtgttaactgggggacaaatagattcccacccatcctcagggattctcctggcatagtaactggtacacttattatagctaattatagctatgaaccatggtttttactcctggggtctcttgagctttaaatccaatgcataataatattagttttcaccggagcctgacagccgaactccgaaagcacatgcagaggccagatacctccttatttatataataatattaagaagaagaaaaattaggatacctggaagaaatgtctcttagaaaggaaatacatattctaattcttgacccccttgattagacaaatcagagggaaaaactctggcaaagctgccaacatcaatctggcaaatacgcttttgtggtttagtctcaaaagctgtaaaatcacagaaaaagacactccaatgtcagtaaatatctataaagattaagccttaattcataaattgaagggctaggccgatgaggcatagtggagactcttttataaacaatctaatatccttgaaggaaaaagcatcttaacactatgtctgtcccttgcccatttacccgctatattctgtctatattttcactgaatttgggtcctgcttcttatgctttatgacaatgtgtggtacagccctttgaatcactgtttcttaaacttttttgtaccatagcatctagtatgtaatatgtgaaacaaaaattttacaaaggaaaacttgcttttactatttagataaatggtgattttttattcaacgtatttatgattttatctttttaaaagactgatgacaactcactaaattgatcttgtaatgtgctaggtcacaatatgccttcagagaaaacactagctgtctgtcttctccctggctctgactcacccttgttttataacagatgctgcaatgtacaacaactctgaagccctgcccacctctcctatggcacccacaacctatggtatatgtgattcctaattacacaaattaatttgaagggacttactgggggatgaagaagggtggagagttgcaaagccctggctgtgtgggaggctttacaccagttggctttggatgaagagtagccctggaaaggtaggactgtctacctccaagttatggatccaaatatactctcttcactatggattcatgtgcttcttcagctgaggcagagtctggagttgtcctaatttctccatgaaagtttgggaatttggggtcagaaacagggaaagggacattcctgggtcagacccatagtgggtatttctaaggaggggtggaaatcaaagaaacaaaatgctgatatctccaattggagataaatatgccatgtatgcattgctttaggcagtcattggtgacactagccagcaatgtgggaaacatgtgggattgaatgtgtccaaagaggactttcagctaccttggcatgtctcaaagaatgcagagagtgaaactggttcctcacctgtttttcatgaggtgtgattaagggactacagactcaggccataataatacagagacaaaattttgggaagaatagaaaaactcaccattactctgtctgacacatggagagggggagactactgtcttatggaagagggaaataggataggggaacaaagtaataaacagattgggcgtggtggctcacacctgtaatcccagcactttgggaggcagaggcaggcagatcatgaggtcaggagttcgagaccagactggccaacatggagaaaccccatctctactaaagatacaaaaattagccgggcgtagtggcgcatgcctgtaatcccagctactcaggaggctgaggcagaattgcttgaacctgggagggggaggtttcagtgagccaagatcatgccattgcactccatcctgagggacagaacaagactctatctcaggaaaaaaaaaaagtaataaaacagtagcaagaaaacaaaacagtagcaagagcaagaataagcagaagtattaaggtggcatcttccataattatcctcaaggaacagggtctacctccatgtttccagttcagtccctcatacttttacttgacctgtgagatgattgtattctctgccttctctccctggtcacagatccaatgcttaaagttgatgacagcaacactcggatcctgattggctgcttggtggccatcatctttatcctcctggccatcattgtcatcatcctctggaggcagttctggcagaaaatgctggagaaggtgaggaggtgcagaatggtcatgatataagaaactgctcctttctttcttaagccactgttgtcccaggagtaaaaggcaaattgcaaacatttattaatggttggaattaactgaggctaccaagaaacataggaatgaagccagaatagaattagctaagtctattttctcatttttagagtggagatgttggaaccttcctaacgttcctcggaaatgcagaaaactcttcttaatacattgaatctccattcaggcattttccttgaagattctgattcactggattttgggtagagtccaggcatccatatttaaaaaaaaatttaacaagtgcttctgatgcacattcgaggttaagaattactctcctaatgccaagctgaaatttctgataatgctgttgaagttccttctcatctttttcactttgcttgtctgtttggtgtgtgtgtgtgtgtgtgtgtgtgtagaaaaacatccagcttcattaatattcaagccaagtttctcactattctatttctacttttgtgtacttgaaggttgtgattatgtatccctctgagtccctcttcagactctgtctatgccaaatgatctgaataactttttacattgtctaacactttacaggaagcagaatttttcctcatgcataattttatatacacctcattgagtaataactcataggcattgttatgtttaactatttttctgatgagaaaatgtgatgtgcttaaggtcatacaactgatgtccagtcttctatgctttttccaattgttaatattgaaatgcattgatttctttcttcaaaactatattcatttcatcaaagatggaatatctatgacttgtcttggtttcttggaccaaatagcaactcccttggaccaaatagcaactcactgctgcttagtgtctgattcttttggggcctgctgacgactaagtgtttctgcctttggccatgatcacctctcctggtcaattagttcctctcaatagacatggactagtagaggccacaggaactctgagctgtggggctttgaactgcctcctgagggcagggaataggaaggaggagaaatcctgattgatttctgtgtttgggggtggggactcagaggagaccaatgcctgtgtggaacctctattccagaggagaggaaagggcaccatgagaatgggcttgagtctctagagctttctagatgcaggatgggagaaaaatggctcaaatcaggggtaaggaggagcaatcctgatgagtagcctgcaattccttctgatctgtgccaccctcaggttcctgagatggttgatgtttgttttaaggtttttaggaaggaatatttcatggaagagaaggtctccttgcttcccacaagtatgtctaccagtctgaaaacacttaaagctttcaattcgcaaatagcaacagaagactgaaatacagaatccacagagactcactcgctgtcacgagtatgtctcaaggcatgaatgaggcaaatatcaaaatttttcctcctttagaatgctggaaaacactagtgtttaatgaggtattccagagtgagggtggtggtgaactgaaggttcattgaactgcttgaagaggatatgtgaccttcttaaatagtctgttaggaccacattttagccaagggggaaagtctgtgttctctgctatatgagctctttttctctttatttgagccacaatttaccatacttctctgagtctttattctgaggcctgttggaatatcttcatgggctaagagagaaatgttggaatctccaggtaaaaggtagagcaaacattttgcccttgaatatttaacttggtcctccaagaaattctacccctgtacatcctgagtaagatgactcaaggtgctctggaatgacacccagtgtttcttcctgggaacaaaattttatgtggaaaatcattaagtacacacatacattctaagaacattacttaacatagctgtagactgtatgtagcattatttgtaggataattttggtggtgtcctcaacattccttctttgagagatttaacccacatatattgagtacctactttgttctgagcttcatgcttagtactggggatattactgcaacaaaagaccttcagtctagtggaaaagtgcacatctaagtttcgccattgagcaccaaagctgtgtttgttggagtggagcattttacatgtttaaacccaaatagtcacatacatgcaaatgctggcatttgccttttgatggagcaggcaggttatattagataagataccacagaagtagttgctttgttgttctccctcccttattaggtgtaagtcacattgttatctctggacacccagggctttcctgtcccatgttgtagccattttatttttggttagtgaaaatatgggtcagtggtgggtattatcctaatctagggtatcaaaatgatcaagtagaactactgattcatcatgttatagcacatgcattaagttaataaacaatttatgtctattccaaaaccaagtagttaaagggtaagccaggaaaacccatcatttaataaaacatagaaaactctataagattgagatctttggctactgatgggttcttatagcaacagggagataatcttttttttttaagtgtttcagaaagcacatcatagaaattagaagatcaaattctaccttgaagaaatgaaggattattctaagttcctacaacacaggcatttgtggaaccagactgcattcctagcacgtgcagtgttgctggggttaaacagtagtaaagagttatttcatttgagtgggagagctgagtttaagaagaggaggcattgaccatctcttttgtgccaacatgcctttctccttgctcttctcttccaggcttctcggaggatgctggatgatgaaatgacagtcagcctttccctgccaagtgattctagcatgttcaacaataaccgctcctcatcacctagtgaacaagggtccaactcgacttacgatcgcatctttccccttcgccctgactaccaggagccatccaggctgatacgaaaactcccagaatttgctccaggggaggaggagtcaggtgaggatgatgtggtgggcagggtgtcaagggagaaacctcagcaagcatcaggtaggtatgacacgcctgctcccagttcattgcatctatttttagtctctgctaacctcctgagaagtccacattctctttctagatttggtctgccgctgctcctggcctaatttgagcaactctcctttgctactgaatataagatgtgtggagggacccacataccagaaaagaaagaaaaaaataataaaacatgtgaattaggtgttgacaccagaagaacctaaacagtccaaccagtctaacctcattttacatgtcgggaaagtgagaaagtccagatagagtactcacccaacaccaaatttcatgagtgggtaaaggcaggactagatttttacctggagaaataaataaataaatgaagctaaagacattccaaaattcccagtggtgtagccatttaaataactaaaataaataactacttgagttatctattttttgtgaatttctctttggtaaacgtttattagagtaatatgagattttattatgagagtaaaacatttctcaccttttctcaataaaagcattgaaataaaacaataaaacaggtaaaacagtaagtagtgtcagttgattcaaatttcgatgtctttcaaaaaatgatgcagagtcatatcagaagggaagctggagtcacctctttagctcagagcaacttttctataagatcatcaacctgagggacccgagtcagtagaaaagaacttgtagtgttcaggagagaggagctaggcctgagctggatgtagaagcagacaggactaaattcaagagcataggattttataggaaggagcctgaaggggtcttttcaaaggataaaaggaaacttgcatctattttattattcaatggatagaagacatgaaagagcatgctaaattcaagtaatttcacagagacagcaagaataaaggatataaactaatttatttcttggggtgaatggaagtaatttacctatttcctaagtctaaaacatcccccacttcatattttaaggcttttttaagttagaatatgtcttaagctagatcatatgtctttaatctgaaagttttttatacctaaaatcagtttttaagtcaataacagtgtcttaaaattaaggaaataagttattaaaccttcaacctttaatattcccaccctgatataccatgagccttcctatagcttcaccacacaattccacaagtttagccacagaatttgttaatgatcatgtattatgaggaaaagaatgagaaataaaatgatgttctacattctgtaggccacaagaaaatctctagaggaagcaaaaccattttccaagtaagaatgtcatgaagcaggttaggctttcacaggggcatgttttagccctcctctcagagttccttcctgaagagatctccaaagacactccacggaatgagggctcgttgcccttgtcttcccaggctgcagcggtgttgtgaagccagtccagcccagtggccctgagggggtgccccactatgcagaggctgacatagtgaacctccaaggagtgacaggaggcaacacatactcagtgcctgccgtcaccatggacctgctctcaggaaaagatgtggctgtggaggagttccccaggaaactcctaactttcaaagagaagctgggagaaggacagtttggggaggtgagttgattctttgattcccttatagctcgaagaaggtggttggataaaaatgatcagtagaacaaagagtcccttccagaggtggattcacaacagaatgtctcttccatttgtctctccttgcattgtcctctggatttcagtattgggtcaacctaatctttgtcaaatagctgtggagttcctgggacttctgatttctatataggagtttttaaggcaggcaagtcactagacttcagatatcttgaaaaacattcaatattttcaaaaatgtttacaatagattatggagggtgggatccagaagatgtgatcatcttttatgaactgtccaggaacattctgctactcaatagccactttgtttttttcccctttaatgggagttatatgtaaaatggtcaaaaacaacctcgcccctgcctttggtcccagaatcagccactagggaatgaatcaccaactaagataaggaggagtactcttttcatttgccctcagagtgatgcatgcattattaaacttttcattcttgcatcagtcacatgaaccttctgggagctcaaagcaatgttttgaattctaataggaactcttcaccactgccgtctaaactccaaataaaacatttggtttcctaagacatgttattggttttcagtgtggatctcatgttctctccttagataggtctggtgttgcaagaggttgagggacccatgttatctgttcatggtgtgacatgtactcattctgtcccctgggttgaaaacccacatctgttatactgttactaatagacaggagtttcttataatgctaaaccctatactaagggattattttaggaaattgccttacgttttacatgatccagtgactaatgaatcgaagttcaagcatttgtaataaaagacattttatattgggctatgctgtaatataatattgttattgattcattcattcacttagtgttccaagcaatgtgtatttctaaggcaggagagtggcacattagctgggtactttaccattgttttaaatcttatcaattatttgaatcatagatatgttacacatatcttcttattggtcttttgatcattttgcctgagttgtaagagttagtttatctccaggaaatgcccagcaagagtactgagacatcttcaggagaaatgatgatgctgagactagatgacttttgtctaggttcatctctgtgaagtggagggaatggaaaaattcaaagacaaagattttgccctagatgtcagtgccaaccagcctgtcctggtggctgtgaaaatgctccgagcagatgccaacaagaatgccaggtctgtggtctacattttgaattttcctttaggtatttcatctttaggaccaggaatactcctggatacttctgagcaattttttcttttgagatgggaaggtcagtgagctgcctcccatttccactgttatcctttttcttattccgatggggtcggcagtcctcatctttttctccacctctctcaaacacaaaggtacattttccattgtacttgccacatatttacttcctaaccccctgtgcacaagcactgtacttgttcccaacatatacaactgtctaaatgtgtacttctttggtctttatacacagacatactcctgcatgtcattacctcctcttgacaaagtcttcagaatcacacatgactttcttgctaagcctcttccagtctccttttttcacatttctatttattttctcatcccttttttctcttttatgctccttttcttctatttgagcaaccctcaaaatgagaagctacctctatttggaaaattatctatgaacctcaaagcaaaaggatccacagttctctagcagttttccaaactggctaataatctcttggatctttttctacataaattgcagtttccagccacacttcattgtctgacagcctttccattacaataatggtgagttaatcctcacccagagagacaagctggttgaaagctggctgtatgtgtcccagagaaatctccacacctggataacatatgcattttcccatttgtgttgtcttgatttgtctcactgatattcatagtgaaaaaaagtttattattcttattttccaaattatcataaattccaagaatggtgatagacttcattaaaagtcttgcaatggacaagatgtaagataaagaagagagaaaggtgaggaaatgaaactggaggctttagaaatttaactgataatttcaatctttaagatactggtaagaataaaaagtgacattctctgggtcttatagagagacgaagtatttcttatattaatcttagcacatgattggagaaagtggcatgaggggaaacaaaaccaaaccaaaccacaggacataggatatgacaaagcctttctccgttgttccgatcggtgaagtttgccattcctccacctgtgtccttagcaatgatggatggccatgactgcaaaccctcccaagccatggaaacccctggtttgagacggaagggggaatgaaagaggggaggtgttgcatcaggacggcattgattccagtggtttatattgacgtagtatgacttccagtccaggattcctagcaaactcttggagggcttataactcatctgctccaacagttttgggaatgtgggctagaggcctcactaacaaaatcttgctactttatgacccaagggtgtctgtcaccatgtactcaaacaattattagtcttggtcaaatgaatacttcttttgacatgattaccaccacagcctttaaagagctctgttttcgacaggctactaaatacatgttgcaactgactgatggttcgtactgcattaagaaaagtcagtatgagaaaataaagagtaatcagataagccaaagatggttgttcacatcatacaaagtttcttcactagtaatagagtgactccatggctttaaaaaaaaaaaggtaaatatcctcgtgcacttaagatatgattttcagtgaaacattttactctgtagagtggtttttagcagcctatttttgattcagcaaatattaatcactttctgtgtggcagggattttgttagatgtgagggatagaaatgtgaataagtcatggatcttgttctcaaaaacattacaattgaataagggcccatgatatttcaggaggaatagaatgagacagatccaggtgtcaatttctctgtcctctcaaaagttatccaaagggaaacaagatttggcataatgtccaggaataggccttggtgtgcattcttctctctcttgattctgactctggcaacttctgagtttatctatgtctgtatcctcccaaggaatgattttcttaaggagataaagatcatgtctcggctcaaggacccaaacatcatccatctattagctgtgtgtatcactgatgaccctctctgtatgatcactgaatacatggagaatggagatctcaatcagtttctttcccgccacgagccccctaattcttcctccagcgatgtacgcactgtcaggtaaacaagccaggtcttccttctcctccctgtggtcatgagagtaacctgggatctgaaaatagggagcagtgagccttaaagtgtatcaatgttctgggatggtgggggaagtcagtgtgcagggaataatggagcagctgccctttggggaaacgcaagggattcatcaagagtagagaaagaatgttgagctttcaaccctagtttgttgataccattttagaatgtgtacctttcacatcttcctgtttccataggctaccttctgtcttcttgtctatttcctcagttacaccaatctgaagtttatggctacccaaattgcctctggcatgaagtacctttcctctcttaattttgttcaccgagatctggccacacgaaactgtttagtgggtaagaactacacaatcaagatagctgactttggaatgagcaggaacctgtacagtggtgactattaccggatccagggccgggcagtgctccctatccgctggatgtcttgggagagtatcttgctggtaagttctcagcattttaaagccctgtctaacaactggcttgtgggctcacatgcatgacacgtggagacaaacctgagacagcaggaggcaaactcaatagactgtagtattttctctgatttgaaattattttctttgtgtactaattcttattatttaatgcttgcctatttctgctaaaaaattaacacacataaaaatttagggagagaagttaaaaagtataagagatttattatctttgtttctctttatcatttctacctagtgattgttcttaatttaagatattaaaaaccttatcatttaaagaaatgttacctatacaaaatattttcttctccattagtttcataagcatgtttctcataattacatagactaattcctataattgtatttcaatacttttcaacatgttctttttaagttcatcattctttgctttataatttttatttgattcttgatattccataccataagtgagtaatttttcccaaatatctctattagaggtatattttctgtccatgcatacctgagactttttattgttgattttataaccactcagctgatttatagactcattagactatacacttttacttcctacaatgccatgtacatgttattttatcttttttcttgtgtgacattgcagagaaaagtctgagaccaatttggttttgttcatttatgattaatctgcttatttcctgctaatattcttataggatttgtaaattaattttgaaataaaaaatgtatagttattcccttgcactcaccaggataaccactatcaatactttggtatattttcttagaggatttttttctatacatatattttttctatgcatgcaattttttttctgtgcatgcatttatatacatatgtacatatatgtaatttatattacataattgggatgacactatgccatacaattctctatctctatttttaacttaacattttattatctgcataatattccatgtgtagatatatactataacttaataatgcctctataatttgatatttaagtactttccaatttcctgctattatgaatgatgctgtgatgtacaccagtttacataaatccttataaagatctttttcacctatatatgtgaattgctatattttacccatttctaatgggatagttaggcattactctccctaaaggtattatatggtgttcaaaacaatatattagactgacattcagaggaccttggttcaaatccagtttttccactactaatggtcttattaaccagaagaatttgggaaacctctcctgtttcatttttctgatctaaaaaataaggataactggcatggtggtatgtacctgtagtcccagctactcaggaggctgaggcaggaggatgaaaatctgggctgcgctgcgctatgacaattgggtgtcctcactaagtctggcattaatatggtcacccctaggagcagtggaccaccaggttgcctaaagagggatgagccagcccaggtcagaaacagaggaggtcaaaactcccgtgttgatcagtaatgagatcaaacgtgtgactggccattgcactccaggctgggcaacataatgagaccccatttctcaaaggaaaaaatatttaataataaataatatcatccacttcacagtgtggttgtctgtattgagtagaaaatgtgagtagtcaatgcatgctatttacacctgaatctcattgctgtcacttgttaaagtctatctttcaacactgtgattatcactgaactggtaaatgagagtcctggattcactgcaggcacttaaactagattcctctatctctaacataaaaaccattgacttcccattcagattttgcctttctcaggagcattttcccaaggctaccctagagttgaaaggttgacctaacactcagttgcagagtcaaatagcttatggctgcgtttttttcagctcttggatctcatccccagagaaacagaaccaagctgagatcatgagaatgaaagaatgggctgtttctaaatactccatgcacatcttggcattttcagaattccttgcctgtggtgggggaaggggtatagctgcagattatgaaatttaacagggtgttgttgtgcacaggttattctgatttcccattcttttctttacttaaatagggcaagttcactacagcaagtgatgtgtgggcctttggggttactttgtgggagactttcaccttttgtcaagaacagccctattcccagctgtcagatgaacaggttattgagaatactggagagttcttccgagaccaagggaggcaggtaagaactgttggggatgaatggatgtggacctgtgtaccttgaaggatggagaatggcaagtcctgccttagcaggagtgggccgagatggaagacagactatccaggtgttagtctttgtcactaactatccagatgatgtgaaagaccagtatcctccccaggcatccatacactttgctttatctatgtgtcaactcattgactcttggagagcataaagggtcatgtcaggtttctccccagctcaaaggtagcaggaaacaaagtcctatctctcatgatttatctatttcttgatctagaccatgtggtttttcttctgggtcaaaaaataaaagtgtaaaagggatgtattagcattcattaaaaatatagcttagtataagaaatggggttggttttgactatctagcaatgtttctagacttggatgtctgaaaatgggcagatatatcctaaacttgttgctcttggaaggcatctctgggcccagtattgtgacatctcaggactcagggaaagatgagttcccaagctccccaggagtctcaattcctagccaagatactccaagcttttttttgggtggcttagatttaaaattcctgtgagatctggaatttaaagcttgccagtaactacagcaccgcacttccccaaaggggcctggcaacagcatacccttggattatggtatctttaccaggaaaaggataatagctgggggaaggatcttgcagacaataaaaagtggatcttctgtggcttgaacagatccaagcaagccaaagatagataaggtattgacaagagataatacattatgcatattaaaaataagagaggggtctgagaatttaattgtatcttgatactctgtaaatattttggcagcagggagtctaaattagctatcttggttatgaggcaatttgccttcttactatagtcaaaggaaaatttactcctgagtacatgagataagtgagtgggccaaagaaaaatgttgttttctgcctctgccatgatcggctcagccaagatgaacttcaatatgggttgcccataaatggaagatttggtctctttttggttgtttcatcttttgcatgaaggtagggaccacataatggcccatcaaaaaattctgctgcagacaactgcagaagacaaatggaacagcttagaaaagggctgatatgattcagaactttcacgagtaggaaaaatggacactacacccatttcagttatcaagttcaagaaagtgggcagggggcaaatcaaaccatgatgcaaagatacttccctttcccccgtctttgtaatattctctctctctctctcttttgttttcctttatttttgttcccaaagacttacctccctcaaccagccatttgtcctgactctgtgtataagctgatgctcagctgctggagaagagatacgaagaaccgtccctcattccaagaaatccaccttctgctccttcaacaaggcgacgagtgatgctgtcagtgcctggccatgttcctacggctcaggtcctccctacaagacctaccactcacccatgcctatgccactccatctggacatttaatgaaactgagagacagaggcttgtttgctttgccctcttttcctggtcacccccactccctacccctgactcatatacacttttttttttttttacattaaagaact

SEQ ID NO: 28 - DNA, 8342 bp, Homo sapiens
gcccccgcctggagtccagacccgacggccggcccagttccacgcacccagcgagcccaagcgccttctccgcaccaggtgggatccggggccccgggggtcttgaggacaggcctaacggcccagggctggagatgagaggtggcccgggcccgacccggctgtcacggggggcaaaggcgggccccacggactgggacgtggtagggtctgttgggcacggactgaggggtgagctggggcagcgagtttgctgggggccgacagggactctggccaggggccgggcagcaggaaggctgttctggcctctgagaagcagtggtcctgcggcaagggaaggccatcgtccaggccctgcccctttgctgaggagctggagatgccaagcccagagctccggggggggctggggagcccgggtacaagggtgctggggagagggttgcagtcgtcagttccccctggcccagtaaaggcatgtgtgtcacagatggagaaacagccctgtgggactccacgcccccacagcatctgtgtcccctccccatctcccatccctacaccctgggccaggggaaagggaccgagaccagggggcccttccgacacagccagtgctgtatgcagggacccgggccttcccctctctgggtcatctcgcctgtgggtggggaaggtctgcggagggccctgatggactcacccctagggggcaggacgaggactagtggctgggagaacctgatccctgctcttcccagccctccagctgctctaaggaggagactcagatgaggtgcactgagaaggaggcatctggcctgcccagctccaggggctggaggtcatgggggcactgccctgtgctggcttcagcccagccttttctgttatggtgggaatctggacaccaggatgggggacatggcatccagtcacatccaggccaagtatcagtgctgacccctggtgtctagggcacctgaagggggaagcgatggcctcagaactaaaggccccacccatgcctgcccctcgcccctccaccagttctagaaggcgcctctggatacacagagccctttcccactccactgccacaggcccgcctgaggactggggctccctgttttgttcaagcctcgagggcaccagcagccaagtttgctctccactgacccaaacctagcccaggaatcctgtcttccaggtggcccctccccctctcatgggcactccactccccttctggggcctcttttcctagctgcaccatgggggcacccctgcctccgctcaccacttcccacaattgctggggtggacatggcggccttgtgcaagcccttaagtacagtgctcccagccacaccacagcagagagtgcagaccgggtggccatgaaggcagaggggcccagctgggctcagacccagctgtgggtggcctggccatgcctgccctagagcttcatagagtgtggtggggacagtgatggccatcacagcctctgttgggcacagtgcactgcctctctgcatgcagccttctgtgggcaccaggagtcaaagttcccgagaacactggactcagggaaggactaggcccctctaaagcacgggagaggagggggccggcatctggggacaatggcactcccaactaggtcatgggtgagaaggaattctgtctaccttcctgaaccatgcaagaaacactgagggctgggtgtgtcggtccgtgggacacgggcaaccactgtctcatgactacaggcagtgatggccctggggaccagctggggctggccgggatcccagtccagggttgatgatctcaaaggccaaggaccgagaatgacttcaacagagtcatgggaggaaggcctggaaacagctcaagttgcaaccacacagcttggggtgaacaacaggcagaggaggcttcctggaggccctgggcccgggggtttgggcagagggaagaggggccgcagtcctggaacctcagccaggcccactgccccagccgagggaaggaggcactgggtcttcaggcgcatatccccacaagctgtggcaagcattcagggaaacagtcccaggcctggtctcagtttccccatctgtacagtagaagcagcagactggccgtagttgccttcatatagtcattcatcaaacaagcatctgttagcccaactatggcctgggattggtgtaaactgggggatctatgctggcccacaagggagagagatctttaagtgtttactgtggaagcaagggtacagggaacagctccctaggagaggggggcggtctcaagaactgggctggagaagaaagagcacaggggaggaggggaccacagaggaaagcctgggagtgtccagggaactgcagaggtcagaagggtaggattgtgggtcacaagagggacaccacgagggctgtcagagaggccaggagggactcacacagggccttgaatgccaggatgagggacccagacttgctctgaggggcggcaggaaccttcaagggcttcacaatgataggtgtaggtcagggtctgtatgggacagaagaggccggctggaggctaagaagccaggtctaagcaagggtgaagaagctggggttctcagcccaagcaagcctcacaccccgataagcagtggggagtgagaacaaggagtgggacccaggatcagtctgtgaccactcaccactggggggctggtcaagctccctgaggtggacaggcgggggtttgactgcccagagcctcctagaacctcaggcgggcagcagagggatggagtgggagagtgaggaacggcaggaatgcaggaatgctgatccagctccttcctgcagggccagggagcctggatggcagcccaggagagccctcactgactcccacgagtggacccaccttgtcacttggaaagagagagggacagtgtaaatgctattaaggattaaaggagataaagcatggtaatggttggcaccaagcccaatcctaagtgttttacccaaacagtcacagccaaaatagctgattccatgcccggcactgttccaggagctctcgggcactgagtcagttaatccctactgctgggcactcctcatgtctccagtcccagatgaagactctcgggctcagagaggtagaggaagttgttcagaatcacacagccacacttgtctgcttttgtgaagaactgggtggtgggagccccaaatccgtgggcagccttgaatgccaggccgaagtgctaaaagccagtctgggggaggcaggaagattccctggcccagagtcacagggccacccaacccccaccccttcctgcagggaagccccacccaccagaagccaagatgtccagcaagcgggccaaagccaagaccaccaagaagcggccacagcgggccacatccaatgtcttcgcaatgtttgaccagtcccagatccaggagtttaaggaggctttcaacatgattgaccagaaccgtgatggcttcattgacaaggaggacctgcacgacatgctggcctcgctgggtgagctgggacagggacaggggtgagatggatgaggccaggcaggctctgccaatcatttacagggcacctcctgtgtagtgagacgcgtggtgtccaccttagagaatagttgccattaacttagtccattcaacagggaaactgggccgggcgcggtggctcacgcctgtaatcccagcactttgggaggccaaggcgggcggatcaataggtcaggagatcgagaccatcctggctaacacggtgaaaccctgactctactaaaaataccaaaaattagccgagcgtggtggcgggcgcctgtagtcccagctacttgggaggctgaggcaggagaatggcgtgaacccggaaagcggaggttgcagtgagccgagatcgccccactgcactccagcctgggcaacagagcgagactccatctcaaaaaaaaaaaaaaaaacagggaaactgaagcacaaagcaggtccaccacagggtctgaacgtagacaggctgactccacagtgggcctgtcttaggcagatttgtgcactgggctgccaggtatcatttcatttaaagaaaggggtcagctggccaggcgctgtggctcacgcctgtaatcccagcattttgggaggccaaggcgggcggatcacgaggtcagaagatcgagatcatcctggctaacatggtgaaaccccgtctctactaaaaatacaaaaattagctgggcgtggtggcgggcgccagctactcgggaggctgaggcaggagaatggtgtgaacctgggaggcggagtttgcagtgagccaagatcacgccactgcactccagcctgggcgacagagcaagactccgtctcaaaacagaaagaaaggaaagaaagaggtcagcatctaaatgaaagtgtgaactgcaggctgcccactgcacagatggggaaactgaggcctagaggggcggccagaccagctcccctccttcagaggtcacccatctcaggctctcatagcctctctggtcccagtgacttcctcaggatcaggaccttagaactaacagggtacaaaaatcaagtccaattctctactgcagatggggaaacacaggcccagaggcaaggcctccacagaccatgccccaacccacgggcctgccccaacatccctcccaaagtgctggccacagccagccactctcagcccagttcccgcgtacccctcatgccgagtgacagcatccagaccagacactgcctgggggagggagagtccaggaccagaggacacagccccgtgacagtcaagcctcgagctttgaggccagagagtcagtccctggtagggccctgtgcactttcctcttcctgtgaaatggggccatgaccctgacatttccccacgaggcactgagcaggagaaccaggcaaacctgagtgggagaactgacagcacgctgcccccggccctgagcaccaaacctctccccgcttctggccaggctcgcttgaaggctccctcccccaggaggtcacctggcaggaagtaaactccagggttctttttttttccccccgagacaaaatctcactctgttgcccaggctggagtggcaccatctcggctcactgcaacctccgtctcccaggttcaagagattctcctgcctcagcctccccagtagctgggattacagacgtgcgccaccatgcccggctaatttttgtatttttagtagagacagggtttcgccatgttggccaggctggtctcaaactccagagcccatcttggcctcccaaagtactgggattacaggtgtgagctaccacgcctggccaactccagggttcttatctggggctttcccagcttcgtggaaggactgaggcctggtgagagaaggggctggccttaagtaccccagtgtcctggcgtcacagctcctcttgggcctcagcttccatggccatcccagggggacacagcagggtatgtgaggctcagggacatgaaaacttcctatttccaaggccacaccctgcacccaggcccctgaacccctgagacttcatgacagccctgggtgtccacccagaaaaacatgcactgtgtttgtagctcatatccgtgggtctgcaggtgagtcacacccttatcttcaagttaaaaacaagagcagcaaatataataataagaagaagccctgcaggtattatcttaaatctcaaagcaatcctattgaacagatacaattattcccactttacaaacaaggaaactgaggctcagagaggttaagtaatttacccaaggtcacacagctaccaagtagtggggctgcaatagaaacccagcagttgattccagtccataggcctgtgccagtcattgttatgagccttttgcaactactgtcttcacaattcccctaagagatggggaaaaccaaggtgcacagctgggatccaaacccaggcctgtctgacagcaaagcactgtgtctggactttggagttaggctgcctgggttcaaatgccaggtctactcaagtctcctccttacttgctgtctgaccctggacaagtcacctggcctctctgtgcctcagcttccatacctgtgaagtgggtaagaatgctgacttcacagggtggtgaaagttaaatgcaataaggcacgtggtcgaccagccacagcgagcagtctgcagagggttgttcttattacactttagtgagcactgccggctgctgacatccaggccacaggaggaaactggtgggagcagccagggactccgggcgcccactgctgtggctgcgctagagccatgctttccagttcacaaaacccactacctcccgtctcacacggagcggtgaagggcaggggtgggggacgggggtgcaagttgtcccagctggggacagagggcccaggaccacaggctggaacaccccacctgccacagggaagaaccccacagacgaatacctggagggcatgatgagcgaggccccggggcccatcaacttcaccatgttcctcaccatgtttggggagaagctgaacggcacggaccccgaggatgtgattcgcaacgcctttgcctgcttcgacgaggaagcctcaggtccgtggcgccccctaccaccactctgcatgcaagtggaacagggcccaggcattcagtgcctctgcccctaagggccagaacagacatcacccatctcccaggttctgtcaccagaactataaaagccaggccacctccttattgtcgccgcaaaggctaggccagaacagcccatgccccaagactcctgccttcgtgatctcccccgctggcccaatgcacattctccatctgttttagacctttccagaaatcaaaccatttcatgcctttcttgccaagaaggtatagaaactggcccccctcctcggatctcctaacggatattccatccctcagctcatttttcccagggacatgtcagggtgatgatggccatggtaacatggccatgggcccgcacgggcctgactaccttcacggtccctcactgcaatggcatacgttcatccctgttttctagattaaacaggcacacggaggttaaggaccttgcccaaagtcacatagctagggagaatgggaatcagcactgcaactcaggcagtggaactccagagctcacgcttaaaacagggcacacccaacaccatctgtgtgcacagcctcaagttccccaagtgacacctcggagacagtcccactgcacaactcctcccctcaggaccctggcaccccttcacgtgggatccgacaccccttcacgtgcacccccacacccctcctgccacgtcctcattcctcagactgaccagagactaagattgtatcttcccagcccctctaggtctgcaagagctgccagggggctgagggatggggctgctgtgtatgtctcagcccaagttcctgctctcacccaccctgcccctgcccgcaggtttcatccatgaggaccacctccgggagctgctcaccaccatgggtgaccgcttcacagatgaggaagtggacgagatgtaccgggaggcacccattgataagaaaggcaacttcaactacgtggagttcacccgcatcctcaaacatggcgccaaggataaagacgactaggccaccccagccccctgacaccccagcccccgccagtcacccctccccgcacacacccgtccataccagctccctgcccatgaccctcgctcagggatccccctttgaggggttagggtcccagttcccagtggaagaaacaggccaggagaagtgcgtgccgagctgaggcagatgttcccacagtgaccccagagccctgggctatagtctctgacccctccaaggaaagaccaccttctggggacatgggctggagggcaggacctagaggcaccaagggaaggccccattccggggctgttccccgaggaggaagggaaggggctctgtgtgccccccaggaggaagaggccctgagtcctgggatcagacaccccttcacgtgtatccccacacaaatgcaagctcaccaaggtcccctctcagtccccttccctacaccctgaccggccactgccgcacacccacccagagcacgccacccgccatgggagtgtgctcaggagtcgcgggcagcgtggacatctgtcccagagggggcagaatctccaatagaggactgagcactgcttc

SEQ ID NO: 29 - DNA, 95168 bp, Homo sapiens
gtttcccagtaatgttaatgaacaaaaggttatctgcctagcgagttccttttccaagcgtttgagacaattcgacaagattatgagactgcgaactggagtcttttatctttaaaaggtattttaatctgagccttcttgacgtttattttctgagcccatgaatttgctagcgaggcagtttctctggtttgctgtttctgaaaggagttccctcaacagagtacaacagttaatgggggaagtggaaacaaaagcgggaagcaggaggaccgttccccatcactagccagtcttcaacaggtgaagttgtttagctcttcctggtacctgcaggcaccgttccagaagtattaaaatccaaggtgtggctgagggtgggatggaacatgtatctccatctaacagctttaatagactgttagttctaacttgcatataaaaacacacaaataagtacaaagagctggagaagctggggaaacagtttctgagtaaaacctgtggcactaggttgtgtctttcctttcccctcaggcaagagcatcatctgtttgactggcatctggctggagcgtccgaaggggttaagaacgcttgcaaactcctgggagtccagtaggagttgctgatggtgccggacattgcttgcaaagcaatttttgtggttcacctccctcggggttttcttattcttttgtaggacattcaaggagttggtttgggcatttactttttaaagtttctccgtcccagactcctctctccagctcccggggtgcggcacctctcacctccctgaggctttttgtctcgctgcaggcgtggggagggggcgagaggactttgttctccgaaaacgaccttgccctgggaatttcctggggccgtttctcacggacaagccccctctccctgctgccagcgcggacacacgccgcgggggccccagtccagcctgagctctagacgccccgccggccaccagcgccccgggaaaggccgcccgcgctcccccgctccccctcctcagggcccgccgcctagagcccggatgttggattcaattcctgagccgggtccttcatttccataaaagggcagcgctccgcggggccgagattgccgccccgccgcgccccccgccacccccgcgccgccccgccccacgccgccccgccccgcccgggacccgcagccccctcccccgagcgcggcgccgggagggcgggggcagaggcgaggccggccggacccgctcagggcagctctgcgggcggcgaaggagggagccagcgcgcccagcccagccaggctcggacagagggggcggggagagggtggagcgcggggagccaggcgaggggccgcgacgacgggactccattagccgctccggccacaggcagcgcttcgccagccgaggaaccggacgcggacaccgccgccccgcgagcctccagcccctcgcctgttgccgcgcgagtcccgggcccggagcgctaggagcgcgcggtgagggagcgggaccccgccgggacccgagggggcgcggcggggaggggaacggggagtcagcccgcgctgtgtctcggggccggccggcaggtgaagccctccgcggtccgctaggcggggacggtgtggggcgggcggcgccgggaccgaggaacgctgcggggcgagcggggcgtagggtcctcccgcagccccggccgccgccgccctcccgagtttctgccgaaagccccgggtcctccaccacctcccagcccgtggccggcgctgcgaattcggtgggattcgcctttctttgggggagtgacgcttacgagagccatttcctccgcgctcgcaggaaggagccatggctctggacgggataaggatgccagatggctgctacgcggacgggacgtgggaactgagtgtccatgtgacggacctgaaccgcgatgtcaccctgagagtgaccggcgaggtgcacattggaggcgtgatgcttaagctggtggagaaactcggtgagtagcatcccagccgcgtccaactaatgacttcccagaattggtagggggaggaaagaggctcacgacgggggaggggcccatttgagaaatcttggcatctcgcaaatgctttttggagatgtaaaatctttcagtatttaagcagatagacctgttcccctttgcgtcttattttgttttgctattctctgaattttcatatgtaatgattcgagcctcccaattataaccttaattgcgtagttacgcgggacgggggatgtgtgccggggaactcgttaattcttaacatttactgacagaacgataaaagaatgaggaaagtgtgttgggagggtgatattacagtgtccgtggttatctatgtcttcagcatacctgaatgttagtgacgtttggtatagagaatgatgcaaaatccatttaagaaaaatctgtgctggaaaatgtgcaactactggcgccagtgtgaagtttctgtggctgttctacgtggtggagtgcattaaaatgttccagtcatccactcttactaggggtggggcagtgcttgacaaacttggtatccatagtccatgctcgatgtaagccgtttcgagcgttcggttttatattaataacaagccaaggaaagaactttgtgttaaaaagcagactttgttaaactaatttgaggttgacggtgtttgcttgagtacaaatatgtattggattgatatccgatttaaaataataaggtatcttacagtatgaagtgtgtgaagagtgtgcagtacacatttttgtgatgaatgaaaccattttcatctggaagagtcagctaaatagatgatttgatcataagagaaatgctcagagaactatcttcctgagctttaaagagccttttgtacataatacagttgtgataagatgattatctgtgtggcattgtctttttaggctggaattgttttttgttttggtgaaggggggttggggactttctgggggtttttttcgtctttttttttttctttttttttttaaacacagcattcgttttcaagctacactgggaaagtagagaagtgcttatttgtcaggaaatctatttcttaccaaaggattattgtatgtaaaggtactgaaatagcactctgatgcattttgcaaaataaggcaggattcatttgggtggacctgctttgtacccctgcaggaagttttattattgaaggaccaaagtgaagctccttacaaggtagcctcttccttaagactgcattgtttggctccctgagatacagctcaggaaagaaaatcctcctaggtagcccagtgaaaattagattttgctgtattgattaaccatttaactggcagttaacagtatttttatctgatttgaataaatcagtcactgtttgcaaaatatgtatgaaccttttttgtccagctctggtatgagattatttaagaaggaaaatagcaaatatttggatattttgttttcaaagaaaacaagcatttttgttagagcttttctaatttatggtaaatggaccatattaatacattggtctcaataggagatattttttatattgcaaaaaaaggagctgttgaaggtgactgagacaacttgtagttctcgaaagccaggctgtagctaatgaataaataatggtttctatatttattttgcattgcttaggactgtttattatagaatcacagtaataaatagaaatatagagaataaactgcagacagaaatgatgttaatttaaatgactataatcttaatcttttaatgctgatacatttttaattttttatgcagagaaaagaagcccaacaaggtaggaaatgctgtgcgtatggaaaccttacatcttttctgaactgaattcatactgattcctcttatattttgaattccaaatagaaagtgcctctgactttcctgtttggtaaaagtagagctaagtgatgcttttggtttttaggattagatgctttgaatggtaagctatttcgttgcctatcagcaagtaaatagaggagagattcggtagggcagcatttaaaacatccacaaatcaggctagtcaaattagaaaagaactttgtaatttttcagagttgcgtaaaactggaatgacctgccttctgaagccctgacttatgtcactgaaggtattaaagggcagactggatgactacttgccaacagtggctagagaggatcaaagcagcttgcagagtctagataaaaggtggagatggtggtagggatgagatggtacaaagtctgttgtctcaggtttgcagagcagtgatggaaaattagcagacttgggctactgtggccttgaagcagttatgaacagaagacaccagagcattcacttacattttcaaactccagactgtctgatatccttcttaatctgttggacggtatatgaataccaaaagcattatattttaaggtgattttcccagataatgttcagtagcagcaattatttccctgaagtcgatagatctcaggatgacctattccctcaacattgtattaaaattgtgtgtgtgcacatgtggaagtttctaggaagaggcttcttcactttaatttctcaaagaggtctgtaacaaaagaagtcatgacacaattttatggtttggcccttgtgtgtcaggttcatcttgaagctagggttcatcccagagtgcggcattttaattaagcacgacataagtgtaaataatgtttccttaatatgtgtcagtaatatctttgtgtttagttagacttttattataaataacgtgtacactttgcttaaggccattaaaacacaatttttagaattttgactttaattcaaagatctgaaaagtctcatttatttatttatttatttattttttactttttgagacgggagtctcactctgtcgcccagactggagtgcagtagcgcgatcccggctcactgcaagctccgcctcctgggttcacgccattctcctgcctcagcctcccgagtagctgggactacagacacccgccaccatgcctggctaattatttgtgtttttagtagagacggggtttcaccgtgttaaccgggatggtcttgatctcctaacctcgtcatccgcctgccttggcctcccaaagtgttgagattgcagacgtgagccaccacgcccatcctaggtctcttttaaatctcagtataaaacacatttgtcatttgctattaatcttttaaaagaaagcaaaagcatatgtcatgaagtgggctttggggaattatatcgtaatgtgacaaagtttttgcatttgtgacttagtctaggctgatacttcataaataattgatcccctcagtgtttatacttcatccagaaagtgaaaaacaccctaaaatccagtttaggttgggtacggtggctcacatctgtaatcccagcaggcagggaggctgaggcaggtggatcacctgaggtcaggacttcgagaccagcctgaccaacatggagaaaccccatctctactaaaaatacaaaaattagctggatgtggtggcatgtgcctggaatctcagctgcttgggaggctgaggcaggagaatcacttgaacctgggaggcggaggttgcagtgagccaaaatcacaccacccagcctaagcgacagagcaagactccgcctcaaaaaaaaaaagaattgtgaaaatttagtactgtttggtttggtttgaggcaaggtcttgcactgtcacccaggctggagtgagtgtgtgttcatggctctttgcatcctcaaacttctgggctcaagtaatcctcttgccttagcttcctgagtagctggaactacaggcacgcaccaccacatcttgctgacttttaaaatttttcgtagagatgggtcttgctttgttgcccaggctggtcttgaactcctggcctcaagcagtccttccaccttggcctcccaaagtgttgggattacagatgtgagctgccatgcctgtttttttttttttaatcaaagacaaatttcaaacgtgtatagtgttttttaaaagaaaaattttaaatatgaaatatcagggataaggattataaaaacaagacatcaaaataaaattgtcttcaaaaataaattttgtcaagaagaggcccaattttatgggattcctctggaggtcattgagaagtattaaatccttggctgggcacggtggctcatgcctctaatcccagcactttgggaggccaaggcgggcagatcagaaggttaggagctcgagaccagcctggccaatatggtgaaaccccgcctctactaaaaatgcaaaaattagccgggtatggtgatgggcacctgtagtcccagctactcgggaggctgagacaggagaatcgctcgaacccaggaggcggaggttgcaatgagccgagatagtgccactgcactccagcctggcagacgctaaataccaagtggatctgttcactgagttttagtatcactttttaaaatgtctttttaaaacttatgtgtacaattaaatttccacctttctataaaaattcattttaaacggagaataaggaatttattataatctggagctcactgaatggaaatctccagccagctctgtgagcagagaggaaaaaataggtgatctctaagtttcctctagctctgattctatgagtagagagaatgtagaagttgggttagatcaagtcacacaatctacaagggaaaaaaatgcaaattggaagactcaggagtaactaaaaagaaacatatgaagttgctttagaaagattgaggattaggccgggagtggtggctcacgcctgtaatactagcaccttgggagtctgaggcaggtggatcacctgaggtcaggagttctagaccagcctggccaacatggtgaaatccccgtctctaccaaaattacaaaaaaaaaattagccaggcatggtagcgggcgcctgtaatcccagctactcaggctgagccaggagaatcgcttgaacctgggaggcggatgttgcaatgagctgagatcacaccactgcactccagcctgggtgatgagcgagattccgtccccccgcccccaacccacaaaaaaaaaacaacaacaaaaaaacatagaacaattgaggattggctgggtgcggtaacttacgcctgtaatcctagcactttgggaggccgaggctcagaagttgtttgcttgagctaggagtttgagaccagccgggcaacatggtgaaatcccgtttctacagaaaaacagaaaatacaaaaattagccaggcgtgatggcacgcacctgtagtcccagctactcgggaggctgagacaggaggattgcctgaagctgggagtttgcagctgcagtgagctgtgattacaccccagcactccattcctgggcaacagagcaagactctgtctccaaaaaaaaaagaaaaagaaaatctgaggattatatttctgaacgtggcctttagaaagaagtccttgctttaaaagtgtgtcatgttcttgccatataataatgaaaaaagttcatttatgttggagttgcatgttaggatcaagttagattgtgaacttagcacatgtgaccaaaaaaagaaatagattttaataaagttaccactaaaaatcccttaacgtgatcattaagtatggtatacgttcattgcatctcacagaagtggaaaatagctagtttttcctctaggaactccaaaaataagtttcattaattgagcaccagatgaagaaactggcttacatgaggggcttcgttacacaaaaaaatactttaaacactaggattagagcttggcaagatgcacactgggaaagaggcatacgtaactggacagctcccttataccctggcttagtgctccctggggaaggtgtgtgcttatttggtggaatggtgcctatgcagttgaaatccttagtttttccccttgagggctcacaactgaattcatggaaattaatgcctacatgatgcatcctcattgcattcatagtgaaatacattaacattataagaaatttttttaaatcttgggggtggagtaggaaacaatgttaaaatcttattaaagtgaattaagttttggttaaatctgatagtaagtttactcagtgtttaaaacactgttcatgatccataggaagtgaattaaattgtatcagtttcttagcaaattttaagttctttaaaagtggaggacagtactcaagttttactgtaatcctgtgacagctaataaagtatgagctattccttagagtatgtgctatttgctgccttttgtttttgttttgctgctatgttttatacccagttttttaaagtaaaaaactgtttgtttccaactagagttaacttatttatagagatgctaaaaatatgtttattcaattacttataaaaggccttgttggaaatgtctaatcgctcgctattgaagagaatggaaagaaaatatgtaaaattttacctgttatctttggctcttaatttttaaaagtttcaaacatctaagttcaagagtaattgagtgaacactgcgtaatcttcatctagacaccagttagtattttgccatttgaattttctatacacacaaacatacacatgttggggagcagttggatgaagtttcagacttactcataacctttgattcctaaatatttaaatatgtatcacctaagaacaagaaacttctcttgcataattacagtatagtgatcacattcaggaaattcaacattgattcacttctgtcatctaatatgcatccattttcaaaatttgccagttgtcccaataatggcctttgtttttttcccatccagaatctcatttcgcatttagttgaaagggcctcttaatctcctttgatatacagaacagccaccaagtgtggagctacaggagattatataataaatggcttattgacattacattaagatacatgtaaaatgatagtatctgtttgtaaactttatggccaccctgtagaacagttcctcagccttggtcttttaagacattgtttaacctttttaaaataaggttcttagtatcagtgcaaatttcacttcagagtgatttttttttcttttgagacagagttttgctcttgtcacccaggctggagtgcagtggcacgatttcagtccactgcaacctccgcctcccaagttcaagtgattctcctgcctcagcctcccaagtagctgggattacaggcacccgccaccacgctaatttttgtatttttaatagagatgggatttcaccatgttggcgaggctggtcttgaactcctgaccttaggcgatccgcccacctcggcctcccaaggtgctgggattacaggcatcagccaccacgcctggccaagagtgatatttttataggttctttttcacatactttatttttaaaatttagtttacttcttagcttactattaaataagctgttaataatagttttagacatcattggatgtaggtttcccataatgtcagctgttctcagactgtagtaggtgctgatggaggcacagattattaagaaataacaggttgcctagtgtgtcagaagatctggattcaacttctggctctgtctgctactttactggttagtatgacctttggacaatgaatccaacctgagtgggttttgacttctataaaatagaaattgaaaaaaattttcttggggcgggcggggtggctcacgcctgtaatcctagcactttgggaggccgaggcaggtggctcacgaggtcaggagatcaagaccatcctggctaacacgatgaaaccccgtctctactgaaaatacaaaaaattagctgggcgtggtggtgggcgcctgtagttgcagctactcgggaggctgaggctggagaatggtgtgaacccagaagggggagcttgcagtgagccgggatcgcgccactgcactccagcctgggtgacagagcaagactccatctcaaaaaaaaaaaaaagaaaaagaaaaacattttctcacaggttttggtgagaattaaatgagataatacatatatattgatactacatgtatatatactttatataaactatttgtgttatgcaaatgagagtggatacttctctgtggcattgagtctctgagtatatgaaagtaggaaggaaaaaaaggaaaagtaggttaaaatataatctagtatatttaataagttccagctttactggtggggaattgcactcctcaaaaaaagcttagtttaggattgctttctgttcccaccctctaaacaacaagaaaaaatagctgtcattttactttcccgccaacttccaaacacacacctgcctctgcagtgtaagagagctatttaagtaccattttaataagatttctgaaatgcaggggaccaataagtggatgatggtattccaggtatttgaaaaatctaaaaccatgaaagcatcagtagtaaattaattctctacttaatatattctataagagcagtgtttttagttcatttatagcaaaggcacatgaaaacattgggcctatttagaaactaatgaaagtagtttcagaaaaaagctaatgtatgcagtattcctatttaaataattattttactgacaaattaatgcttatgccatggaacatttaaaattggtatatatgcccagtgagaagtaaacaaatacatctgaaagtgtatttttaaataattcttttattttgtaattaagaagtgtgacttctgcacttgggtttgtggttacaaattcatattcgttataattcattctttaacaaattagttgcataattactatataattgtttttcctgttaattttttttcttagtgtcaggctcattgaggtctgattgacatatagtaaaatttatccttcttagtataatattctgagttttgacatgtaaaactaccacagtcaagatagaaaacttttacagtactcccaaaagtttcctttgtaaccgtctcatcgcctcaaacccagatcctaaaaaccagtgataatttgccttttctagaatggcctgcaaatggaaccattcagttctagctctttgaatctggtttctttcacttagcataatacatgttagcttcgttcatgtgtttgtatcaatagttttttatcactgagtagtagtccattgaatggattatttcacagtttgtccatttagcaattgaagggcatttgggttactcccagttttaggagatgatgaataaggctgctgtaaacatccgtgtgaatgcatattttcatttttctggggtaactacctaggtgtgggattgctgggtggtatagtaagtatatgcttgaagttagaagaaactgccaaactttttcatagtggccacgtcactttactttcctgtcagtattgtatgagagttccagttgctgtcaggtctaccctacccttgttactgtcagaatttagtgtcgtttgttttaattttagccattctaataagtaagtagtactatctcattgtgattttaatttgcatttccataatgactaacctactggctaagtcagtttttcaatttctagaatctcagtatagataacacagaataaactatcatttaagtttgttcctgtctctttggaatgtgtaatgtattaggattctttgaaaatagttcttcaaatgtggtaactctaaagtagaagatacataaacagtatctgaagatatctgaatgtctttaaatatatctacagccatactcttgtggattaaagggtcagtatacaaatcctgatctatttcccttctttgagaatattatgaataattaattgttcatagtaactcacctagagttacatagtaaaacattttgaaagttaattgaaaatgatgtcttatggtattttctctcaacttcattaatgctgcttggaagtgaattcgtgtatatgagaaaaagagataagcagtaaatgattaaaatttgaggtttacgttttgatttccttccatgattcaggtttcaggtttcagacttaattatctgtcatttagatacataaggaccagccagtgtcagtgcatccttggggtgacctttctacacatatcaaggttattgggctgataacctccagcccagagaaggtgacatctactttagaatcggaagggagtcttttctcagatatttaactgtcttatttttacatcatgttgtaactaaaaaatacattaggtatttaaaaaatcaattataatttcaaagcatcagtgtaatgatgtttttgatatctttttcttaatggaatactcagggttatgaataaaacaccaataaagtgctagcattattgattgtagatgaagttgtctactgggtaagtgcttcccagcttaatgttccttaatgtagttcctgggttcagatctaagaattttataacctttgaaattaaaaataacttgaaaaaagcagatgattcctgtatcaatgttaaaagtcttatgcaaggtggcaatgatttctgttgccaagatggaatgcccttggtatggagcatagactgagaggcagcccacccacgtcagaatcctgacttgaccatatactagctgtatgaccttgggctgtgtgacctgtctgtgcctctggttcctcatctggaaaatggggataataacagtatctttggattattataaggattatgttagttaatacacatgaagtgtttagaatagtttttgtaaatgtagctatgatgataattacagttccagctattttagtgtttgtagattttctccctgtgctgagccagataaataccagtattataaaagattgagaatgtgccttttaaaaggaagccaaatagttctttgtttttttttttttttttgagaccgtagtctcactctgtcgcccaggctggagtgcagtgatgtgctgtcagctcactgcaaccttcacctcccaggttcaagcgattctagtgccccagcctcctgagtagctgggattacaggcacgcaccaccatgccctgctatttgttgtatttttttttttttttttttttttagtagagatgggatttcaccatgttggccaggctggtcttgaattcctaacctcaagtgatccacccacctctgcctcccaaaatgctgggattacagacgtgagccaccacacccagccagaagccaaataggtctgacatactctttaccatattaggaattgattttaagtttattgtgctactttgcatcattattagtaatactataaagaattaaagtatgaagatcatctagaagcagattttatgcttccacatatacaaaattatagactcactatgctaagatagggagtgtttccataaattcaatattctggttagacaaataccttctttaaaaggtgaattttacagcacttagggaggccaagatgggcagatcacttgaggccagagttggagaccagcccagccaacatggcgaaaccctgactctactaaaaatacaaaaattagctgggtgtggtggttcatgcctatggtctcagttacttgggaggctgaggcaggagaatcacttgaacctgggaggtggaggttgcactgagccgagatcgcaccactgtactccagcctggttgacagagtgagactgtgtctcaaaaaaaaactaagtgaactttgttagcgactaagaacttactctaagatgtggccaacttattggttacatatgaccttgggcaagttattttaacttctgattatttagtctcacttagctttagtttacttgttttgggggctaatgtattgactaaatatggtatttaaaggattaacaattcttgataattagtagaatgactatactaagagctcaataaaatgtaatctacagttatccttcaaataccatgtaaacttaaaatataaatttcaactgtgattttcagtattctgattgctttgttttcattttatttatgtagtatttaaccataaaccccttcttatttaatctcttgctgaaaccattttaaaagattttcttgcctttgtaaattctgtttagtggttgtgaagtgtctgaatacattccttgaagtcactgactgggtttgaataccagcttcagtacttacaagctttgtgaccctgtgccacgttatttaacatcttcgcaacttagtgtccttataaacaaaataagtgtagtaatcttaccacttagggttgtcgtaaggattaaatgcagacacatgtgtaaagcacttagagcagttcttggcacatagtaagtagtagttagactaataattgttttattgaggatccttttggagtttgggcagtaaatttattgaggatccttaatgagtttgggcagtaaattccttacagaacttaaaatagcaaagaaggcccttaggtgagatgggacattgatgtgtaaacattcctgcatagagataattctatacattcatgctctatttttggtaggttatagaggtataacatgagacgtgtgggaatataaggtacatgaactggactgtagtagcagcaacaaacatttacggagagccaactattatatggtgaggcatagtcccggctctcaatatgagcagcttgctagtaacaaagtgaaacaagaaaattactttgagtcaatgatctgattgagaagtgccaaataagtagcccttgaatacaggaagacagaggtttagagtcgtgagtaataactggccttatttaaagagagacagggtggaaagttaggaagaaaggcattccaggttggggattgcagtgttcatggtgtattatagactagcttagagaaatagaagaaaagcttatagagaagaaagacataggtaactgtgaaacgatattctgttattccttaacttatccacttaatatttataaatgagagcctattggatgccagagactatactacaaactggggtgaacaaaattaactcattccttaaccctcactctatttgcagtcgtaaggtaaagacagtctttattattattatcattattattattattattttaagacagagtcttgctttgttgcccaggttagagtgcagtggcacgatctaagctcactgcaacctccacctccagggttcaagcaattctcgtgcctcagcctcctgagtagctgggattacaggcacgcaccaccatgcctggctaatttttttgtattttttttttagtagagatggggtttcaccatgttggccaggctggtctccaactcctgacctcaggtgatccgcccacctcagcctcccagagtgttgggattacaagcatgagccactgctcccgacctaaagacaatccttaaatagtaattactataatgtagtgagtattatggtaattgaaatagttataggattctgtactgggcaactggaacctagcatataggataggatttgtggagggagggaaatgacttttaagctgagatctgagagtaggaattagccaggcaaaaaatgggaggagatgtgggtaagggataggatgacagaacaacaggctgggaagaggatgagaattcccagcatgggaagtggagcaagggagtgtggccagttgaagaactgaaagaagtctggtgatgatgggggagcaatcctagggaaccagtggcttgacgtgaggctcaagaagaaataatgctaaagtgctttctgaaccaggtttaaaagatttagcattatccccagagctgtgagatgcccataaaagactttaaatagggggagacatcagatttttacacattggaaattcatcagtttcatataaaataacttgcagataaggtgtaagcaatgataatcctcttggatttcaagaaataatttttccagtatacattgaagttttatattagaatttgttaatattttctgagataagcttacaacataaaagccaattaaatattcttactaaattgcttttcttttgaactttagaatagctagtgtcattgatcacatttaaaacacaaacacaactaatacttctctaagtccaatactaactggtgaattttgtcctgatgttactctcttagaatttgtcagaccttttcattgcatggactccgagccctgtcttctaggaatgaagccaggttgaaccaaattagcaataagccagccttcaggattggatagaaagttacccaccctctggaaattaataattggcatactttctgtttatgcattctgtaactgcttgcatggcttatgtgatctgaaaaaaacttcttaactgctttgagttagtatgtcttatagtatcggataatagattgaaattgatagacattatctcagattcgtaacttcaaaaggctatttgtaaacttagttgatctctttattttgaagagtgaattccccagttttcaactagctatgtagaagaaattgcaatttgtcacttttcgttagaggtttagtttctgtcttagtctgcttgggctgccataacaaataacatatcctgggtggcttaaacagtaagcacttatttctcacagttctggaggctgccagatctaagatcaggatgtcagcatggttggtttccagtgaggaccctattcctggtttcctcacatggaggagggaaagaaggagagataggaaaccagctgtcttctgtctcttcttctaaggataccagttccaccagaagcactccacctccatgacttgatttacctccccaaggccccatcttcagataccatcatattggggattaggatttcaacatatgaatttggggggacacaaacatttagtccatagcagtttcccataatttgacactgcctcagttagccattggagccttaatgtaaaataatttccttaacctaaaatggaatggggtaccttaattgaaatatgtttgcagtttgaatgatatgtaaactttgaagtttacagcttctgctagcagattaaaaactttttttttaatatgacatcagacatttttgaaaacagcactttggacgttgcaatttgcacgtttacttattaaataacactaattgtctaacaacatggctcacattttagttgccaccatactttatcttttaactttatacattaactaagatgtaactgcataaagtacaaaacttgctggctaactcttcagtccacaaagcactatgtaaataacagaagctcatcacagtcagtgacaagtcatgtcacttatttcaaagtctatctgtgattggccactgtgcatacagttcacacacagaagtgttagtgttgcctctctgtcccccatgagaaactcatgatgttttaaaaaaatggataattgaaagagttgaccaacagagataaaactgcaatgaattaacaaaaagtgttcatgaaatactagaagtgatagttgaatcaaatataaatggagttaaagaagaaatagctcaccatggaaatgtggatgctttcaccatttgaaagactatagatatacagccaaaggaatttagtgaaggtaaacttacatacatgatacaagtggtatgacaaaaaggatgaagatgtcccagaggaagtgacactagcaaaaactttgcatactgaaggagctgtcagagatatttcatgatactgaaagagcaaaggacaaaatgttttaagttgatccagacttaggaaggagtgtgacagcttgccaaggcataaaagatacttgctccacatcataaattatatgattagaagacaagcactatttaagctattcttgttaagttttcacaaagaaaagtaacacttctcaatgtttttaatgttttaattacagtacactaaataaacactagttttgctattttttccatttccatatgtacatttataatcaacagtaagagtttttaatgtttttaacatgaacttttatcttggaataattataatttttcaattgattattaagattgctttacatgctgcctgtatattacaaatatttgtatattacaagtagtagtttataaatatttattagttctggtctctgcttttgagacacaggataaagacttaatctagtggggaaattagttacataaatgaattatatcattcaaagtgctaaggtatactttgctgctttgacaggtgggtcagtgaagattcagaggtggtaatatttgagctggtactggtgcatgattttgccagtttgataaagggggaaaggaaaaggtgcctatcaaggagatctgaaacaccagcttgttccacaaactaggccagaacaaaagctgcatctgggtgtggtaagagctactagaaaaaggcaatgtggggcacagatttgtggaacctgttaacggattataagatacttcagtaacagactcggaaagttttggggtttttttcttttccctttttttttttttttttttttttttttgagacggagttttgctcttgttgcccaggctggagtgcaatggcgtgatctcggctcaccacaacctccacctccagtgttcaagcaattctcctgcttcagcctcccaagtagctgggattacaggcatgtgccaccatgcccggctaattttgtatttttagtagagacgaggtttctccatgttggtcaggctggtctcgaactcccgaccttaggtgattcccccccacctcagcctcccaaagtgctgggattacaagcgtgagccaccgtgcctggcccagacttggaaagtttttaagtggacaaataaactgatcaagtttgcattttaagagacaactctggatagtgttgtaaaaaatggtgttatagtaattcagggtagagatgttggggacctgaactaaggcaatgtaaaaggaaaggaaggaacaaattaacagctgcttaagggatagactccgtaatacttggatggaaagaaaagctgagggagaggaaaaagtaaaatataacttgtagagatacatattatctaatttcaaagatataaggattagattactataatgactgttctgtgatcttggtgtaggcctttccttactttgctggatggggtgggggcagaagtatagggaggaaatatttgtatgcttcatcgccagtgtttttttttgttcatttctttgttgttttacattttgttgattaataataacgctatatgagagaataagattcagcagagttcaaaagtatatgttgggtattcttttcctgtttttcatggttgtggaaactcatattataaaaacttcagttaggtcctggatgatagtgttgtagattgcactgttgagaattcttttcctctagaatacagagtagttctagaagggagggttgtccctctagaaatagattaagagtaatttaggaattcacttctggtctttctagaataatctaattaccaatgaacagtcttaaggaagagaggaatgactcagaagttattccaattatttttggacagtagaagtcttaatttctagtataaaaccaaaagtgagtacattattgttattatttttcttaattgcttctttgcattcatagccatttgtgttctttggttgtttcaaagtctgtttaattttgcatattagtatatgcattcttcaagtagttatatggctgctaaccataacctctttgagtttgtctgtggttgccattattaaatcagagaaagacatgcataataaaaatattcctttatttaataatctctttgcctccttgtggatgttctatcttctttctcctaaatacctatttccttaagagatgtgcaggataatcatcaggattttactgtgaaatgtaaatgagtcctaacattagtcttttggcctcatattcaacatacccagacttgcttctcttctgcgtaactttatcttggctaatggcatgtaatttaagagtgccacctctgaaatcacactcatctagagtcaaatcctaattcctacatatgctaactttatgaactttagccaagttatgtaacttctctgtcctttggctccaccccccgttttctcatctataaaacaaagagattataatagtatttaccttttaacatttttttctttttcttttttgagacggagtctcgctctgtcgcctaggctggagtgcagtggcacgatctgggctcactgcaacctctgcctcccaggttcaggtgattctcctgccttagccccccgagtagctgggactacaggcgtgtgctaccacacccagctaattttttgtatttttagtagagacagggtttcaccatgttagccagaatggtctctatctcctgacctggtgatccgcctgtttcatcctcccggagttgctgggattacaggcgtgagccaccgcgcccgccccttttaacattttttgttggaattaaatgagaatgtgttaagtgcttggtacatactaaatgttcagtaaacaaatcttagtgctattatcatctatttaattatcaagctaggaactttctagcttcccctcttcaccttccagctgtcctctctcatctgaaatcagtgtccttgagacccatgattctagcttagacaactccctcatatttgcctccttctcttcaccttctgccttatgtcaggccctgctctctagaatgttgtggtaaattttctgccagactctaatttgtgcttcataatcaaatcaaaattatgttaataaaacaatctgagagcctccattgtctacaggatggtttctcttagcacatttgaactcccacatcttttaagacccaggtaaaaatgccatgttaacctaattaatctttcacgtttaatgttggttgcctctgtgacattttgttcttttatatttttagctcattttacttgtctgtgtctctcacttggactgtaagtgccactgggatggtaattcttattaatttttatattccattgcccaacttagtgcctggcatatgatagttacttggaaagtatttattaattagtgcattgattatacacctgaagagccacactcttcatctgtttgcctcctctttcgctttttaaaggtctgagtgactaaagagatcagaacaggagggcacatcctaaaagcaggatgccccatgatccccaactctaaaatcgaaagagaagtttgggaggagaaagacctaaaggggtcaagagtaaagacaatgtatgattgaatattgagattaatgtctagtgtcctttacatttcaatcaatattaaggataatattataaacatcgtttttacaaacttaagcattaattttacttgtaggccctgtctttacacattattggcaatagagtctcagtagaaacatcagaagagtttcaggcattggaaaggaaagcaagttaaaaactcttctattgtcatcgtttagtaaagaaaagaaacccaggcctaagacaacaacaaattgtatctgggaaactggaaataggttaattcttggtattctgggaaagatgactagggagtagccaggtgccctacaatttgatattcctcaggaagccattgtctccctcacaacttggcagcagcattccctttcttaccccatccaactcactctctgcaggtgccattgcttgcagtttttcttacttctcaagttgaaacattctgcaaaaggctttatgatacagttggtaaggtagagtgttgctagtcatataggtcaggttatttttggttgggtaatttattgtatgatttggaacctaactatgtagtgtttttctgtgatgaatctgaattctcagacttacaagtggacttttagaacataaacactttgcacaatagagattgtcttgagcaaagaaattcattctttttagaagatgtgagagagaacaggatgtctgttcagttttatttcctttttctaggggaatctctgccactcttctagttagtattgaagtatattttaattctgaagttgaagataaaatggattcttcagacatacaacttgtattagtaaattataattttactaattataaattagtaaaacttgtatttgcttttattgatggtttaaaaataagtttcttgttgagattgttttgagtaatgagagatctttaaaattttcaaaaggaggattaattcatttgttaaatatttcttgcctgcccagcactgtgctaggtgctgaaaatacaatggtgatcaaaatagacattgcctttgtcttcttagacagtttataatctattaggaaagaaagatagcaccctcctcccccacccaccaacaacaaacaaaatgaatataaattttgatcagtgatatcacaggatactgaaatacaacagtatggggggacataggacattggagggctagggtagctaaaaaaggcttctctgagaatatggaattaatgctaaaacctgaaagatgagagagagttagacattccaggagtggagtagcatgtacaagggcactgcggcaggaaagagcttagttatatgattcttagaactaaaaaaggccagtgtggctggagcaaaggaagagtagcacaggataaatttggaggagtagataggctgtattgtgtggggctttgtagacctgatacggcatttggattttatttaagtgcagttagaagcagttgcaaaggattttcagcaggggaatggcatgaaagcgctgaaaagatgactctggctgttgtatgcaaagtgctgaatggaatgaaggagaccagttaggaggctgtggcagtagtcagtgcaagagatgatggcagcttgaaatagggtggtgccagtggagactggagtggagatttttggaagtggatttgacagtttgctgataaatgtaaggaatgagggaaagcgaaaatcaatgactttcagattcctagcttgagcaactgggttgacggttggtgctagttagtataataagagtagggataagaaaaaaaattgggttacattttagataaattgagttatctgtgggacatcaagaagagatgtgagataggcagtagggtgtataggctggcgtctgagtagaaggttgggctgctgacaccagtgacgaaaataagtgtcttttaaagctatgagaatggatgagacacctggagagccaatgtaaggaaagaagcacacggttcctagaagatgggaagggcagcagagcgtaggaggtgggattggctttagatagacaggaagagacactttttcatgttaacacaaagacaggaggcccatctgggtacaaatttaagaaggcttatagatgggttggcgtgaaggtgaaagagtttgaatctgatggcttctgtgttttctgcagtagaatccatggttgtctactgagaaggaggaggattctcagaagtgtgagaagttcgaaacaccgtggtagacagaaaaaaatagtaggtttccccaagggtgtcttgggcagtctgcctggctatgaaatgaaagagggaaaagtcctctaagtttaatagatgagcaactaagtggtataggtaaatggtatgagcaagtagcctgaaaagcaggagaaagacgttttctggtctgctgagtctgcatggcttgcttacagtaggtcagaaccagcttctttagtggctttgtcactagaacactgggattgtagtgttctttacctccagtcaactcttgattatggtaatagttatatctcatttggggctcaagaggatcctaaaacaaaagtaaatggtacagagaattacaatattagcagagtacaaaagtatatatttatcagaaataagtcacgtgcccagaaaagttatctgtgcttataagtcacaatgacatgttgccttagcaaagattatctaatgtaaactttgcttctagtttatggacgtgtgagaatactaaacaaattttgcatttctttcctgaattagtactttaaaaatatgcaactagaaatttatcctccctaaaagtaatattttaacctcctcttcattccaaactctaagttgcttacttatttttaagatgtggttacttaaggtaagaaaaagtaagttatttgatcaactttctttttttaaaaaagaattacttcatttttctctttagtctgacaacattatggcattaaataaagtccaagaggtattgggctggtctttgtttggtctctggtggtttagatgaggcagaactgagtctccaggaatctgaatattatctcaaaaagttagtagcagccactgtgcaaagtttgaaggcccaagtcaaatctggggcatatccatggatgtgtggtaaggcataggctccagctctcgtgcagaaacaacaggagtgggatttgatcaactttctatgcaaccttgaccacccagagtcaaggggtcctcccacctcagcctccaggtagctaggaccacaggcacaggccaccatgcctggatttttttttttttttttttttttttttttttatagggatgaggttttgctatgttgcccaggctggccttgaacgcttcggctcaagccacccacccacctcaaacctcccaaagtgttgggattacagacgtgagcctggccaataattgcgtcttagtagcctgtatccaaacagtcaagtaggaattggtaatcttattaggaaaacattaaataggatgttttcaataatgtctcccttctctgtgctcatattttctaagtgtaagcaagctggaattgcataaagtggggcataatattttctctagcaaaaagctttgaaatatgtatttttttcttttttttctttttggtgactcatggagtgggagagcactgtgataccaaaagctgtttggtagactaagcaatatttactcagcctctaatgatgagaaacccaagccttctgttccttagaatacacagatgtttatttgtaaagcaagtgtacgaccactttctgaatttgaggagcattctgttacagttgagggaggatatttttgttgattcagtcaatgttgtagcaatttgcaatgttaatgataggagtttgagtgtctgtcagatactgttatgtgcacgtgatacggtgtgatgggatctgttaaataagggaggagggacacagaaataattctttccagaatgctggcaaaatgttttgaagaattaagatattttactaaaatttattatagaagttagaattttgctaggtatagtaaactataagtagttcttgtcttaaaagaattactaaacaagccaaatttataagtaaatcataaaatcccttttcttccccagagaaggaaaacaagtgatggcttcataatagtacagctttttaccccccacgccccacccccgagcctttttgagaaagcttgtatttgtgatgggttacttctgaaagtttaacatcaaaatttaaaatataagatatactgaataaaagttggcctgtacctggaggataactgaaaatcatgaccttggagaaatggactctcagagcaagtttttgagcgtagtctatgccttgaatggttttataatgcagatgaatgaatctactccggtgatgtttgctaacttctggccaagtgccaggctgagtgtgtgtgtgtgtgtgtgtgtgtgtgtgtgtgtgtgtgtgtgttgcacttggtcatctaatgtttgaaataccaagcctgccattctggaaatcagaaatgtttatttagaacatagtccagagtctagattagaacatgtaagggagttcctgtatggaaagttttccaaagctttagtttatgcaaattcagggaatatcaacagttatttcattatggattttgatgccacatggaaaactaaaccactactttagtgatacagtagtattttcatttgcttgccattattcgtaagtattttaaagtcatcataatgtgttcatgcttctactcagtctttagctagaggaaagcttcaatgtgtggatgtctgaaatctgttctgcacatagtgggtttttcaagttacagttgcatagtctgttatgatttaacttgccactttagagacaagctgtgctgtaatacactagataactaagtgctttcaagagttaccgcatctgtgccgggcgcggtggctcatgcctgtaatcccagcactttgggaggccaagggggttggatcacttgaggtcaggaattcaagaccagcctggccaacagagtgaaacccagcctctactaaaaatacaaaaattagctggactgggtgtggtggtgcctgtctgtagtcccagctactccagaggctgaggcaggagaatcacttgaacccgggaagtggaggttgcaatgagttgagatcacatcactgctctccagcctgggcaacagagcaagactccatctcaaacgaaaaaagagttgctgcatcgagataaactacctcacacacacacctatatacacaatttgtgcagttaagtgcttttttttttttttttttttgagacagagtcttgctgtgttgcccaggctggagtgcaatggcacagtcttggttcactgcaacctctgcctcctgggtgcaagccattctcctgcctcagccttcccaagtagctgggattgcaggtgtgcaccaacaggcccagctaatttttgtatttttagtagagatggggtttcaccatattggccaggctggtctcaaactccaacttctgacctcaagtgatttgcccaccttggcctcccaacatactgggattacaggtgtgagccaccgctcctggcctttaagtactttttgatgtgcagttagtttttatgcttgcctgggcaaatgcttctcagttggtgtaccatcatttttctcaggattttcatcagtgtatacaatttgtttttgctactaatgaatagaataggtatgttcttgtgatagtctgagcagagccaattgtgtgacttgatatggagatactgttagtttcaaaataagataggtagtgtgatataaagccagcaccaaagaaagagctaattttctggaagttgggaaaacattgctttgcctgtttgagggggctcagtcgggtctttaggaagttttgaagtgatactctgctgaagggcaaattagtgaatgataattataaataattataaatgatctgaaatacgaaatcatttcagccacttttaaaataatgctgtaatagctttccctttttaaaaatgaagctaaaaatactccttgggtctgccatttcctttctatctaccagctattattctgtgtatttaccagctattattctatctattgatcgctattattctccttgctgcagtaaaatatccaggaaaagttttctgtatttcttatttgtacttcctcacctcccaaccattataactgaaatggttgtcatttccactctcacattaacttcttgcacactctcttgcaagagtgaactcttgcatacccccatcaccacacttcttcaaaattatcagtaatgattttgaaacaagtgactactgcttaaaaccatttcctagacccacagagattctgatatatttggtttgagagatgtcaccaaggtggtggagtatctgcccataaaaaaaatacagacagctgttcacaaaccaaaatagccctagtttagggtggggccaggcatcagtattttttaaaagctgctcagatgattctaatgccaatcaggcagaaaactactgctctagggccttatctcatacatagtaacacctaaaccatgcactgtgacctacaaggctcctgcctggctctctgatgccacctcctgctgatctccatttcctctcctctagccaccttggtctccctcaatggtgctggaactttgttttgttcatcatcatatctctagcactagaacagtgccttcttgcacacagtacatgttcaacaggtatttgttgaattcacgaattcagcacgtctgatgttcttattctgtggtagtgattactctgcaagtagtgctgactaggttggtagtgtgttgagtcttcaggaatgctactgaaaagcccagtatttgaacataagtcacaagcccccacagtccagcttacccatcttctaacactgtcttctacttcgctgtcagaacacctacttttctgtttttatcttttgccatgagtggtattgacacttctgatttttttctggtctcctatttctgcttttattttgtgtaattttttttctatattgttactcatccactagtttctctgggtaaaaaagactagttttaccagcgttgccagtcagtaagagagcttattttttttctgtgggtaaacggaccactcataggatgtccagtatgtaatctttggatcctatccccttctcttggtgggtgcaggttgatagctcctttgatgagaaactgaggtggaattcatgggggagggacaggttttaaagggaaggatgagtatcaggggagatatatgtttctgaggtcacagttggaagcctaattgatggaaaattgagattttattgtaccattatctaagtgcaagataacactgcttacaacaggggcctgcaaagttttcttttcttttctttcttttttcttaagtatggatagtaggtattttgggcttttgggctttgtgggccgccatgcagtctgtgtctaatgttgtggtgcagaagtagacatagacaatgtgtgaacagagtagtgtggctgtgtttcataaaactgtttatgggcattgaaatttgaactttatataaaattatgtaaaatactgttctttggattccccccccaacccccaccagttaaaaatacagtcaggagccatgtaacagtgtttcagtcaactacagcagactatacaaccgtggtcccataagattaataataccttaattttactataccttttctatgcttagctacacaaatatttatcactgtgttgcagttgcctacagcattcagtacagtaacatatgtacaggtttgtatcctagaatcaagaggccataccatataacctaggtgtgtagtaggctatactgtctaggtttgtgaatacgctcgttgatgttcacacaacagtgaacttgccaaacatcgcatttctcagatcttatcccccttgttaagtgactcatgactgtacaaaaactgttcttagctagtgagccataaaaaggcagaaggcaggatttggtccttgggccattcatagtttgctaacctccagcttcacatttatgtagttttgacttggaaagtcgagttcttgaccagtagtccttttcatacctcacattataaaaattctttagattttgtggttggtggcacattacctctttattagtgtccatatgtaaattttgtacccaaaagctccttatcacgttagtgtctttgccctctatgttttagcacctactcctgggccacattgtttgagcctgtcttttattatgtctttgcagcgccctgcttctacaataaaacagctgttttttttttttaatttaataaacattcctttcaggctgtaacaggtgctatggaggcccccctctttcactgtagttcacctgcactcctggtgggcagatccccaacatgctgacaagctcttttccttaggtgcagggatctctgagcttgctctgcctgagtgcagggcagccagccccatgctggcagccaagaagtgttaagagtttttaatgtaatggccccaggagtaacccttaacaaggaagtggagagatacctcatctttctcctctgtgggagagttctgaggcatgccctgaaggactgaactgcaggtgctcacagcagtgaggaacctccagttggcttttctccccatctcactttcactgatcccctcaagtgtgcttcctgggatttccttcccacaaataagctgcttgcacccaagttcttaggtcagggatgccttctggaggaacccaagtgacatgtgctggtggactcatagtgctcttacagctctttttctccttgcctccccacggggagtatatgatggagcttccttagtgggtgacattgacactagatgtgagaaagaaagtattacaggttgaatattccttatctgaaagcttgagaccagagtgtttctgatcttgaattttgaaatatttgtattgtacttaaccggttgagcattcgtaatccaaaaatctgaaatctgaaatgttctaaagtctaaaacttttttttttcccctgttttctgagcattttggatttcagagtttcacattagggaggctcagcctatatatactacctaccgatcattcagttcagctcaacagtaactctacttgattaccagcattctttgcaggttatctttttctgcccttagttttctgttcctggaaagaaaagtaatatgtgatcagtcatctaaccttggttgtcttctataaggtagatcagaattttctgtttccaaaagttagttggcaaattctgtgctagaaagtagggtgtagggtactatatacaattaagtatcactgttaagcaagtagttataaaatagcagttacatgcattcttttgccaaacttcaaataacatgattggcaggactttgccaaaaccacagatgttgaaatttcaaaatggtaatacgatcacaagtagctgtagccgtaattctcccattaaaatacttattgattaaaataggtttttaatgtctggagaattgaaagtctttttctacctgtggcatgtttcttccataatgagaacttcagtcgtatcaagtaaatttcaccattgtagaaggtgtttcagccatataatcaatgtggaaatctgattttttatttagggatagactagttatgtgtgtgtgtgtttcaatttctagattaatacatacttttaaatgtcttaaagttgataaactctttttaaaggtacgactatattaaaatgagctttatctcagaagcatgatagttttaatttttatttgcaaaaaattattcacttttttttttcttgaggtaggatctcgctctgtcacccaggctggagtacggtggtgcaatcacagctcactgcaaccttgatctacctcccaggttcagtccatcttcccacctcagccacctgagtagcagggactacaggcacatgtaccatgcccagctaattttttgtagagatggggtttcaccacattgtccaggctggtcttgaattcctgggctcaagtgatctgcccgcctcagcctcccaaagttttgggattataggcgtgagccactgtgcccagcattcacatgtttttccttcccctggaagttgttttccttgagacagagtctcgctcccttgcccaggctggaatgtagtttcacatcacagctcgctgcaaccttgaccttatgggctcaagtgatcctcctacctcagcatcctgagtagctgggactacaggcacatgccaccatgcctggctaattaaaaaaaaaaaaattatagagatgggacttcaccatgttgccttgcctggtctcgaactcatgggctcaagcgatcctccagcctcagcctaccaaagttctgggattacaggcatgagccaccacgctgggcctgttctttttgtgtgtgttttgttttgttttgttttttgaaacatcactttccctttttttggcacttagtaagtttaacatacagttgatcccagcagtctttactttgattgcagctttaaaaaccaacttcctatcctagtcataagtaaataaataactagttgaagttggattttactgctacaagtttattgttacgacctgccttatctgggggtagctaaatcttgtgtaaattacattcttttctttatttggtttcatttagttgcataaggctgttaaatagttgaacagatattaatgtttcctgttatacttgtaccaaaacgtgctcagagaaaaatgttgggcagtgtgactttagatccattttcggggatctatttgggagagcacatgtggccagaatgtagttttttatttttttatttttagagctttctcttaagttatagtgtttctcatgggtgttttccctgttcctcctcttcacctaggatattggtctctgttcactttggttccccatcttttcaccacccattattcaccttcacacatttctgcaacttcataaaccacagtctgttcagtttctcatcagaatgttattgtccattcctataggacgagttccaagcccaccaactccttgtctttattaatccttcctattctagccctcaggattctgttttctgagaataagagggtactttctctgtcatccatgtgtcccattttgtagttgactcaaacattcttagttgccctatatattctgcctcagctgccttgtgtactggcttttcaggacagagcgtgttttctcagctgttaatgtttcttttgtacctgtcacataacagtaacttagtagttaattattgctgttaaatacccaattatctagttttctgcttttaatttctcaaaatcaccttggtgatttttaagtgatttgtttattgtttgttttttatagatgtaaaaaaagattggtctgaccatgctctctggtgggaaaagaagagaacttggcttctgaagacacattggaccttagataagtatggtattcaggcagatgctaagcttcagttcacccctcagcacaaactgctccgcctgcagcttcccaacatgaagtatgtgaaggtgaaagtgaatttctctgatagagtcttcaaagctgtttctgacatctgtaagacttttagtaagtattacataaattcttcttaaaatacgagttatgtgatgtacagatgaccgatgactgacatagcttatcccaagggatggggcatgggctgaactatctgtatatatgtatgtgtgtgaaatttctacttcattaaagtttttatattaagataaatgctgggttaaggtggaacaggaagaacctagtagagattctttccttactagaattgtatctgatatttaatactttatttttatggagaggttaaaggaacaggcactattttcaggggaacatacatggctttgcaatgtttccttcacataagtcactatttgattttagtgattcaggcagattgtgtcacttcctccattgaaggcctgacacagctcctaaggaaatgactatgagtgttgtcttccttcaccagtctacaatttgaacatctctgtagtatttctatttatgcattctgaaatgagatgtgggttactttggctgacccagttatgtcatatgacaggaagtattcaaccatctgagaaaatgtgaactgctgtcactaccactagtgcagaactctgctgtattttttcctatttgagaaattcttggttaaagatacatttagtgacttctcatattttaattccaaataaagtactgcagttttttattcatgttaaatttttaaattatactagtaatttataaatacactctgttgtaaaagaatcaatgaatatagacatacatagtaagctcccccttcccctaagtaatcattcttgacagtttggtgattttctatgcatttatttgtccatacatatcggattttttttaataaataggagcattttatatgtattttttaaacttagtaatgtcttagagatctttctatgtgttatacattcttttaagctgtaattcagagtatagacgtactattaatttacatccaattacttcttggcctttttggctaagatcaagtataatttataaccacatttccctgttaatgatcagttaggttgcttcactcttagagcaaatgctgcaacattttcaaatgttttaaatattgctgaaaacatttgaaaatattttagttgggctagcgccagagtacccaatcttccttgctggtgtcagcacccacactcactgctagagcctgtgggcaaatgctgctcctgtacaatgcctcaagcactgacctgtggacagtatggaggtgctgagactacctacctcttaacccagagccctgcctgctgcttatgcctgtaggcttggagcttggaggagtctgaatcctcacccatttcttgtgtttagtttgggctgtggcttcccttaaaccaataccaacttttttctgtcttcaagaatcactcattatttaccctcttactgtagtttcctgtctcctagcactgttatggatgttcatcttccctccccgcctacaatttttaaatatcttttgctgtcatttcaggggattcgggatgtaggaggggagatacaggtagattcacattgcctttttgatctaatgcccttgaaattttttttaaagtgaaacagggtttttattattattattaaaatagagaaaaatacaaagaataccaaattcccattatctggaattaataattgttgatattttgtcattttgtcaaatgacaaatatgacttgaagtcaaagtaatactggtaaaattcttgagtctcattatcctaacttccctttacaaagcaactactatcataagttcagtgtgtatccagtactgtaaaatacacagacacacacatacacacacacacacacacacacacgtatctctgtgtgtatatatccataaactgtatatgttattgccattaccacgtaggtattttcttactaagttttgtacgtgtgtgcaagaatttctctcgagtatccacctagaagtagaagtaaaattgctgttttaaatatatacataattcatttcagagtactgtcaaattgtctcccagttggttataccagtttatattccaactagcaatgtatgaaaacccgttgccacaaatcctcactaacacttgattatggtctgttttgttgtttttgtttccaagagaaaaagacagtattttgttttagtttacaaagctaaatatgtttttaaatcattattggacatctaagttcctttttttaattgtttatatcatttgtccatttttgagaaattaataaactgtagtttttacaggagttgtaggttcacagcaaagttgagcaaaagtacagagaattcccacataccctctgtcctcacacatgcacaaccttccctactctcaaagtctgtaccagaatggtacatttattgtaactggtgaacctaccttgacataccattatcactcagtgacagtagtttatgttagggttcacttctggtgttgtacatgctgtgggcttggaaaaatatatactcgtgtatctactgttgtggtattgtacagaatagtttgactgtcctaaaaatcttctgtgctctgcctattcatccctctctcctcatcaccaccactcatccttttacctagttttgccctttccagaatatcatatgtttggactcatacagtatgtagccttttcatattggtttctttcacctcgtaataggcatttaagtttcctccatgtttttttgtggcttgatagcttatttcttttttttttcttttcttcttcttttttttttgagacgagtctcgctctgttgcccaggctggaatgcaatggcgtgattttggctcactgcaacctccacttcccgggttcaagcaattcttctgcctcagcctcccaagtagctgggattacaggcacctgccaccaaaccgggctaatttttgtatttttagtatagatggggtttcatcatgttggccaggctggtctcgaactcctgacctcaggcgatccacccacctccgcctcccaaagtgctgggattacaggtgtgaaccaccaagcccagccagctcatttctttttagtgctaaatagtattccatcgtctggatgtgtcacagcttgtttatccactcaccaaacgatatcttggttgcttcattttgaataaagctgctgtaaacatctgtatgcaggctttcaagtggacatatgtctgttcgtccattcttcttttgttttatcgttcaccattgatttgtagttctttataaattctaatatgtgctgcagataatttctcctggtctattataaacctttgttcgtgattgattttatgtactttttatttttgtcttttttggtcatgtagaagttaacattggtttgtgtttgtggggtattgtttaaaaaagctattcctattttgaattacaggtatcatctatattttctgctagtactcttagagttttgtttttcatgtttactgcttttatctacttagaatttacttttgtgcatttggtgaaatagagatgtagtatagcatattttaggagaaaatgctagccaacactgtttattgaattgtctgttatttctccacataagcataatgtcagctctgtcataaaccaaaattccatgttgtgtggatctgtttttgtatgctctcttcttttccattgatccatttatatgtccttacatggatagtacactatttgaatgtctgtagcctcataataaatctctatatctgatagagcaagtacctcttctttgctgtttttcagaattgcgtgggttgattttggaattgtatgtttctatatgaaatttgaaacagtttgttaatttctagggaaaattccatagtaattgattggaaatgcatgcattaatgttatgtagatcttaccattcatgaataaaatctgtctccttttgttgaagtaatcttttttgcccttaaatcacattttgtctagaaagatattgtgctttttaaaaaaagttttcttccaggggctttatactttttctaattggatactgctattaggaatgctgtttattttttttcttataatctaatatctgataccttactgaactctttgataaattctgataatttattgattctcttggattttcttgtttttttaatttttatttattttttgttatgtatttattttgagacagagtctccctctgtcacccagtctggagttcagtggtggtatcttcgctcactgcaacctccacctcctggattcaagtacttcttctgcctcagcctcccaagcagctgggactacagttgcgcaccatcatacttggctaatttttgtatttttagtagagacggggttttgccatgtgggccaggctggtctggaactcttgacctcaggggatccgcctgcctcggcctcccaaagttctgggattgcaggcatgagccaccatgcccggccttctcttggattttctatgtaagcaatcatgtctcttctaaataataacttttctctcttcctttcccatttttatacatcttatttctttatcttatggtattggattaaacctctagtacagtattgcataatagcggtaatgatgactgttgttgtgttgttcctgacttaaatggaaatgcttttaacatttgacattcagtttaatatttgttgttgttttggggggagatcttttcctgttttgttttgttttttgctttttgagatagtatcttgctctgtcacccaggctggagtgcagtggtgtgaacacagcttgttgcatccttgacctcctgggctcaaatagtcctcctgcctcagcctcccaagtagctgggaccacaggcatgcaccaccatgcctggctaatttttatatatttttttttttgtagagacagggtcttactatgttacccaggctggtctttaacttctgtgctcaagcaatccacctgcctcggcctcccaaagcagtaggattacaggcagcagccaccacatctagcctgttttttgttttaattgctagcgcctttaactcaagaatgcatgggaattttaaccaaatggagcttagggagtgacttgcccaagatcacgcagagacagacaagaacctacctatgtggttcttgtcactctctgagacaagaatctggagctccttataccttacttccttatacctatcttcactggcatcctgtcatcaaatctcgtcacttttttcctataaaatgttttatgcattaattcttcattccacactctgctgtatagaatgaagttagatgttgagaagattttcaggttgttacgctaacactgctccaccttcctaaatatatctgtagtgggtggttggtctttcattactactactactactactactactactactactgtttttggctgcatggcattgaacttctggctctgtgtttggaaatgtcatatcttatgacatttccaaaatgtgagacaaagcccacctccctcctacagaaaccataaagtccagatagttgtttcccaaccctcctcatagatagagtgcaggcagttggccaagtctaggttacgtgcacatcagaaaatgtctcctagaactttgaatcaggaactcgtgactcaagccaggataacaaatacctcattctagtggcagaagtggtagcaacatctagcttctaaggacagagaagccatatccagtgagagcgctcatccatgcattgagtatattggcccatttactcccgagggatctcatagtgttagaattttgtgtttgcaatgttagaaatttaggttacaaaaagatactatgtagtaagcatgtctacattatcccatttatgtttaaatatccacctaaagatatactcagaggtatttcactagaatgttgacagaggttatctcggggtgatatttcaagtttgtgctttttatccccagttgtgttcttacacttttgcaatcgtttgttgttgctgtttttaacaatttaatatgtaatatttgtataaacaagaaaagaaagctatctttcattcaaggatcaaaatcacttttagctttttatgtttttgtttatctctagaatgtaaacttctaaagtcagaaacatgcctttccatctttgtattctcagcatagggcatgaccttagagaacattaattgaatgaataagaggaaaaaaatgatggaataaagaaataaggatcagttaatcctatcactgggatcgaatggaaagtaatgatctatggccaggcatggtggctcacacctgtaatcccagcgctttgggaggccaaggcaggcagatcacttgaggccaggagttcaagaccagcttggccaacatggtgaaacactgtctctactaaaaatacaaaaagtagccgggcatggtggcacacacctgtggtcccaactgtttgagaggctgaggcaggagaatcgcttgaaccgggaggtggaggtcgcagtgagccatgatgacaccactgctttccagcctgggcaacagagtaagactctgtctcaaaaaaaaaaaaaaaaagtagtgatctgttacaggatgttcagggaatttctgcttcactgggtagttacattatatttcctctaaacagtcttaacagctgttaagggtctgtgaactgtcagtattaatgggtagaaatttacataatattttgacaaattataagactaaagtctttcctgcagaaaagagagggtcttaatgagtggtaattttatttgtagatatattagagaatactccaagaactaaggcacttgattatgaaattgtcgaaaacaaaaggggttgtgctttatagactagtcgtgtttacatgaaggagcagataccaagggcacagatttcagaaatctaggaggtacataaaatttagatgatcacagtatttggtgagagtccaagtacttgacatgtgtgaatagatagatgtcttctcatgctggcagcacgacagggaaggggggtatctgatagcaggctctgtgctgcagtctacttaacatcatgaagaactgggggtagggtgggggtcaatatcacagagcagggttcctaggatggggtctccatttggaggaaaccaggagaaaaactagggtgtaaagatccagtcaaacagttacacaattgaggtttggctacaaaagtaaataagaaaacagctaattggtcttaaataataatgtaatatatatttaataaatgcatatttaatacataatttaacactgttattgctataaatattcctcagaagtctataaaattttcatatgtgtgttagaaaagagggaagggtatttgatttgccaagtgattaaactgtgttggcaaactctggcctgcagcctgctttttttttttttttattttgagatggaatctcactctgtcacccaggttggactgcagtggcgcgatcttggctcactgcaagctctgcctcccgggttcacgccattctcctgcctcagcctccctagtagctgggactataggcgctcgccaccacgcccagctaattttttgtttatttagtagagacgggttttcaccatgttagccaggatggtatcaatctcctgaccttgtgatccgcccgcctcagcctcccaaagtgctgggattacaggtgtgagccactgtgcccagcccacagcctgcttttgtgtagctcaagaactaattataattaggctcttatatttttttaatggttaagaaaagttaaaataatattttatgctgtgaaaattataaaaattcaaattcccatgttcataaataaagttgtattggaatatggctacattcattggcttaggtattgtctgtggttgcttttgcgttatagcagcagtattgagtagagctgcataccctaaaatatttactatctttacagaaaaagtttgccaaccccggaattacattatgggaaacattagtggtttatttttttcttttttcaccactgaaactgaacactgaagtgacagtatataactcttcccaggaataattagggttttttctgttaattattttggattagttgattttcaacccaagttattaaatatttccccttaattaatttaactctcttgtatctactcttgtggcttttgcttacttactgtacgagcagtagaattaaaactaagaaagatgaggacatttccattgctaccaaaatatattgttacctaaggttaccaagtaaatgtgaagggtgtgccaaacactgaaaaaggacagtgatccaagaccagcagaacactatttaaagggaaataacctacttttgctgaacactgacatcatttccaagctttttatttggtaaaaattatctttcttttataatttaactcttgagaaaatgcttctgtgtaataattttttcttccaaaaacgcactttcagatcagtgcttctgtgtaataattaaatgaagtttttgttgcattttccttttcttttggacagaaagactgttgtcaaagaacgtcatttttttttttaatgtaacgtattctggcacacaggcttcacaaatgaagagccttcttaagaggaaaggaaactttttctcccaaaatctgacaacagagagctactataaaataacatattttgtgtttagagcttgttaccattctgtgttatcaataggacatgtcatttgggtctttcggctttagatacatgctaattcattcctattttttctctttctgttctagccttatgaagaagaatctatttgatagggatggagaagcacaaaatgctagtggaacagaactcagattgactaaagctcagttgtgtttaaaaaatttttgtaattataaaagtgatttaggtaaattaagctgtacataaggactctgtacaaaagcttttagtggtaacaataaagattggatttttatttactctattttaattaatttatttatttttgagatggagtctcgctctgtcgccaggctggagtgcagtggcgcaatctcagctcactgcagcctctacctcctggcttcaagcgattctcctgcctcagcctcccgagtagctgggactacaggtgcgctccaccacgcccagctaatttttgtatttttagtagagacagggtttcaccatgtttgccaggatggtctcgatcccttgacctcgtgatccacccaccctggcctcccaaagtgctgggataacaggcatgagggatttttaaataaagatgaaaaggaaatgaaggatcacttaaactacttttttgtactgcagcctccacctcccgggttcaagcagttctcctgccacagcctcctgagtagctgggattacatgtgcccgccaccacacctggctaacttttgtatttttagcagaggtggaatttcgccatgttggccaggctggtcctggactcctgacctcaagtgatctacctgcctcagcctcccaaagtgctgggattacacgcattagccaccatgcccagccagaaatctagatttaacagtgccttaaactaataagagccttctttttcacataagaagttacttgagaaaatgaagtggttgctggaactggatttgttgttcagttgtgtcttcaaggacaagctctttccatccctcagttcctcacccctcagcatgtcaggttggcctcatgattgtaagatgcttcctagagctccaggcatacgtgggttgagtagccctcatctgaaatttgaagtgctccaaaattcgaaactttttgactgccaatgtgacattcaaaggaaatgctccaatgagcattttagtaaggttaggggtgctcaacctagagctgcattcaggaggcacctctctctctttcacctctctctcttccacacctgtgtcctaacagcaaagcagaacatcccagaagcccccctcacatcctcctggcccaccttgggtcatatggctgcccttagctgcaagggagactgggaaaacatgaatatgacttgacttttccagtttccttatgctagccgcaagcaagagggctgagaaatggcaggtcagttagcccatcagcagacatgccacatgcctttttaagtatctagtcagtcaaactgagcaatagagccaggagtttaaagaaataaaaaatgaaatttttattgaggacccaaggggcgtcttataagccatgtcctttaattttatttatccttttgatcagctttgttaaggtataatttaaggcaaaataatcgtaatggcaaaattcagtgcattttgaccagtggaccaccagcaagatgtaggacagttccctgatgcccctctgctggcagtcctctttacccttccgacctctgccaaccatttatctgccctctgctactatagtcttgccttttctaaaatgttagataaatggaatcctatagtatttggtcttttctttatggcttcttccacttagcataatgtgtctgaccttcatccatgttgtgtgttatcaactccatcttattactgagtagtactctgttgtatggatataccataatttgtttatccattcaccagtcgaagggctgggctcattattttaaaaaaaagcttctatgaccattcacttacaggtctttgtgggaacataggtatttactcaagaacaataaaaactacggtaggtttctgggtcatatgataagtggatgtttcagcttgtaataaatagtcaaattcttttccaaagtggctgtactattttgcattctgccgggcagtacttgagagttccagttgctctgtgtccttgaaacatttttcagtttggggtattctagcaggtgtgagagcctatctccttgtggctttaattcgcattaccctagtgactaatgatgttgagcatctattcatgtgcttaattgccaccccatataatggtgaggtgtctgtttgagtccttcgcctgtccgtctttaaattaggctgtcatctgattgtgttgtaagcattctttgcatatcccagatatggacattttattggatatgttttgcaaatattttctcacaatctgtggcttaccatttcattaacagtgttttctaagagcaaaagttttcattttggtgaagaccaatttatgaactctgttgtcccatttcttttctgtttccctcctttctagtagattaaggggtttttggtggggttttttttttggtggggggtggttgttttgattatattcatctccacttgtgaattactagctattacgaccttcgttttgctattttaatggttgctctagggtttacagtatatgactttaacttattcagcctaccttcaaataatatactacttcacacatagtataataaccttacagcagtttagtttcatttctcccttcctgtcctttttgtgtcatgtattttactcctatatatgctaaaccccacagtacgttattttcgccctaaagcagtgaagtatttaaaaatgagcaaaatggtttttcatatcacgtatttaccatttttcagtgctctttataagtatcctttccatgtagtctcctttttcttctacctgaagaacttcatatgcctctcttcttatagtgcaagtctactggttatgaagttttgaccttttgtttgtttatagaagttttgatttggtccaggcacagtggttcatgcctacatgtagtcccagcactttgggaggccaaagatcacctgagcccaggggttcaagaccagcctgtgcaacatggcgaaaccccatctccaaaaaataccaaaaaattagctgggcatggtggcatgcacctgtagttccagctgctcaggaggttaagcggggaggatcgcttgagcctgggaagcaaaggttgtagtgagttgagattgtgtgactgcaccccaacttgggcaacagagggagaccctgtctcaaaaacattttttttttaattttgccttcatttttgaaagacactgcagctgggagaagaattctaaattccccccccccccccaataattgatgtccctcagttgtcttctggtttgcataatttcagagaagtctgttattgttcctctgtatgttttctgtctgccttggaagattttatctttaccttggttatcagcaatttgattatgatgtatcctgaaatagtttttttaagatttattcatatcttcaagtccattgatctttctgctgctaatttgctgttaatcccatccagtgcctttttcatttaagatgtttttttcatcactagaagtttgattttggcttcatttttatatagatttttcatttttctattatgtgtgttttcctctagtttcttaaacatatggagtatttttatatagctattacaatattctttatcatctgagttatttgtgcttccccacccccaccctttactcctgactatgtgtcattatgcgtcatagtggctggatttttttgtattgagtagtcttgaatttttttctgatcaccaaattacttggaattagttggattcttttgctttgaagctttattaggatagaccagaggcaacattagccttagcactaatttagcctcattactgaggtcatagtcttctggggattcttctcagtactctgtctttctgttctccttgacaggaacattaactcttttagccgtcggttctttccacagtctctggtagctagactccaggaaacacctctgcagacctccagagcactctctgtggagctcccttctctcctgtcccctgccccacacattctagccaccttgtcatccctgaatgccatcccagatctctcaactctgcaagaccaggccccatgcgcccctcccctgcccataggcagtaagctggtgcactcagctcatccttctggtctttatttcgtgcatcttgttgcctaatgtctgaaagtgtttctttttcttttcctttatttcttattgtttaaataaaacaggagagtaaatcaagttcctgttaccccaacttacttgaaatcctccattcttaatttttcctagattttcttctagccgtgcatcttagaaagccatcatatgctcactgaagcattacatataataacaaaaccatttctttaaccaaaattttaaactgaacatgctcaaggctgaactcatggcattcctttccaaatctctgtgctccctcttccctcctttctgcccttcctccaggcaatcgccatagtagtaaaaggctcttccatcccaggtacacataccagacacacgggagaaatccttagcattgccctcttcctcacctacacatctcatcacctcgaaatgttcattttgtctcgaggatatgtcttcagtctttccacgtctctccatctccaccctccactgctccggtagtctattcgccaccacctcttcctgctccaggagcctcctaagcactctcctttatccattcttgttctttccaatgcattctttattcagtaagcagaaagatttttgaaattattttttaatcaaagcaataaatgctgaattaaagtaaaaaaggcttataccatgagactactttcctgcccaatttctccccagtgcctgcttgcattccctaccactttctactcgtttactgtttctggcttttattttcataattctaaatatgtgcttatactgttacttcttgatttatcaattttaggtatctgttgatgtttttccactcaactctttctttttttttttttttgagatggagtctcgctctgttccccaggctggagtgcagtggcgcaatcttggctcactgaaacctctgcctccccggttcaagcgattctcctgcctcagcctcctgagtagctgggattacaagcgcacaccaccacacccagctaattttgtatttttagtagagatgaggtttcaccatgttggtcaggctggtctggaacacctgacctcaagttatccacctgccccagcctcccaaggtgctgggaattgcaggcatgagccacctcacctggcctcaaccctttcttctttattataactattataatttttggccgaatcactgtcattgtttacattaagaaagcagacatttttacttcctgagccaaaatgtgtatttttacctttcctgtctcgtatgcctttttttttttttctcctccttttagagattaggtctcatcatatttcccaggctggtttgtttgtttgtttgtttcttttttttgaaagggtcttgctctttcacccaggctggagtgcagtggtgcaatctcggctcaatgcaacctccacctcccaggttcaggcgattctcatgcctcagcctcccgagtagctgggattacaggcacatgccaccatgcctggctaatttttgttgtttttgtttgttttttctgagacagagtctttatctgtcacccaggctggagtgcaatggcgcgaccttggctcactgcaacctccacctcccaggttcaagcaattctcctgtctcagcctcttgagtagctgggattataggtacatgccaccatgcccagctaattttttaatttttagtggaggcgtggtttcaccacgttggccaggctggtctccaactcctgacctcaggtgatccgcccaccttggcctcccaaagtgctgagattacaggcgtgagccactgcgcccagcttactttttgtatttttagtagagatgaggtttcactatgttggccaggctggtctcaaactcctgaccgcaggtgatccacccacctcggcctcccaaagtgctgggattacaggcgccaggctggtttctaactcctgggggctcaagcagttttcccatctttgctttccaaagtgtcatatatcttttttatcatttgctgcttttgcaacatatatttgttgctgattcgtttactttctgttattctccttaattttcaacatgatcaaatacatttttggattatagtcaatctccccacttttctttttttcttcctagacatcctcttgcactctggggtgaatattttcttggccaaggtgtacagtcacagccctaggatttcccttcagcatcatcttctctcttgtatttgatctttgagttttcctcagtgttgatttgctctcttattttggtggaatatattctccatcagggtagtaagaaaaaggtgaataggatgtaaatttttgagatactatatttctctttattctgccctttgatagaattgttggatcaaaaattatttttctctcagaatttggaagtcattgttaaattatcttttggcttccaatgttgctattaatagtcctggtagtgttttttttttcttttttcttttatttattttcttttcttaagagacagggtcttgctctgttgcccaggctggactgcagtgacacaatcacagctcactctaatctctaactcctggcctcaagtaatcttcctgcttcagcttctccagtagctgagactacaggtgtgcaccaccatgcctgcctaatttttaaattttttgtagagatggggtatcactatgttgcctagactggtcttgagctcctgacctcaagcagccctcccaccttcgtctcccaaagtgctgagattacaggcatgagtcaccatgcctggcctcctaatagtgttcttgatttttatttttaatcttctttgtagactgccttttctcactggaaacttttaggatcttttcttttccctgccattttgaaattttgtaacaatgtgccctgcctggttagggttttattttcattcattgtgatggagacttctgaccaggggatatttcttgtatttatgcagagttgtttcataatattatttccttggtaatttcctcctctttgttttctctgttctcgctgttactgttagtcagacattgttcttggatcgatccacttgcttgactttatattggattttttttttttttttggtggctatcacattttaattttcagtgttttggggtttttttttttttttttttttttgagacggagtcttgctcagccacccaggctggagtacagtggtgtgaccccagctcactgcagcctccacctcctgggttcaagtgattctcctgcctcagcctcccaagtagctgggattacaggcactcacaaccatgcctggctcatttttatatttttagtagagatggggtttcaccatgttgcccaggctggtctcgaattcctgactttgggtaatccacccgcctcggcctcccaaagtgctgggattacaggcatgagacactgtgtctggccagttttcagtgttttatatttctatctggatgtttgttatataggtattcttaaatatatttaagatttgtggactttatataagttatacttcaacagaatagtgaaaataatggaaaggacccttccccctctgttgttaatatctaaagtctcttaatctctctctctcttttttttttgtttttgttttgagacagagttttgctgttgtcgcccaagctgaagtgcaatggtgcaatctcggctcactgcaacctccgcctcctaggttcaagcaattctcctgcctcagcctcctgagtaactgggactacagatgcacgccatcatgcccagctaatttttgtatttttagtagagacagggtttcaccatgttggccaggctgatcttgaattcctgacctcaagtgatccacccacctcggcctcccaaagtgctgggattacaggcgtaagccaccgtgcccggcctctcattgttttttatattatcctgtttatctcttctagatgtcattgtctttttctcagcctcttcattaagcacgttgtgttttgttctctgtagtctgcattgtgtctgtttctcataagttatttttctttttgtttggtctctgtctttcctgttagaaggtttgttggtgttgcattgctgccataacaaattaccataaatttagcagcctgaaacaacacgaatttatctcacagtcactgtaggttaaaggtgtgtacacgtggctcacctgtgtcctctatagactcttaagtggctgaagttaaggtgtcagcagggctgcgttccttcctggaggctgtgagaatgaattttgcttggtagaatttggttctttgtgattgtaagactaagattccctctggcttgtctgctaggggtcattctcagctcctagaggctctccacattgcttgttgcccccttcctctatcttcaaagccagtaacagcaagtcaaggtcttctgtctgaatttatctgaccactccttctgtctcatctctcttcttcctgcctcttctgtgctggaggcctcatgtgattacgttgggctcacccagataacccaggataatctccctaaaatcatttgataagtgatcttaattcatttgcaaaaactcctcacagcagtacctagattggtgtttgtgtaaccatgggtagggatattaaacttcagtattctgcccaccccagaagcctttctcaagtgtctagtaatcattggctggctgttcctatgtttaatgctggggcttttttttttttttttttttgagacagagtctcgctctgtcgcctaggctggagtgcagtggcgcgatctcggctcactgcaagctccgcctcccgggttcaagccattctcctgcctcagcctccggagtagctgggactacaggcgcccgccacaacgcccagctaattttttttttttttttttttttttttgtatttttagtagagaccggggtttcaccacgttagtcaggatggtctccatctcctgatttcgtgatccgcccgcctcggcctcccaaagtgctaggattacaggcatgagccactgcgcctggcctggggcaatatcagtacctaataggaagctctatattgggtggagtttagctcatcatccctctgtaaggtatttagacatattgagcaagctttttcaaacatcactatctaaaagatcttttccctagggctattcaggttctgtttgtaaaggatcctaaagggtgtgtgtctgtggagtaggttacctgagtttaattcagtaatggaacaggaaagggatgctggggcggactaaattttttcaggtagtctatctgttttctgtgcctcagtttgatgattagaacagtgaatcagggtgttacccattggtacctccttctacaaacaccttggttttatatttctccagtttacaaagttactgttccatctgacttctgcttcccaaaacttttctgagatttcttatcccatattttcttccattttgggggcccttataggtttatgttttctttattttttacgtgattttgaaaggagtgaaaataaatgcacgtattcaatatacttttttaaccagaaacgctttatcttccctgagaacccttctttacctcagtttctcaattcccctcaccctcatgcttttttatatgtatagtatttatatagcctgtgtagattagactagattcatcttctgtttgataacatgctaattataatgaacattaaatttcgttgctatcactgggtgtagtggctcaggcctgctgcattcccagtattttgggaggctgaggcaggaggattgcctgagcctgggaagtcgaggctgctgtgacctgtgagcacactaacactacttcattccagcctgggtgacagtgagcccctatctttaaaacaaacaaacaaacaaaaaaaaacattgctatatattctgttatagaggttctggagcattgctttgtgtagtgcctcataaatgctagcttatccttattgaaatgtaaaattgagcataaattagtatagtattttggtatggctattttaaagttttcatgtctcacagtcctctgggtatgttttattttggtataaatcttgtttacttacttatgttcttctccagccccactcttacacatttagaaatcttatacagatttctaagtctgttaattacttcttgatacaaggcatacagtaaatcagtaagtcctaaattctcatgtcagtgaaatgatcagtatcttaatgtggagagttaggtttactttgttattgttgtaatgaaatgcaaaccactttttcacacttcatatgcagccaatggctacccagttccaatatggaactacctaccattagaaaaataagtcattcttgctacccttcattctctcccttccctaaactagtgattatcaagaagctggaggctaggtgcagtggctcacacctgtaatcccagcactttgggaggccgaggagggcagatcactaggtcaggagatcgtgactatcctggctaatacggtgaaaccctgtctctactaaaaatacaaaaacttagctgggtgtggtggcgggcgcccgcaatcccagctactccggaggctgaggcaggggaatcgcttgagcccaggaggcagaggttgcagtgagctgagattgtggcactgcactccagcctgggcgacagagcaagactccgtctcaaaaaaaataaataaataaaagctggaatcagaattgcctacagaacttatataaaacaagccgctagagccctgagctactgcaaaaatctggggatatggtcccagcatgtatttttaatattattattattgattttacaagcaattctcatgggcccatctagttaagaactgctttatctacttaagacagacaaaaaagctacttaacaatattcttttactaatgtaaatatgcatattaatatacatttaatactacctggtttgtgagccagacagaaaatgacctaggaacaaaaatacatttgaatcatgtagtacagtgactctcaaacctgggggatatggcggaaacatttgggagaacttttcgaaatgtaatgcttgccttactgtctcccactaaatagtgcctgtggtgactttgttagaagcatatcatatctcaggcatgagatttgttatgtaaggatttgttatttatccttcaatactttttagatttttcaccacatactagtacttgatttactttggagaaatgaatgggtggagagagagtaccaccaccaccctgcctccacttaatgttgaagcagtgtagacaactgcttattcagaggcttggaattttctaatgcctttattttatcccagtatggccccactggcatttaaagctgagggtacgttgtgaattaaaagtagaattcataaaccattagatctcttcacatgttaaatcttactcctttaaaaataactctaggaagtaatgatgcagttgtattagataaatcttaggttcaaagaatatacttgaaatcacttctgagtttctgaacctacctaattatagtaattattgctaatccatgaaaccccaaaaattacatttgaggataagtggattaactttatatcttaaatatacaagaatgaagaaaatatttgatttttaattgtgtaactttagctgaaaaatgctgtagtatgttttttaaaaaaaccagatatgcctagatgctttcaagaaagtggcagaatttaaggagcaggtatttacttaacatgatttctgctctttattagatatacttaccccaaatttattaataattaaagagcagttatatttacctactctgtggtcacatattcgttcaggatagttcttctgctaattccattttcaggtttcagaaaccgatcagaaaatagcctgtaaaatacagaacaaaatgaaaacctagttatgtcccacagtgtttctttctttgtggggttttttttttggttgttttttttttttttttttgagacggagtttcactctccttgcccaggctggagtgcaatggcatgatcttagctcactgcaacctccgcctcttgggttcaagcgattcccctgcctcagcctcccgagtagctggaattacaggcatgcgccaccatgcccagctaattttgtatttttagtagagacggggtttcaccatgttggccaggctggtttcaaactgctgaccacaggtgatccacccgtctcagcctcccaaagtgctgggattacaggcgtgagccgtcgtgcctggccgagtgtttctaagagtaacgttgaaataaccaacagaaaacctgaccaaaacccacatacttattaaaataatttatttggacttcttatttaaacatggacaatgtttatataaaaattctttttaaaaaagaaagtccagtgtggtttgcagtaattgctcccatgttaatttttacatgcaaattaactttgatttgaagaaatcttacagaaaaatgagaaaaggaagaaaatatatataaattattaaaaacacgagatgtacgttactactaatcaaagacataaaacaagaacatatatccatcttgttccatctttgccttaaaattattataacctttaatccagtaattctattccagtgaattctgaaataaaatatggaaaaagatggacatagatgtttgtagaattattaaatattatttataatgggctcagtattagaagaatgattaaattatgatttatttacatagaatattatgcagttgttaaaatgatttgctagtcatgtttcaccttttatgaaaacattttattttttgccctgtcttatggtactgaaagaacacattttaaatgattcagttatttatattttttgaggagggaggtaacttccaaatttctaccatggtgtgtgtgtgtgtgtgtgtgtgtgtgtgtgtgtgtgtgtgtgtgtgtgttttatttgttttgcagatggtcttgctctgtcacgcaggctggagagcagtggcccagtcacggctcactgcagcttccaggctcaggcagtcttcccacctcagcctcctgagtagctgggactctaggtgtgcaccactatgcctggctaatttaaaaaaaaattttgtttgtagagaaaaggtcttcctaggttgcccaggctggtcttgaactcctgagctcaagcagttctcccactttggcctcccaaagtcctgggattacaggcgtgaaccactgtgccaggtctctgttgttagccattttataattagaggaaaaacattaagacacaaatacttacaaagcatttgttatgtatcatttaatttatacaactacctcctgaggcactgttgtcattttagataaggaaactcagacaccgacaggctgagtagcttgtccagagtcacacagctaataaatagtggaactaggatttgaatctaggtagtttggctgtgtgcttccaccttaaattgtgcctcatcaactctgtagcagcatggtaggatcctagtttcaggtcccctacaaacaaaaagctttctgaatttataatattgggttgaatctagtggatgtcatgggctcctaaagctgtaaactgccacatgtaaaattttgatccagtaattagcaatctacagctttacaagttttgtagtgatatgaattgtgttgtctgttctcttcatactctgacatatagtatagtgctgccagacattgtgatacacagtcacgtgctgcataacaatattttggtcaacgatgaaccacatatccagtgatagttccttaagattataatggagttgaaaattttccgtctccttgtgatgatgtagcttttgtaacatcatagtgcgattactttattttttaaatacattttaaaaataagtgcagtggctcacgcctataatcccatcactttgggaggccaaggagtttggagaccagcctgggcatcatgacaagaccctatctctacaaaaaaataaaatgaaattgcctaaggacacatttctcagaacacatccccatccttaagtgacgcatgactgtagacctattgcttctcctttctgcggcttttcttttttattgttaatttttgggttcttcatcgtttcacagttttttaattaactttattgtagtataatagatacaccataaactgtatctatttaaagtgtgaaatttgagttgtgacagatatttatacctctgaaaccaccacaatcaagattcagaatatttctgtcacctgtcaaacttcagctaccagcaaattgatctgctttctgtcactatggatttgttggcattttctggaattttgtgaatggaatcacatatactcttttctaatttatcttccacttaatataataaatttgagagtcattcattttattgcatgtgtcagttgtttctttttactgattggtgagttgtgttccattgtctaagtagtataccgttggtttgcaaatatcacatttttgtttatccatctgggttattttcagttttggcttttatgaatcaagttattacaaatgtgcttttcatcttcttgggtaaataactaggggtagaatgtctggagttgtgtggtacatgtatgtttatacagaattgctgagctgttttcaaaaaattgtctcatttaatagtcctaccagctgcttatgagagttcaagttcctcttcacatcctcactgacactgagtagtaacgtctttttaatgctggcctctttgatgtatgggtactgctatctcattgtggttttaatttgtatttccctgatgactgataacgtcaagtatcttttcatgtgctgcttggtcatatttctttgatgaagtgattgtccagatcttagttcatttgtcttcttgagttgttagggctctttttatattcagaatacaagacttttgtcagatatgtgtgctgcaaatatgttgtcccactgtatgcttgccttttttgttttctcaacagtgtcttttaaagagtaggtaggttggggttttttttttttttttatttttaaataaagggcaattttttgtggttccttttttgtgtgtcctatctaagaaatctttgtcgtcttatgctttcttctagtttcattattttgactgttacatttagatcagtggtcatttagaattaatttttgctattgttataagggttaatggtctttaaaacatatatatatgaatcattgttcagcactttgttgaaaagatttttctttctccttggattgccttggtacctttgtcaaaaaattctgatcacccatatgtaggtctgttttgggggccctcttctgtttcattcatctgtacgtcttatcatttagccagtaagttcagtgtcttgattgatacagctttatgatgtcttaaaatcagttagtgtaagtcgtccaattttgttctttttaagaatgtctttgactattctaggattgttctcattttcatataaattttacaatctgtcaacttctacagaaaagcaaattggaattttgactggcatctcattaaatctttagcttaatttgaggagaattgacttcttaacaaaattgagtcttgaaatttgtgaacatcgtgtgcaatatatattgtgtgtgtgtgtgtttaattgggtcatttttaatttcttttgttattttcatttaaccattttccttgttatcagactcctcaaatgaaaatagatcagaaacttgtagccatttgatacagggcagaatatttgaatcaattaaaatttgagatttggggccgggcacggtggctcacgccggtaatcccagcacttgagaggccgaggcaggcggatcacctgaggtcaggagttcaagaccagcctgatcaacatggagaaaccctgtctctattaaaaatacaaaattagccaggcgtggtggcacatgcctgtaaccccagctgttcaggaggctgaggcaggagaatcacttgaacctgggaggtggaggttgtggcgagccgagattgctcaattgcactccagcctgggtaacaagagtgaaactccgtctcaaaaaaaaaaaaacaaaactgggatttggtaatgatttaaaagtatcattacatttacttcatttatcacgtgtaccttatgacatacagaatgagtgaaggacatataaactcaatttttcttccagttttagataaaaaataaatatataaataagggcttctaatattttctttccgtaccctagtagattgttatttccactttgaggtcattacatttattatatagttacgaattaagaatgctttgggtagtttaagtgtcataatcagtgttttgcatgacatcaatgtctgacacaactcagacatacagaaggaagttacacattcttatcttgaaacaatagatttactaagtgtaaaatgtttaaattttcctttgttctagtaaaacaatctattttattaacagatatcagacaccccgaagaactttctctcttaaagaaacccagagatccaacaaagaaaaaaaagaagaagctagatgaccagtctgaagatgaggcacttgaattagaggggcctcttatcactcctggatcaggtaagacttttaccaagcaatggactcaaagtaagaactgtggactgtgtacctttgtctttctggtggtgggtaaatggatcatgtaggtcaggaagagtggtcaagttaaaaaaacaaaaacttcaattagccaggcatggtggcacacacctgtagtcccagctacttgggaggctgaggcagaagaatcgcttgaacccgggaggcagagttgcagtgagccaagatcgtgccactgcactccagcctgggtgacagagtgagactccgtctcaaaaaaaacataaactctccttcagcatttttctctgtcctgaaatcactatccagtgtcagtttctctcatgtgcaaatcatcatgtcaggtgttaatagttgaatcaataaagaggaagcccagttctcttgttcagagagtcaaaaaggaatagtatcataattggactcaggcagaaattggaaatttttttagtatctagttcatgaaaaccaccactatttggttaatgcattattccttaaaaccttacttaaggccaggcgcggtggctcacgcctgtaatcccagcactttgggaagccaaggcaggtggatcacgaggtcagagagcgagaccatcctggctaacacagtgaaaccctgtctctactaaaaataccaaaaaaaattagctggacgtggtggcacgtgcctgtagtcccatctacttgggagagtgaggcaggagaatcacctgaacccaagaggtgggagttgcagtgagctgagatcgtgccaccacactccaacttgggcaagaagagcaaaactccatctcaaaaaaaaaaaaaaacaaaaaacagcaccaggcggggtactgtggctcacacctgtaatcccagcactttgggaggccaaggcaggcagatcacctgaggtcaggtatttgagaccagcctggccaacgtggtgaaaccccatcttgactaaaaatacaaaaattagctgggcgtggtgacaggcacctgtaatctcagctacttgggaggctgaggcaggagaattgcttgaacccaggaggcggaggttgcagtgagccaacctgggtgacaactccgtctcaaaaaaaaaaaaaaaaaaaaacaaaaaacagccttctctctgctttgcatattctggtttccgggccttcctaccttttttccttaaaggttttgctcctttgaggagctttcttagattccctttcattacttttccaatctgaattaggcatctttctgtcatgagtcagcagacttttctgtgtttggtattgttatactgtgtgttcttccttgctaatgtgagctcactgcatgaaggggctatgtcacctttttgtcaccagaacctaactcagcatatggcattcagcaggcatgcaggtgatgtctgttgggaagctaagtggctaattaattaggttatattgttctttaatcgtgggcatatacctggactgaacattgcagtttcctacatttccatcagccacaaatgtataaatccattacttaggatgggtcccctcagcaaatatctaaattaatcttactaatttagttcattctggttttttaaattctgagatgatgatgatactaataatgaaagcagcactcacagagcacttactgtgcagtgcccaccactatttcatgcactttacccatggaaacccatgtaattctcactacagctctttgcagtagatattgttaatacccacattttgaggataaggataagaaattatggcacagtaaaaagtcttctaaggtcacaagccttctaacttttctgttttatgtactgattgcattttgaaagatacaaagaagtaagacaatccttactcttaagtagtttataggttagtggaaaaacagttactatacttaaggaggtaatatataaatgttaaatgacttttatagaagatagtgtttttgaaattcagaaaacaattccaaacaaagtttgtgaattcagcttttaagttccagtggctaggtttttgatgggaaaaggcagtccaagcagaaagaatgatactaacaaagaacatccttgcaaaaatacaagatgtgaataaatgagttgagccagtttatgggggaagagacctccgagctccttcaggataacattggaacatatttaacaacagacgatggaatttagactagggcattgtagaaccattggtttctgaatattttacaaaattatcaaatcattattgtagaaagagtatcaaatttacttccagtcagtaatttgtacaggagggaatatggggaagggttgccgatactggtggaagcctgtaggttgaggaagaggtaaaagagaataaaaggggccaggcgcgggtggcttacgcctataatcccagcacttttgggaggctgaggtgggtggatcacctgaggtcaggagttcgagaccagcctgaccaacatggtgaaaccccatttctactaaaaatacaaaattagccaggcgtggtggtgggtacctgtaatcccagctactctggaggctgaggcaggagaatcgcttgaacctgggaggcggaggttgcagtgagccgagattgtgccactgcattccagtctgggcgacagagcaagactctgtctcaaaaaaaaaaaaagaggataaaagattatgtctatgtaatattgtgacatagtaagaaatatatatagtcatgtgctgcatagtgatgttttggtcaataacagatcacatatatgactgtagtcccataagattaaaatactgtcttcttttttttcttttcttttttttttttttcagacggagtgtcactctgtcgcccaggccggagtgcagtggctgcgatctcggctcactgcaacctccgcctcctgggttcaagcgattctcctgcctcagcctcctgagtagctgggattacaggcgtgcatcaccacacccggctaattttttgtatttttagtagagatggggtttcaccatgttggtcaggctggtctcgaactcctcacctcctgacctcatgatcgatccacctgcctcggcctcccaaagtgctgggattacaggcgtgagccaccgcacccagccttctttattttatgtatttttttttttttttgagacacagtctcactgtgtcacccaggctggagtgcagtggagcaatcttggctctctgcagccaagatacaggcaattctcctgcctcggcctcctgagtagctgagactataggcgcacaccaccatacttggctaatttttgtatttttagtagaaatggggtttcaccatgttggccagactggtcttgaactcctggtctcaagtgatccacccaccttggcctcccaaagtgttgcgattacaagcatgagccaacacctggccctgtattttcactctaccttttctatgtttagagatgtttagatacacagatacagatacttaccattgtgttacagttgcctgcagcattcagtacagtaacatgctgtacaggtttgtagcctgggagcaatagactataccatccgtatagcctaggtgtgtagaaggctataccatccaggcctgtatgagtacactctatgatgttcatacaacagtgaaatcccttaacgacacatttctcagaacttatccctattgttagtaggtgcatgactgtactaacttgcacctttgtcattgcatcattgggctgttcctgtgctgcccagtttttggctagcttgtgcccaagcagagcatccttaccaattcttacactccccaatcttggcttcccttgttctttttcacccagttcccttttcacccagactgcagctgcttttatttctggtctgtgtactattcctcagttctttcctttcagaggctagacctttggacagctttgaatgtcctaagggacatttgtggcctctttatttgtaagagatccttttcagaaagaaaaccaatgtttttattaaaacgttgctattactgacaaccacatttattgagcaacttcttgtccaaaacactacatgtaatatatttaatccacacagtaaaatatattaattaattgagcaattctgaaaaattggtagcatgagaagagaaacccagagtggctaaatcacttgcctgggagctaatccctggtaactggtagagctgagctgtaagcccaggctcatcccgcttccaagctagagctttcaccattgcactgtgcacacacccgtctccttctcccttctgtccctcatgagtacacacagacccataattttagcaaatacgtcagtggccagagatgccacaacctagcttttacttaatttttgtagccttgtttaccttaaagaaaaaaaaaattaattaaaatttaaattctccaacaaatccttatactgtactctacatgagtagtggcaatcagagtcatcccatatcaatattagaagcgataacgctgaatgtttctataagtcttagagagttagaatttgggaagctgaggaggttttgttgcctggaaaccataggtgaagaccggtatgcatagaaattcttgagagtatgctagtccaggaagcaggaaatcttaaaatttttacatcatacggaaatggctagaagcaaaccctgtgagtatgaaaaataaaattatcagcttagatcttacaaaacaaaaagacaagaagctactggtagaattggaagcattggataattttgtaatagttccagaacttactaaattttgcttctcttcccttcagcttggtgataatgacaaattgtaggaaagctggttagtatataacttaagctaatgaataatcgtgattgagttagcatcagtcttttcactgaattcttaagctgggctgccttgattaagacatagtaatttagattgagcaacccactaatacttttccttttataagtcacatctaatacgaatactaatccgtattttaaaaatactttcgtttggtaggaaagtgggttgcaaaccaaaatcacaaataagccttatggtttgtttttttcctcttggttgtctctgatttttaatggttggagagtagtgtatattgttgatataaacaaaataaatatatgaatttatattctaggagaaaatttagccacatagaaataaacgtatataatgtcaggtttttcctcctccatggtcaacaattacatacatagtaaataagttataagtattattgaatacataatctttcacttaatcgccacaaaataccagcagttttggtgatgtcttcattttacttctgaggaaataactccacaagggttaagtggagttattttcccaaggttaagtaattttatttaaccttttagttaaataaagtttaactttttttaactaaagttaagtaattttagttaactttagttaagtaattttcgttacttagttaagtaattttcccaaggtcacaaaggtaataaggagcagagctagaattcacatccaggctccggtgctcatgcttctaaccattaagtaaccaattcttttttttttaagagacagggtctctctgtgttgcccaggctggtcatcaactcttggcctcaagtaatcctttcacctcagcctcccaaagtgctagattatgggcatgagctaccatgcctggccataatgtttattttatgaattataataggaatgtttgctaaattttttctttcttttttttttaagggacagggtcttgctatgttacccagtctggtctcagacttctgggctcaagtgatcctcctccctccgcctcccaagtagttgggacttcaggcagatgccagcatggccagctaatttttgtattttttgtagagatgaggttttgccatgtttcccaggctggtctcaagcaatcctcctgccttggtctctcagaagtgctgggatagctactagggaggctgaggcaggagaatcacttgaacccgggaggtggggaggttgcagtgagccaagatcgcaccattgcactccagcctgggcgacagagcgagactccatctcaaaaaaaaaaaaaaagtgctgggatcactgcacctagcctcaaaacattttttaaaactattcttttaagtacaaaagtatcacatgcttatagtaaatattcaaatattacaggattacatattcattttttttctaacaaaagtgggactgtgttatacacacattgtgttttctcacttgatgatacatactgatggacctcatatattttttaattacaaaatttatacatgaatacagtctctttatcataaactcaagtaatataaaaaatgtattaaaattaaggtgagttccttttaaacttattccctggctactccttctcaagagggagccatttcttgattactacatataacgaggttgtaagtttggagtccaacttgacagtaccgtttctgtgtgtttatatgcacaagtgggtataaaatttgcacatctagtcttattttaataacataaatgagatcctaatatatattttatgctctgcaatttgatttttggtgatcagtgttttagtgatttgtgtcaaagcagagaagtctccctagttcttataaatgacttcagagttttacctatagaaaaagtatatttacctgtttttctacctaggtggtatctaatttttctgtcacatatatcccagagctgggcgttgtggtgtacacctgtagtcctagctacttgggaggctgagacaggaggatctcctgagcccaggagttcaacctgggtggtcacactgctgcattccagcctgggcaacagagcaagaccctgtctctaaaaaaatacatgtatgtgtagatacatatatatctatacattatatcacacacactctgtctgtctctctctctctctctcccccccaagagtttctgtggtttatacttccatcagtagtacatgaaaatgccccatttcctacattctgctcaatattgaatgttgtaaatctgtgtttttgccagtttgacaataagtagtatctcggttattttgcatttccctaatactaggatagttgaataatttatatgtttattagccatttatattctattaattttcaaatgatagattctttattttatttatatttttgcttttagtgatattaaaattttaatgtgttacttccctttatatactggcattttgtttgtggccttttttttttaaaaccatattgttttacatttttatgtggtcttatatctgttagccatttactttatagttctaggtttactcttgcttgggaaaattttctccaaaaatataaaaataataccataaaaattcttttgataaaatatggtataagataggtattttggtgaaaattttttaaaatgtattactttagtactctttttaaaaaatatacaatttataataagttaggtaaattttactgtgttaaaatatagcaatatttaggagttgtttgattatatcgggttttaaatatctacagtaggtggactcagactgtagtgctttttgaactctatttctcccccttagagtttttaagttatctttccatgtcatttagtaagctcatattttgttgctaaatctgctactttatcttacactttactagtttgctgcctcagatgcattttaaaccagacattcaagaaaacaacttagttgggattgtctctgaaccacgatgaaggaatttaaaatacccataccctctgacccagcagtgctgctagaattgggaaataactacaaaaatgtttgttgaagcattggtttgcaataatgacattagtaacagatttttttttttttttttttttttttttgagactaagtctcgccctgttacccaggctggagtgtagtggtgtgatcttggctcactgcaacctctgccttctgggttcaagcgattctcctgcctcagcctcctgagtagctggaactacaggagcatgccaccatgcctggctaatttttgtatttttagtagagacggggtttcaccatgttggctaggctggtctcaaactcctaacctcaggtgatccacccgccttggcctctcaaagtgcgggcattacaggcatgagccaccgcacctggccagaattttatttttttatttttatttttcgaaacacagtctcattctgtcacccaggctggactgcagtggcacaatctctgctcactgcaacctccacctcctcggttcaagcgattctcctgtctcagcctcccaagtagctgggactataggcgtgcaccaccacacccagcttattttttatatttttagtggagacagagtttcaccatgttggccaggctggtcttgaactcctgacctcaggtgatctgcctgcctcggcctcccaaagtgctgggattacaggcatgagccaccttacagtaacagaattttaaaaaataggtgcacaccaattgggaatggcttacgtaagttatagtacatggaggcagtgtgtagccctacagccagactggctggggtttttttgtttgttgtttttgagacggagtttcgctcttgtcacccaggctggagtgcaatggtgcagtctctcactgcaaactccgcctcccgggttcaagtgattctcctgcctcagcctcccaagtagctgggattacaggcaggctgccaccatgcctggctaattttttgtatttttagtagaggcggggtttcaccatgttggccaggctggtctcgaactcctgacctcaggcagtctgcccaccttggcttcccaaagtgctgggattacaggcttgagccaccgcgcctgcccagactggccgatttatagcttggctgcagcttacttgctcttgaccttggacaagttatttaaccttgctttgcctcagtttgctcctctgaagtgagaataatagagttgttgtgaacgctaagtgagtttattatcacatagtgcctacagaacaaataagaacaacgaagtgattaagtatgaattgaagaagatacaaactataggaagttgaaacgcagatttgggtgggtggctgattctattaaatgtgtgattgtatttgttcattcttgaattgctataaggaaatacctgagacttggtaacttaggagaaaagaggtttaattggctcacagttctgcaggctgtccaggaagcatggtggcatcagctcctggggaggcctcaggaaacttacaattacagcggaaggcggaggaggagccagcacttcacgtggctggaacaggaggtaggggtgggagtggggaggtgccacacactttaaacaaccagatctcatgagaagtcactgactatacagtaccaagcggggatggtgcaaaaccattatgagaactccacccctgtgattcagtcacctcccaccaggcccctcctccaacattggggattacaattagacatgcgatttgggcagggacactgatccaaaccatatcagtgatttagggggagtatcttttctatattagaaactttataaagcaaattgtccattctaacttgactcagttttggatagaaattataatctcaccaggtgcacattttcagtatactgacattcttcgtaacagatttatttaatagatctttgaaagaaacaagactttgcctagaagttaatgttttttcacactttatctacatgcacactctgtagcagaaataccctttgcccaactgagttggagtaatgtgttcagcacatttaataagtgtggggtgcccaattagtcctttcaaaaggtgtcacacaattttaagtttgaaaaatacctgtctagtttaaggatctagcttttaaagccccaggactaacgatcccagtattctttaaatgctgataaagagttcacaactttgctttgtgttttaggattaacagtgttcggattttagagggttttttgtttgtttgtttgtttgtttgtttgagatagagtcttgctttgttgcctagactggagtgcattgatgcaatcttggctcactgcagccttcgcctcccgaatagcgtgcaccaccactcctggcaaatttttgtgtttttagtagagacagggtttctccatgttggccaggctgatctcgaattcctgacctcaagtgattcaaccgcctcagcctcccaaagtgctgagattacaggagtgagccaccacacctggcctagattttacaggttttttttagtactaacattggaagaacacatgtcagggacataaaatcaaatatcctgtgtccagcaagagattacatattttcagtaaaaactttttttttttaactttgcttcctagactaggtcatgacagctacaaaaatctctagcattagcaccactttttcacaggcagtgtttctatcattgcatggggagaagagttaaaaatagtaggaaaggagatggatttctaagcttaaccctaaatttagggaatggaaaagccattttctttacattaacagtgttatgcccattgcacattttcttttgaaaaattatgacaacaggacaaaatataatttaacagagctaggacttgggggagctgcttgtccttaatgtcattctgaacatttttagatgccttaaattcatctccttaatttttgtagtttaaataaaggagcacataccatctgttgactaatgtaacaaattgttatttacgtaacctctactatatgtctagccctaatactaagaaatcagaagataaataaggcaatatcccttccttttgagatttgactattaaatatatctctgtttagactctttctagggcagacttttatctccccttttacattaatactttatttgttgtaccccagaacttaaaaattaaaaaaaactttatttgtaaaattgttgaaacctgtttattcactgagaagactttactataaaattattcttaatctatatgaattcagttctattgtgttaccttcaaattgtatggatttcaaatggtggtaaaagttgtagacatatttgtcactatatacttgactacagcacaacttcattcttttaaattgaacaaaaaaaaccgttttacttaggttgtagcttctaaggttctttactctgaaatccacttgaaatgtgtacttcagtttatgattcacaattagggaaaatctgttttttctttttctcattttcttttcattcttttgtttctgtcctctgttgtggcctttcctttaccttctgaattcctttctttcctttcctataggcactgatgttctttacattggccctctgaaaggtgagccttgccacaatttaaagacaaaaagtgttggtctgtctgcttcagctatatccttattttctaattctcttgaactgattttttttccccagaatttctgccaacttaattatattcttaaggctttattacgtgttttaatgttatacaaggagaattaattacacatgttttcataacaggtaaaataatatactaagctttcctttcagaataaaacttttgtttcacaatgtgctttatatcataatatgtgttattattgaaaaataagatgctgtactgcatacttactacctgtttttcatgttacttattaggaagtatatattcaagcccaggactgtatagtaaaacaatgacccccacttatgatgctcatgatggaagccccttgtcaccaacttctgcttggtttggtgacagtgctttgtcagaaggcaatcctggtatacttgctgtcagtcaaccaatcacgtcaccagaaatcttggcaaaaatgttcaagcctcaagctcttcttgataaagcaaaaatcaaccaagggtaagttttaagatatagataaaattgaatttcttcatccagctagaggtagaaatattgtcttcattctgtgttgttttgttccactgttcttaatttgtccagatggcttgattcctcaagatctctcatggaacaagatgtgaaggaaaatgaggccttgctgctccgattcaagtattacagcttttttgatttgaatccaaaggtaccgagggtttaaagggatcttttttttttccccattaatttgttttgttcacatggatgtttgtttttggaagtcggtggaataaggaattatttgtatataggaaatcttgaataattattaaaaacccaaacttttaggcaaaggtatttgtattttaaataagtctattttagtaggttggaagcataactaaacctttttattgttgttattaagataatgaaacttttggctgatttggttttatcttttttttaatctctaagctcttagagtgtcatgatttgtattttaaaggtactcttttggtactatagaactggcaaagtttaggccgggtgcagtggctcaacgcctgtaatctcagcactttgagaacccaaggtgggcggatcacatggtcaggaattcaagaccagcctggccaacatggtgaaaccccgtctctactaaaaatacaaaaactagccacgcatggtggcacacgctggtaatgccagctacttggaaggctgaggcaggagaatcacttgaacctggaagacggagcttgcagtgagccgagatcatgccactgcattccggcctgggcaacagggcaagactccatctcaaacaaacaaaaaaaagaattggcaaagttcatttttaaaatataagacctctcttcaactatatttaaataaaagtttcaaaaaggttaccttttcaattacttttagattactaattacgtgccaaaagatgttgcttcaaaaaaacgtttttttcttgagacagggtctcactctgtcctccaggctggaatgcagtggtatgatcatggctcactgtaacctcaaagtcctggactcaagccattctcccacgtcgcctcccaagtagctgggactacaggctcacccagccacacctggctttcttattttctgtagagacagagtctcactatttcacccaagctggtctcaaaactcctgggctgaagccatcctcctgcctcagcctcccaaagtgctgggattaccggcctgagccaccatgctcagccaaatttttcttaggtctacatttttttcctctgtaacagacaaacactgttacttgtctttactatgattggtattatctctgctaccatagtacttcacttttctggtaagatttaactttaccataaatatctggagcttttttcccccgtagaaaacacttggcacagaggtttgaatcttttacttctctttcagcctggggaaagaaacctctcttggctaccctctcatccttttcatgtttagagtatagtctagattttaatgttatgtttacattcttttattatatgcttaagtaattctttatacaacagtaaaatctctataataaaattatagaaaataattttaattcattttcaggccacatcatacctacttttagtaaagccaaagctactttgggaatagttacatttgtgaggggaatggagatgtattttgtcaacgttctaaaatacatgttgagcattcctaatttgaaaatgtagaatgctccaaaagctaagacttttgagggctgacatgatgctgaaaggatatgctcattttggatttttatgttagggacactcaactggtataatggaatattccatcatctataaaaattctaaattcaacacagaaggtctcaagcattctggataagggatactcaatctgcagtattcttaaggcattactattgacttttatttatataattaaatggataattgaataacatataagtaaacattttccacaagtatatttgccctgtattttgcatacttaaaataactgccgtttccaaggacttgccactttatctgggtatgcttctccacagtgaacaaaatgttccccagaataatttgctttctgattacatgtttgtatggcaagttgcagtaataacactgaaaaataatcggtagttccgccttactttaatgtcatcaaattagatttcttatgttaaaggctataatgtctagtggttatttccctgaaaaataacatacagaatctactttttaatactgtacaatcaattattctctgtcatattttaatgtcatttttaatggaaaattagatgtgggcatatataggcatgtctgaccccataggtatccttctaataatacttgattgtaaataaaaattcttgcttgtaaattaagatcccaggaaaaaaagcattaaatttttcttgtcaattgaatattcagagtttgaaatttttcaatggtaaaggttatatattacaaaagaactatttctcttgttgcagtatgatgcaatcagaatcaatcagctttacgagcaggccaaatgggccattctcctggaagagattgaatgcacagaagaagaaatgatgatgtttgcagccctgcaggtagttgaaaggtctagtaaatgggacttattccggtaaagggtagggaggtatttttaaacagtaaagtggaatagtaattccagtaacatttcacgagacagaatttttgccatgaagaaagtgagtagacacttaggaaagcaaaacaaatacattttagtttgattttttatcttttccaagagttcagtggtatacttaagtacttttctctattttgtaggaaaaaaattatcctattttgtaggaaaaaaattatcctctcacccccaaatataaatctgctcaaagctcctcagtttttccttggaaagaaaatatttattaaaaatcagatttctgaaatctaatctgaagcttacctgtataatttcataaatagccagggatgatacaacacactataaaatgggctgtagcaaagcgatgcttttaggtgataagatttagagagactagtggaaccaaacctttttctacaatgataatccttaagtagatagctaacattgtccttagattaaaccagttttttcatatgtggttcttacataccacctccttcagaattataggggagcttatttaaaaattaattatccacttcatgaataactttaaggtggcatccacacatccacattcttacagatactgaggtctgatgaccaaattaattcatctttcttaaatttcagatacccgagtaatgctttggcaagtattcccagttatgacgggattctaggttcagcctaaagtcctgatgaagttggtgttctataaataacagaagtacaggaagcagagttgacattcagttgaagaacttttcactgtagaagggattttgtttttccttagaacacaaacaaaaatgctctcagtcttccaaatgcctcctttatgcatccagaaaagttttcagttgtgacccaaaaagttgacattagaaagcaagaatggggagtgaggttagcaaaaaaaaaaaaaaaaaaaaaaaagcaagaacagctaattttcaccttagttttacataatgaaaggagtggcaaagaagcatagacaaggaaaataaatcccaggtgacagatggattaatcagttattttctaggaacttgattaatgagccagttaggatcccgtattgtgtttccagataattctgactctctggtgaatttcttgaattaaattctggagcagtttgttgggagtcccctcacgtggttatggctttcttcctgcatcctcctcactttgatacaggcttatgattttctagtggaggttttgccaatgatagaataataatacctgtaaaatatgtgtgaaagaccacagattttatactgttgctttatttttgtattaaaaaatagtacatgtttatggttattgtttttaaaaccaacagatgcctattatatgcctggcacatagtaggtgctcaaaacgtgtttgtaaaatgagagtacacacagttgtgttctcacaggaatggcatgattctgcagcccacctccccgagtgtatcttgggcattccatatcactacagaaggaacacctcagagaccacaggttttaattcatggaaatggaatggtctcaaaccatagccctccaagaccattttagaatctagatataatgagagtattttgacatacagatttgagttgttggaggctttctcagagactgaccctaaggttgtaggaagccaactagtaccagaataaggaaactgtgaaagtatggtgaggaggagatgcctagaattttttctttcagagagaacctatactccgaagtatactctccttgggacatctggatccttgtgtaaagtaaatttacaatagtaaaaagaagcagaataatacaaaacaagaaggtggggataaaaagtaaagtagatgaattagtaacattgtttttaaagcatttaagtcagagtatgtattaagaaatttaagatatcccttgcacttttgaaagcaaagctggattttttaagtcccattcacagccaggatttctccggtatgactcataaagacattttgcatcagaattacccagagcagtgagtaaaaatgcagattccaggctggaccccagacttcctgaatcaggatctctggagtaaacctaaggatctgtatttttgaccaattcttcaccagactcttaatatactctgacatttgggacctgagggcctcaacctctacctcatttcccataatttatgaacattgacatttctacaattgtaagatctcatttcagcacaattgaagtagtcagagactattcattaccaatcaatcactaaatcttaaaacacagaacattggtaagtggcctcagattagttcactaaatgttcccatgaaatgaatgtattaaatgaatactttagacatttggagtgccacttgttgctttgaaaggtaattgattaagatttaaaggttctgctgacctttgtagaaaacctaaggcttaacataatatttgttctaagtcacttactgaagtatatttaaaatcagtaactattctgtatccaaaaattttcctgtctacatatgagtagtcatcactactcactactctctctctgcccccaccccacccacgtatatgtgggtgtccatgtgcgtactcacgtacaaacattcttagatatgagaatacagaacatgaagcaaggatggggaaaaagtggagttttagctttcgacataataatgatgactttctcctgggtaataggagcagtgtacagcattcagtgttcatcagtttctacaaaagaccttatgcatattctgtatgttcattcaatatttcttgataacaggccctgttatagacacagggcagattacaatgaaaaaaaaaaaagtcaaaaatctctgttaatgtgaagtacagttgaggaccagttaactctcttaagtcttagagcccgcaaatgatgaattcattggtatgtgtccaaagaccctacttcttttggataagtatttattagcaggtttaggatattgatttcaggtatttatttcctatcgttctagttcctagacgcttctgtcttttcaaattaggtcctgaaaagcattaaatatagattcagatagtaatttcattttagagttttacagttatagcaattattttaataaaataattctggtttcagtatcatatcaataagctgtcaatcatgacatcagagaatcatttgaacaacagtgacaaagaagttgatgaagttgatgctgccctttcagacctggagattactctggaagggggtaaaacgtcaacaattttggtagggtgaatctttttttttacctactaatttagcttgaattgatgcattccattttgtggatttaggttcaaagtatttgggggtggtggagagaaatatttaatgctttagagagagaaatcagatgttaatttttcaggaactttgagcaaagtggtttattttgagacagggtctcgttctgttgcccaggctggagtgcagtggcacacgtcataggtcactgcattctcaaactccagggctcaagccatttcctacctcagcctcctgagtagctgagactacaaccatgcaccaccacacctggctaattttttatttttttaagagatggggtctcactgtgttgtctagtctgatctcaaactcctggccttaagcagtgctcccgccaccactgggaagtttgtttttaaagtaataatgtattagtctctagtgcattcaatacagtaagaatagatctaatactctaatactctgcaaattcttttacaagtggtgggaagacatttctgcagaggaaaataatctcaagtcatggtaaaaatccacttagtgatgtgcacatttgaaatactacaaaaagaagaaaatagatctcgggaaaattgtgaaacactgggtttggtttttaagtatagggattagttactgctgaagaaacacttcaggccttttacaatgtacagatttatatgcacctacaaacagtttcagcactattaaagatagcatattctcatgggttgtataaattgccattttgatgaaaattttgttaaccttttatgctatttgaaaatgcctttgtaccaagaagaatatggtccacaagactatgtaatgtgattttgttgtttaaatctttatcattgtattttatgtcattctgtttattaagtaagctagttcttgatatcagataccaaacattagaaagaatttcaaatattaaaaaaattaaaaaaggatttaactctctcctagggtgacattacttccattcctgaacttgctgactacattaaagttttcaagtaagtacaaaaaggagggatgccaaatattaataactgtcagctttatagtcatggtcacattattgaaactaactgttaagtttgactaacaaacgcatctactgtaaaaggatttaccagttaggtgaacaccaaattaccacgagagaaaataaccacttttacaaaattaaaatcacaatgctcattcttttatcagatttttctttaaaaaaaaaaaaaaaagattgtgaaacctagattgcatcatacagatgctgaaacatagtaatacagtggcacagcccctccgggcctcagttggaagcagtacataatgaactgtgtcactgccagcgattatttcctcgttcagagcgcaagattctattgaactctgttcatttgttcatggaacattttatgtaaagttctagtatatctgatcaagatttttaacactctatccagctatattccacagaatcaagagagctcggcattaaggcagagaggagaaaaaggaaaaggaggtgatgtggaaagtactattttctactatataagatacaaaactactctagaataaaccatttaccatagctgaacatacagcagttcaaaatatggaacttctgagataagggcatgatttcagatccactaccctaccctttctccttcccccttgacccacctttctcatctacctgcacctttccttacacatcctcatgactgctctgtcatcttccttctgtgtttgatattggagtggcaagttaatgtcaccattggaatttaccccggagaaagaagcacatcccccactttcagtcctgccaggtaaatttgcatctttatagaggctccaaggcaatcctgcagacacccataaacctgcaggtaattacaggatctaggaattttccaattactgacatttacttcacctttcttttcctacccttcccatgtgacctgctagttagtgatagatgtgatggctacagctgcagaatactggaacacaggccctactgcctttctcctcggaacgctgtttgtgggatcttctagagtagattgagaagggaggctcgcatccagtaacagtagcactgactaataagacgctgaccaagggggatcaatttcagcacgtgtaaaacttgaccccagacttaaattaatattgtgaaactttgctaatacagcgttaataaagttacttccaagtgattttgttgttaattctctttgatacataggccaaaaaagctgactctgaaaggttacaaacaatattggtgcaccttcaaagacacatccatttcttgttataagagcaaagaagaatccagtggcacaccagctcatcagatgaacctcaggggtaaggagagcctggcacggctgttgttgatggtggcatccccattggcctaatagtcaatgagccacttgctgggataaacaagttttttaaaaaaatcaatttctttactcctttgggtacttgaaaaatgtttagatatgtctcttttacatagtccttttcacaggtttgaagtattcaattccacataaatattttgttgtaatctctttgtgcagacttgacctgaaatgtatgattcaacttttcttttttgttttttgagagggagtcttgctctgtcacccaggctggagtgcagtggtgcaatcttggctcactgttacttctgcctcccgggttcaagcgattttcttgcctcagtctccccactagctgggattacaggtgtgcaccaccacacccagctgcaaggtttcgtcatgttggccagactggtctcgaactccgggcctcaattgatctgcccaccttagcctcccaaagtgctgagattacaggcgtgagccaccacaccaagctgattctgcatttctaacttgtcaagtaagcttacgttgtcttttgatcttcagcattaaggacatttagagtttccttattctgcaggggctgcctccttgtctgttttggattctgccttattttaagccacgctgtagtcatccctgggctttcttcttcgacatcctgctcttcctcaccctcactgatgacaggctggtcccactcagggtcctcagcctctgaattttcctggctcgccagtagagtagctgacactttcagggtttgggcaagtccttccccttccccttccccaacacctcttcctcacacagttttgtctttgctctcatcctggcttttgaggccgcttcaggatattcctcggaggcttctagctgacaccttgagtctcactggttttctcttgtcctgtcttttcaaatccaaagctatctcagaactagggtctggtatttgggttgctcatttcctttccctcagggcgtttgtggcaggcctgcttcctacagcctgggctaagcctggatgaagcctcagctattggctttgttttggattttgtttttccttttcttcagtaaggtctatgacctacagcttaattttctatttcagtgatttcttctattggttcttcatactgctctttcacctttttcatctgatgatgccctggctcagctggtaggcgaatttcctctccagattagtctggttcttctgcaggtagatggcattctgctgctcactgtgatttctttgcagagcgttaatgagcctctcacttggggtaatacttttcaataaaatcacctggttcactttcagtgtagataccacttctccagaaagctgtatcccctgaggaccactctcccgtgagcacacacccttggcacatggcatgccttttggatgatgcagtcaatcagctggctctgcactgtctgttccacagtcctctcactgtatcttcccttagaagagcaaagactaaaaaactaaaatacactttctagactcatttccaatgagacttagattccagtcaggtgcattcatgggagacttaaattcggaatagagctaaggggttagagacacagaaaatgaaaggagggaggtattactaggcgctggagctaacacctgcagccatagtctcctggtttcccacctgcttgattatagcaaaggttgcgccacccttggcaagccagttctgagttactcctagtggcccagcccatctcttctttgggtacatttgtacgtacacatatttttgtagataaggcctttctaactcgaagtattccgatgtggacaacagcaccagggaaaagggctccagactgatttcacaaaaatgactcccaaaacaatttcatttaacacttaaaacacagaggtgcttttcctgattcatattcctaaattgtacttagtacagtcatgtatcatttaacagtagggatacattatgagaaatgtgtcaccaggtgattttgtcattgtgtgaacattatggagtgtgtgtacttacacaaaccatgatggtatagctgactgcacacctaggctatatggtatagccgattgctcctaggttacaaacctgtacagcattttactgtactgaatactgtagacaactgtaacacaatagtaagtatttgttatctaaacatatctaaatctagaaaaggtacaacttggctgggcgcggtggctcatgcctataatcccagcactttgggaggctgaggcggcggatcatctgaggtcggaagttggagaccagcctgaccaacatggagaaaccccgtctctactaaaaatacaaaattagctgggcatggtggcatatgcctgtaatcccagctactcaggaggctgaggcaggagaattgcttgaacctgggaggtggagcttgcggtgagctgagatcacgccattgcactccagcttgggcaacaagaacgaaactccgtctccaaaaaaaaaaaaaaaaagtacacttgtatagagcagtttccatgaatggggcttgcaggactgggagttgctctgggtgtgaatgggtggtgagtgaatatgaaggcctaggacattactatatgctactatagactttattcaataattttctttcttcaaacctttgcttactgtaactttataactacttttaacatcttgacccttttctaatgacacgtagcttaaacattgtacagctatacaaaaatattttctttatatccttattctatatgtttttttgtatttagatttttattttttatttttaaccttttgttagcttaaatcacaggcacacacattagcctaggcctccacgagattgggatcatcaatatcactgtccttcacctctgcatcctgtctcactggaaggtcttcagggggagtaacaagcatggagctgtcatttcctctggtaacaatgccttcttctggaatacccctgaagacctgtctgaggctgttttacagttaacttttttatttaagtagaagtactttgtaaaataatgatgaaaagaatagtatagtaaatacataaaccagtaacatagtcatttatcattatcaggtattatgtactacttataattgtacatgctacatctttctattactggcagcagaataggtttgtttacacagatgtgagctatgatacagctacagtgtcactaggcagtatttttcagttccattatagtcttatgagggcattgtcgctgtcgtatatgcagttcgttgtttaccgaaatgctgttatgcaatgcgtgactgtatattgtacattaggatagatttaccgtatttcaacacagtgttgaaatctgtaccctagtacatgagctctgcctagtagtcacttaaactattgcttttaaagttacacaaatttttaaaaaatagaaaaactcagtcctgggtaaacaattgctattcccacattttggaattctgtaatttacctgaaactcttaattagggtcactaccttcctctctcagtcacgggcgtttcacttttgggtctctgtcattctttgttgctctcaggatctgttgcaaccttctcctgcttccctcttcagctgcccaggaccagcgtaaatgatccactgttgactttgagactaaatctgtcttctggcccctgttctcactgtccctgttatatcttaaccttcttcctgtataactaagaggtcaggtcctggcatggaattaataagtttataagctgttctcagttttcatcccactgctcccaagtcctctcaaaggactcatcacactgatcattgcactcatcacaggcaccgcactgataacaccttgaccaagaatcaaatggtctggatgctgctcttctactaaacaagccctatgatttttgttgtttcgttttttgagactatgttgtacacgcttatctccaactcttggggtcaagcgatccttccacctctgcctcccgagtagctgacactgcaggtgcacaccactacacctggtttagatctgtgattttggaaagatagcacatctgggcctatagtatcttcttctgagaaatgagagtgttagactggatgccaaggcttcatagagatctaaaatgcaaagttattaaaaattcatttcagctaatactaagtgaactcctgtgccacaaactgtgctgggtactagagatacaaggaagaaccacttacagtctcaatcctcaggatggtttagagcatgttggcgagataaaattacaattggggtaataaatagtactttggaaaggaaaggaaaagagcaaggggtaagggtgttctataacttaatcttcagtgaggatggagagacttcatcggggatggagagccaagcacagtggcacatgcctgtaatcccagctactcaggaggctgaggtgggagcattacttgagcccaggagttcaagaccaacctgggcaacatagccagaccccatctcaaaaaaaaaaaaaatgcctagagagttttgtgctgctggaaaatagaatttaaggggaaggatgaatacttcttaatagctattgaatctgattcctgctaacatgagaggtagtcgcagaagaaactggcagacattagatgataaaaatggtaaggagattgctttttgaactggcagcagtgacgtgtcactgaaagaacattaacacaaaaatgacaagatccatatttataccagttatggtgcagaggagtcattttagagagatgatagtaatccaaattaaggtaatcaacatgggatgagaaaaggggcagattgaatagatactgaggaagtttggtcaatagtctgggtgacttatttgggaggaggttgaagtggggtcatttttctgatttgtgcaattgggtggatagtgtgatactgagataagaatgtagaagatgagaagaatgtagaaaaaggagctgggtttggggggaaagatgagtttaatttggggatattttgaatttgaggtgcctgtgggatgtctatttggagctagcctgtagacattggattaggggagagatgcacatgctacagatactgatagggtaacagttagcagtaatggtaagtgcagccattgcaatggttgtctgtaatgtgagaagacaagatgaagaatagaaccctgcagatcacccatgtttaagagacagggcaggttagaagaaggggaccttgcaaaggaaacaaaaaaaaaatgcataggaagactatggcagtgaagtatgatgaaagctaagataaaagttgtttcaaaaggacagagtagtcaacaatgtccagtactgtagtaaagtaaggtagttaggccaacatagtatctagccatgtagttcatgaccttgataagaacaagttaagtagacttcagtggtttattgagtatggagccaaagtacagtcactgagaagtaaataagaaacaaaaatggctgggcacggtggttcatgcttataatcccaacattttgggagaccaaggcaggtggtggattgcttgagcccaggagtttgagaacagcctgggcaacatggtgaaaccctgtctctatttaaaaaaaaaaaaaaaaaggaggcaaagctttttaatgaactttatctatgacaaggaagggggaaagaggtaacagaaaagggaggtaggttgtggtgtaagatgggagagactcaaggaaattaaatgctggtggaaatgtggcagtagaaagaaggaaatgtagtgtctgagagggaggatctcagtggtggagcagggttgctcggatggtaatgaactcagcccacttggataggaaagctggaggatgagggatgcctcttgcactgcgtggaagcaaggacagctaagtttatcttgtacggtggcaggaaatggatggacttaacttctggtggctttcattttcttggagacataagaggtggagttgtcccttgagaccaagtgacattgtaggatgtctgagaagatttgaaataggcattgttgaaaatgtctgtataagcacagaaggatgcaagcataaagggcccagctgaggttggtatccatgaatctgtagtgaaacctttttttcttgcttcttcccatcttgcagtgctaagcagcctgagtataggcaaggaaaagttagagggatttatttacctagggtgcagattttgctaggagaatgtataatgtgaagacagtgagtctcggcagttggagttgatgtccagtgaatgtggtccaggctggttgggaaggagggagctgttgcttccttctgttgctgttggggagaaagtggaggggttgcagcatagggttcctcaaagagttaggattagagattgtgaccagaattggctgtttgcatttcatctttcagatgtacactaattgggtaactgaggaagtccagtggttgccgtggaagtaggtagctgaggtggcatggaatgggtgtttgagatgtggcccctgtaggcctctgagcctacactagtgcctgagttaccacccactttgtctctccctgtttagttttcttgtttttttaaaagaggcctaattattatggaattgtgtactgtaaatcctcttgaattattaatgatatttgtgcaaaagattgtgtactttcaaacaactgtttcaactttgcacattaaacagttcgtcacacatgttctcatcattctaaagcctgtataaaaggagatataaaagaagaaattcatatgtagtaaatattttaaaaagaaaacaaagggcaggggggaatctacaaaattcatggtaggagttgcttctggggaggagaataaagagggcctctcctttatctaaagtgttctttttatttaatactaaaatatttatgtagacagggaaaatgacaattttaacatttgttcttctgaatatggagtgtgtatgatcttatattctgtgccaagaggaattgaaaaagcaagccctactaacaatttaaaattttcttcgtagagcctactgcatgatcatatgacattgtgctttgttcatgtcattcttggacaattggaataagctttaggaagctttgacagtgtattatcttatttatccttaaatcatccctgtgaggtagagtccaaggtcaggaaatgtcgacttacagaagttaaatggcccataattattattaataagtgacaaagaaaggtctgcaacccaagtctctctgactgcagagctctacttcactgtatttattatactgttactacttgtttatgccagctgttatgccattatctaacacctagttcagtaaatctgcactcccttctgtaaagcctcctacaaagtgaaattctgaagagagagtttcgcttttgttgcccaggctggagtgcaacggtgcgatctcagctcactgcaacctccacctcacaggttcaagtgattctcctgcctcagcctcccaagtagctgagattacaggtgtccaccaccacccccggctaattttttgtatttagtagagacatggtttcaccatgttggtcagctggtctcaaactcatgacctcaggtgatccgcccgcctcggcctcccaaagtgctgagattacaggcgtgagctaccacacctggcctgaatacagttgttttcattccagcttcccaagtatatgtgtatgttaccttctgcagcagatgccttcataaaatactatggcaaaatccaacatgttaagatgccacagaatgagggctgcttgtattgacttgagatttcttaaaagtaaatttagccattttaataaaaattttttgttacaggatgtgaagttaccccagatgtaaacatttcaggccaaaaatttaacattaaactcctgattccagttgcagaaggcatgaatgaaatctggcttcgttgtgacaatgtaagttttccagttaaaaatacacttcaattttcttaaatgagttgaccagtcatccttatattttatacttgaaagacccacctcgtgatacattgcacacatcagtatttcttttctccaggaaaaacagtatgcacactggatggcagcctgcagattagcctccaaaggcaagaccatggcggacagttcttacaacttagaagttcagaatattctttcctttctgaagatgcagcatttaaacccagatcctcagttaataccagagcagatcacgactgatataactcctgaatgtttggtgtctccccgctatctaaaaaagtataagaacaagcaggtacttacttcattttacttcatctactgtgctggtttgtttttataattttgtacataactttgtttttcccctcttaaacaaaactttttagtcttaattttgtatcagatggttagaatataaaatacagttagagtatccctaatctgaacctctgaaatcctccaaaatctgaaactttttgagtgccaacatgactctcaaatgctcattggcacattttggatttcagatttgggatcctcaactggtaagtataatgcagatattccaaaatccaaaaaaatctgaaacccaaaatacttctggtcccaagaattttggataatggatactcaatctgtagaaaataaagtaacctttagtcagtttaaattggtcattaaaaaaaaaaatctttatcattttaatagaacagataaggacacagaatagttgagaacttactctaaacaaattgcagaaatcattctgttaacatggtgttctttcagacattttagggaattgaatatggtctcaatgctttgtgttccttaatttatttaattttattccatatataattaagtaaatgtgacataaagtgcagccagcatttctcaacaaaatctgtaatacctgctcttgttgaaattggcttttccagctttagaaagaaactttacaagagtacatttttagccgtgtcttttcttaacattttcagtcagaacctaaccacaattttacacatagttacacagtttggtaaattttcattgaaatttgcttttgttcactctgtttagaattcttttctttggaaattaataccataaaagggctgctacttaggaaaatggttctttggtacaacataaaaagtcctttacaggggaatttcacttggtataggccctggtattctctgcccccaacatcatgccataaaaggaaaaggctttagtttgggggtggggagacgaagacctttaaaataaacattttgtttttatctaattttgctttaatctttgttaaggaataattttaaaacatactaaaaaggctcaatgaaatgcccagaacacttactaattccttaactttaagtataatatttattatatgggtctaaaattatttctacctaaatgttcagaattttaatgacagaatatttgtctttaagtctcagaggttgtgtaagcctagaaattgtttatcccgtggtcatatgatgtgggagtagtaaggaatggaggaaatgctgccctggggaactgtatggaatgtagattgtaagttaaaaagagaaagtaaagcaagtgctaatttcatttttcattcgtagttttttaaaattatttatacagaatcttgtttctaaaagtgaacttatttgccttcaaaggcaataagtaatttcaaacctgaccaattttatcatttcacagtaaggtatcagggagataaaagagcttaaacgagagctgccacacattgttttcactgtcaactatttgttttctcagaagccttttaaatgatagttcttgactagaaactatcaactgaagatttatctttaactgacaggaggacagtttgtgtgtggtccgtggttaaagatccttctggccttgcctttcatgttgccatctaatcaaatgcacatttttaaccctcctttctctcactagagctataggttagattttttggtgtgtattttgttctctttgaggcagagtctctctgtctcccaggctggagtgcagtggcaccatcatagctcaagcgcactgcagcctccatctcccaggctcaagcaatcctcccacctcagcctccctagtaactagaaccacaggcacgcactgccactccaggctaatttttgtattttttgtagagatggggtctcgctatgttgcttagactggtctcaaactcttgagctcaagtgatctgcctgccttggcctcccgaagcactgggattacaggtgtgagccaccacactctgctggaatagacttacaaattgttggccaggcacagtggctcacgcctgtaatcccagcactttgagaggccgaggcgggtggatcacttgaggtcaggagtttgagaccagcctggccaacatggtgaaaccccatctctactaaaaatacaaaaattagccaggcatggtggtgcacgcctataatgccagctacttgggaggctgaggcaggagaatcacctgtacccgggaggtggaggttgcagtgagccaagatggcgccattgcactccagcctgggtgacaagagtgaaattctgtctcagaaaaaaaaattgtttccagagaatagcgaccatgatgttattgccctggtgcctagtaagtagtgacattcagaagtttagttgctactgtgtgtcagataccacactagtcacactggacatagtgctcagtaattattaagctgtatccagttgcgttctggaggctgtaggaagatgtgcaggccacaaggacattcttccctacctgggcatagactcgtagttttcttttgggtctatcaaaataacctgttgtatttaacctactttaattcccttcaattatatatatattaactaaacatgctgtgggtatttttaaataaatatgactctcaaactggatttttaaattttgaagaattattctatatgttgatttatgttaatctaaatggaaatgactaatgccataaagccgaaattcctcatgtagtatacggcatctctttgttttcccttccaggaaaaaggatgcaaaaaacacatggtaactgaggggtttgcttttcttgtgtaaaaaaagaaacagatgggcactgcacttattttatgccttcaaattcttatttctgaaaagcagtgcatggatcatattatctgactaaatctgagaagactttaaaggcttttggatacttttattttgctactaaaataattggctttaccttaaccggtgagaactgggtacacgatgtaactgggtacacgatgtagggggaaagaaatatttgctctttttatcttctccctacaaatttctacccttaggttctttagcaacatttaacattctaaaataatgtggagtgtttctcagtgttctaaatggaaagtaattgctgcttcctcattttcatttttcattcttgcatttactttgcttggtttctacctaaagtagttttttgcatgacttttggctggaattttggtttgcaggtgaccgcaactttttctttgcttcgttgccattttttctgattgcctttttttttctttctgcttcctttttctttcctcgcattgccatctacagccaggctatataagagatttggtaagttctccatatttaccacaaaagaaaaagaataaataaaaattcatagccacaaccttccctcatggaatttaccccagtagtgaaatttaaatttaaaatagaaatgattatggtgatttcaagtaccttaaagctgctaacaaatattcctgctagaaacatgtattccaggtattcattctgattatagacatagtgctaaatttaattaaaactcgtgtatatgtggattagaatgtgctgttctgtaatagtagtaccgttaggtgtatgcatttggaatatgtctcaagtgtggcaactatgtactcctaatagtactttttgttgatatatgaaaactgaaattaagacttattttgaaaaatccttatacattacattattacagtgtccaaatgtagcttcagatattttgatttcaactcttacaatatgattttggggtacggggtgcgtaattcaatcttttgatcttttgtctcagttctcccatgagagaataatgttcaatggtaaaggtgatgtttactcatgtttagataacagcgagaatcttggaggcccatcagaatgtagctcagatgagtctaattgaagccaagatgagatttattcaagcttggcagtcactacctgaatttggcatcactcacttcattgcaaggtcagtggttctaagcatctatgtgtaaaccttaatctgcatttttgcttaatctacctcatgtaattagatattaaacatctaaagcatacctatgtagacccattaactcatattacaatagaattcaaagactgttagaatgtattttgtaagcttttaatttctacattaaaaattcaagataattgtgtttgttttactactaagagaatagcactcttggccaggcacggtggctcacgcctgtaatcgcagcactgtgggaggccgaggtgggtggatcacgaggtcaggagatagagaccatcctggctaacacggtgaaaccctgtctctactaaaaatacaaaaaattagtggggcatggtggtgggcgcctgtagtcccagctactcgggaggctgaggcaggagaatggcgtgaacccaggaggcggagcttgcagtgagctgagatcgcgccactgcactccagcctgggcaacagagcaagactccgtctcaaaaaaaaaaaaaaagaatagtactcttttagggttagagagaacacttatcttgaagaaaagcagtccaacatgttcccccacaacatgtttttaaccgttcttttcttaaatgttataggttccaagggggcaaaaaagaagaacttattggaattgcatacaacagactgattcggatggatgccagcactggagatgcaattaaaacatggcgtttcagcaacatgaaacagtggaatgtcaactgggaaatcaaaatggtaaactcataacaatgttacttgaatatagtccttctctgatacaaattagtacattaagaataaaaaggcctataaattctgatgattatttgtaccaccacctcttaaagtacagacagaccatggttgactattcatttctcacttaaatttgcctatttcataattagcccagttactaaaattctaagtgcataatttgcttagaatgttgccttttttgtctttctgtaatggataaagccgatctactctgaaatagcagctactgtttgttgaatgcctaccctgtgccagacatgatacttagaggcttacattagtaccctgtctctaaacctcatcacagccttttaaggcagttggacaaatgaagacactgcaatagagagacctgagggccatcattgtctatgaccacgcacaaagtaactacagaatcatttcaaactcagatgctttaggcttaaaaacctggcacatttaccactgtacatcatgttgcccccagtcttggagtatacgagtatcatttaaaatgaaccatcttttactaataagtcatttggtttagcatcatattggatttattgtatcaattcctattacttcaaagaatcttatatttctgaaatactcaaacgtgatacctaaaatttaagtatctgaagcgaacgttaaaacacaggaagtaggctttcctgcacgacttgaagagaggcattctcattaattgaatcaatcaccagagaccatttgagaactgaacgacctaaaacccttgcattcctagtcttccttttcagaacatgaaaacttaaagtgtaggggaagggcaataaacttagcttcttctttgggacttaaaggcattattcgtttaggttttagacagactgatcatttgaggatcaacaagtgttttgtgatatgacagactttaagtagcacagtagttttgtgtggacccagccacctagcatttgggacagcactgatggctcttgtctttgttccaggtcaccgtagagtttgcagatgaagtacgattgtccttcatttgtactgaagtagattgcaaagtggttcatgaattcattggtggctacatatttctctcaacacgtgcaaaagaccaaaacgagagtttagatgaagagatgttctacaaacttaccagtggttgggtgtgaataggaatactgtttaatgaaactccacggccataacaatatttaactttaaaagctgtttgttatatgctgcttaataaagtaagcttgaaatttatcattttatcatgaaaacttctttgccttaccagaccagttaatatgtgcactaaacaagcacgactattaatctatcatgttatgatataataaacttgaatttgtcacacattccttagggccatgaattgaaaactgaaatagtgggcaaatcaggaacaaaccatcactgatttactgatttaagctagccaaactgtaagaaacaagccatctattttaaagctatccagggcttaacctatatgaactctatttatcatgtctaatgcatgtgatttaatgtatgtttaatttgatatcatgttttaaaatatcctacttctggtagccatttaattcctccccctacccccaaataaatcaggcatgcaggaggcctgatatttagtaatgtcattgtgtttgaccttgaaggaaaatgctattagtccgtcgtgcttgatttgtttttgtccttgaataagcatgttatgtatattgtctcgtgtttttatttttacaccatattgtattacacttttagtattcaccagcataatcactgtctgcctaaaatatgcaactctttgcattacaatatgaagtaaagttctatgaagtatgcattttgtgtaactaatgtaaaaacacaaattttataaaattgtacagttttttaaaaactactcacaactagcagatggcttaaatgtagcaatctctgcgttaattaaatgcctttaagagatataattaacgtgcagttttaatatctactaaattaagaatgacttcattatgatcatgatttgccacaatgtccttaactctaatgcctggactggccatgttctagtctgttgcgctgttacaatctgtattggtgctagtcagaaaattcctagctcacatagcccaaaagggtgcgagggagaggtggattaccagtattgttcaataatccatggttcaaagactgtataaatgcattttattttaaataaaagcaaaacttttatttaatattt

SEQ ID NO: 30 - DNA, 110839 bp, Homo sapiens
gctgtccccaagccgattggtacttcttgtcaggaagaaacgccaagaggtgggagtgcctggggagggaggcaggcggtccctaccgcaggcgcggggagctgcctttccgcccctccgcctgctttccaagcctggactcttaggagtggctgaagctgcggagcgcttttggagcctgtgaatgaaccctcctcctctccctcctccttcttctcgctgagtctcctcctcggctctgacggtacagtgatataatgatgatgggtgtcacaacccgcatttgaacttgcaggcgagctgccccgagcctttctggggaagaactccaggcgtgcggacgcaacagccgagaacattaggtgttgtggacaggagctgggaccaagatcttcggccagccccgcatcctcccgcatcttccagcaccgtcccgcaccctccgcatccttccccgggccaccacgcttcctatgtgacccgcctgggcaacgccgaacccagtcgcgcagcgctgcagtgaattttccccccaaactgcaataagccgccttccaaggtaatcacgtttcttttgttccccccttaaaaaacaaaaacaaaaaacttatagaaaaaaacccgcgagcttagaaaaaagaagcaattggtagaaggctttaattaaggcaaagagctgtaaggcgaagttaagaaaatgtaggcacttaaaaaatgcaggtaactttcataagggcttttggggagaggcatacagagggaccttggtgttgaaaaagattcagacaaaagaaacccagggtggggtggggggtaaaatgactaacggaattgggggaagggagggaataaattgtaaagaaatcatagaaaagtggtgggttcttgagctggagagaagagagggacctttggcactttgatttttttgttgttgttgttcttaacacgctcgaggcaaaagtttgaatggggactaccaagacttgccacagacaagtccccgaagccgccttggtgcaggccacctggtttcccagcccctggtgtgtggtcagtgcctggtgttcctggaaagccactcccgggcagctcctgacagtgcgacccggcgcccaagcagcctgggaccttgcgcggacctgaccccttcagaccgcaggcagtctgggaggaggtccggccgggggaggtgcaggatccccgccgtgtctctttgacgacttggggactgtcacggttctctcccggcgcccctgggttcttttgtcctgcacgcggtgcgaaggggccagcagggaaggagcagaggatggggggtggggttgttggagccccgcggaggtctgggaggcccctgggcgggaaaagcctgttctgaatcggcagggatgtgcaacaatttttctcaccctgaagagtgaaatagggtctgtcgctcccatctcaacaagcaaaccggcacccagagcgcactgcagacaaaggtggctcggggacccgaatcaggggcctctgggtcagtcctctcgcccagactacaggagtcctccgtttccttacatattccccaccctctcctagttctccgctctagttgagcaactttactggcaggtctagcggcagcggcgcgcgcgtgtgccgggagccccgggggacgtcctcggctggagcgccccaccgtcctgcagaggcgtgggcgctgtagggcgacatccctggtgcgtgcagacctagggcatccgggttgttctggcccgcggtctgtgtcactgggcgtggagcggtctgggtgttaggcagaggagagcggggtagaaaaatagtgtcatagcctaaactatttgctctccaatccaactgcgtctcggcaagtcctgcatgtccctgggagatgctgcgggaagggggagaaatctacacggcgcctggagagttgtcctgccgcgcgcacacccgcggcagagtctctctgggtcgcgttcctcatctttgtgtctccctctgtctccatcttctctgcctcccttcccctctcccagcctctgttctctctctctagcttctgcgtcccctcccccacagctgacaaatgaatggctagtgtgaaatccctgcctttcccgtgctccaaggcagcagggagggaggagcgagggaggcggtgcgctccttcggatctgcccccagttcagctcacaagacttgcagaacctagatgtctaggaattgggagttttgcggcgggtgtgggcgccccctgatggagaagtcccgcacaggcggagaaaaacaagccccccagaccaagcgagcatctttcacaaccttgtgttcaaggatggaaggccctagttttcccttaagtcattcattttgcactccacaatctgcggcgtacatctaggagtttggaggaccctgaaaaaaggtcttggtctgtgcaaagtgcagagatgccttctcgcgagtcggctggaacgcacgcggcgccctgggtccagttcgccgcttagtggacgaacgcacatggccagggtggagccaggtttcggaggtctagacgcgccaccctgggcgtctttaagaaagataatacacataccgtgctctcaaaacccatgaccacttgaacccaacgctagggccccgccccaggatattgcaaaagaagggctcctaatccaaaacttaaacttcctcaacttcagggcgggcgtcggacgggaaagtggagagaaggcgggcagtgggaggaaaaaagaaagggaaggaagggaagtggaaggaaagaggaccgtggaggggaggaaaaggagaaaggaacggagatggggcagatggcattcaaacagccaggaacggaccggaagggttcgtttcggggtttgggtctgaatttcgagactcgttttaggatactcttttccctttcccagcggcaacaaatgtgactgcagaggcgtgccgggatggaagggtgggaaagaactagacaagcggaggtggtccagccccgcccaaaggggctgggtctggggcccgcccccactcgctcacctcgcgccaagggaggacccgcaacgggcgctccccgcagcggctgggttagccagccgccacgtgggttggcgcttcggctcccagccgagacgggtgtgacttcctgggctcagagactgcagtacagccgcacaggcggccggcgcagccgaggcccccacccaccgaggccaatgggggcggggcggggaaggcagggcccagcttaaccgagagagccgagtggcctcgcccccaggattcggggccggctgcttctggagctgacccgagttccatccagacagcgctgaacactcttattaaaaggctatttaagttttattttattttattttatttttgcttgcttcttgggagtggtaggaggggcatcgtgcttttgttttgaggcaggggagaggttaaaatttactccaagcaaactttttgtcagaaaaatgagactttataccgtattccatttgttgactttttaaatacattcaggtcactctaaagcccattcttagtcaattaacagattaatttcgttccagactgtcataaagagttcgcctggaatggcaaatactgccattcgacaagactaatagaatttcatgggggcaaacatggaagggctgcgagtgtaactgaggttcctgtgcctcaatgaggaaccttagcggggacctggcggggactggaagctcagcacctatttagggagtgactgagctggaaacctggagaagcttggtgcagacgagacggtgcttcttagagctgcattttaagtcctcccattttgctgcatattggaagaactggattttaaagatcttttccatcacctcagattctgtagctaacagccacgtctttttctttttgtctgctgaaagctgtgacctaattgttttaagcacttcttgacaatttcgccaaacccatcctgaaaatattcacataaagtcctaaaataggatgttgtgagtgtaatataaaaataggaaggtaccaatggaagcaacaattagtgttctgagatagaagcggttcccagtttgtaacttggaaatgttaagagcagtacatcagggagaaggtctccaagagtctgacttcttgttctgagctctgagtaaagaaagaaatatgttagaattgtattgtctgcccgcagtaatattgtaaagggttccaatggattccaatgtgattgagcaattacttcctccagcaccaagtccacagtccttaatcttcttgtgagaagattaggtaggaagcgggatgagattcaagacaatcatttaggatttatgtcagaattcaaagttttgattcttttggtagataaaaacagagttggttttaaattgtatttcctgctttcaaaaaaacgaggtttgaaaggaatccccctagatttacataggtttacagatgtaagtttcttctttttccctgtgtttgcaaactggagggagatgcctttgatattccagaatacctgtatctatacacttgtaaattctgctaggaaaggacctaaacagctaaaccaaaggtgaccatgattaatgttaaagatactacccattgttctctcttttgttgtattattaggcttaaatactttggagttaatgattggtcacttaattgagtaacagagcctttgagagcgcaaagatcaactaactctgtctcccaaagtctggcaactaagccctcctttcctggtgagatttaaacatttttgttgacgtcattcatggacaaacatcggtaaacactgtatttaaaatgggatattgccctgtgatggagcagaacttctcaagacacatggttcttttgaaagaaagaattaatgactgtagtaaggtattttttcaccacccacgtagagaaaccagttaggactgacaaacactcattgttgggagttacttgctctggtctgagaaaatatgctgattgttacataggtctgtattttaccagaaaacacaaagcatgtactctccctgatttggaatcagaaaagggggattagatatggatgtcttggccaagctccatttcaattagtgaatttttgccagtttcctcttgtagcctagacttggtaaattacatatatataaagtctgtgtgtgtgtggggggtgcgtgtgtgtgtgtatgtatacagggtttttaaacactgctaagttcttaccattgaatgtgttagaggtggttgtatttcagaggtcagtacagagaatctttgtttaatgtgtcagttctgtttcctgaaacacacctctgggtagatttaccaactataaaaggatacaaatgtatatactttccacatctgtatacatcctacctcattcttctaaggattttaagaggtgtttatgtctataaaatgagattacatattttacaataaacatatttgataaattataatctttttattattaaattattgatttgatattacttgaggtatagtggaatgagcactagacttggaatcagaaagtttgagttggactcactagctgagaaaaccaagcaaagatattacttttggacctttagtgtcataatctattaaatgaatatgcagttataaagatcaaaagagtaagtactttgaaaaactatacaaaaaagggatgataatatattatgtcttgggattcatattgatctaattctataattttaataataactgcattacccaagccatgtagtttctactgaatctataaaataaatcagagaggggcatattgttttaaaaattgtttagtttcattaatcagaagacaggttacagaaattgactccaatgaagttggacattcagtggaaaggaagaattattcaataaatggtttcaggacaattgatgggtccatgcaaaataagaatcagtctctacctgatttctcatcctaaaagaaatataagatgaatcaaatatgaaatgtagggaataactttttacaaaatgataaaagaaaatcatgggattaaaaaaaataagttaggaatagagaaacctgttctaagcaaaacataaaacccagtgccattctaggaaatactgataggtctgactaagtaaaaattacacaaaagcaaataatatatttggaaaacatctacgacatttgagagacaaaaagctaataactcttgatattccatggacttttatgaataactttgaaaagtccacatctatcaaaatatgagcaaaaattatgtacaggtagtggcagaaagagacatagagttttaaaattatagaaaaaatcgctcagcctcatctgtaattaaataaatagtaattaaaacaccaatgatatgctacaccattttttcaccaatcagaggagtaacaaaaaaaaataatttttttctttttttttttttttgagatggagtctgttactcaggttggagtgcagtggcacgatctcagctcactgcaacctccgccttccaggttcaagcaattctcctgtgtcagcctccctagtagctgggattatgggcacccaccaccatgcttggctaattttcgtgtttttagtagagtggggtttcaccatgttggccatggcagttgatcttgaactcctgacctcaagtgattcacccacctcagcctcccaaagtgctgggattacaggcatgagccactgtgcctggcaaaaataaaattaaaaagtttgatgcaagtttgtgttggccaggttgtggagaaactgggtctctcatatactgttgtatgaaagtaaataggttcctctacttcaaaaaataatttggcaatcacttttttttgattctttatcaaaagtttttaaaagatgtatatactctttgattcagcaattccacttctcgacattattatatggatggatattggtaccaatatcacccaagacaaatggacaaggatgttctttgcagcattgcttctaagagcaaatatctggaaacagtgtaaaggctcatcatagggaaccatttaaataaaagttgctgtatccacctaatggaaaactatgcagctgtcaaaaataacatggaaaaattgtatttgctgatttggaacattctccaaaatatattgtattctaagtgaaaaaattgatagataaaactgagtatatattatacatctaattatgtaaaatgggtgtatattcattcttttaacaaatatttactgagtgttctaggcattgtggatacaggagtgaacaaaacatcaaagactgctctgttggaacttttactatggtaggtagagaaaggcaattcccaatcacatatgcaaaatggtgatatgtgctaggatgaaaatagagcatgggaaagggaatagagtacagtatgtcttaggtagagtaatgagaaaggagttcaccaggcagagaacagaggagtgctaaggggcgacaatgtgaaaaagcttagccaagtccaggttcaggaattcacatgatgctattacttgtatgaagtaaattcatgaaatttcacacctaaatcacgtgatttctctctgctgtacaatgattctttctgtgagaaagaaccagtgagcaatatgatatgtgatgctcattacatccactttgtagctgaagtatcctagaaagttggttgtctagggtacctaattagcagaatggtggacaaaaccaccgtgtctctgtccttaagtcaccccttgtcagctgagcttccccaaaatcaagggagaatactaaatatctatttaatagaatcttggctttctctcggaggctgcccatccctggtgtgtcccttatcctccctgcagacatttctcatggataggagttccattgaccttgtcttttatgtctcccaggcaattaaacagtctcagtaccctgtacctggattgttcaatgactttcttcccttctcattgacttcactggagtagaaggctaaatataggcattcactctcatatctctcaggtctttccatgcagacagagttgttatcactagtagacggtgcttataagagagacatggaaaagtggaagaatggaaatagggatttggagtggtgctaaaaacaaagaaagaggcttctgaaagctttccatttaatatgatcaaacatagaagacaaaagatgtaacttaatgaccaaggatagggacatagccttgagaaaattacagaagtggaatgaacgtcttggactccaaagaagagggaatggaaatgtagttctgaggcagctaaagtcaataaagccctctgatatatttactgtagaaataaatgatcatcttttaattcaaggtttgcaaacttaggtgactacaggggcgaggcatggagtggaaatgggtaagagactaagtgggggcagtaatggccttgagcacacagacttaaggggagagactgctgcttggttaatgctcatgatcagccagctgaaatatagacttagtgttgctagaccttctgattttttgaaagaagttagagatcttatatttagtgtaaacagtctaatttttaaattgagtaacttattcaaacatatttatgcaacttattcaaatgtatttagagcatgtctgatctcctccttgtattcttacctagtcttaggggtaatcttaaggaaagtgatgcgtatacttgttgtacctatgtagatggaggaccattctcctctccccaacaaaagacacttttataaggattgagtgtggcacaaagagttcgatttttagtatttaaattgagtaggaaactcaaatacagaagatcctttcctgggtcacacctttggtttttttaaatgagatttgactctctagatattgacaaacatcatattattgggtcatggtaaatcttcaagtggactgattcaaaagtgttcaaaagtatttcaggtgttaaggaattgttggcacggagtttcaaaggtgtttctgcataagaaatagaggcgttgatcatgtatttgatctacaaacattcctcaaggatataccctgaacctggcaatgaagaaatattgtgggaattattaagttgaataaagtactagctctgccttccagaagcctactgttctacagaggagattagacatgtttacagataatttgaagtacatagcaataaattataggatgatttattccaagcataaagtgtatattgctactatagtggtaacctaggttataattttcaaatgtaagagccccaaatactattctttttactcttagtgatatgaaactatgttagaacatctgcagaaagtctgaattagtaattttaataataaatattgagtactgatatattgtatatcactgagatttattttatatacattattttatcaattcctatgatcacttcggtaagtactaattttcacaactaagtagtgacagaaaatgaggtttagagagatatagtattttacccaaagtcacagaatataagtagagaatgcagaacttgcattctgggctatttgacagtggagcccagacttttaaaattaggcttataaagatttcctggaaaaaaagaaaaataaaaaatagagaacaaattttcctgaagaaaagtaggaaattattatttataagtataattaaagagagatctttaatttcttttttttttttttttttgagacggagtctcgctctgtcgcccaggcgcaatctcagctcactgcaacctccacctcccgggttcatgccataaagaaaggtttcttatttggattcagctaatactcatggaatgcattttctttaacacctttttatcataaaatacaatcttttactttggctgtgcaattgatacctttatttttccttaaaatattgtaatagcatagatatatggtatatacttcctgcttgctgtgctgtcttataagaaatccagaaacatagaaacattatggcatttcccagttagtgtttaacaaagtctattagcagatcctagtgattataggataaataacaaacttaattatcagggttaatttaggattatcaaccatatgtttttcattgtgaattatcagttggtctatagatggaaaatataagatgtataatgtattagcttaaaaaatgctcttcagagagtgtctagaattatagaatttaaaaattttgttttgaaaaggtctaattcttatttcaaaatatataaagaaatcaaatgcaaaaaaattaagagaaaaggtcttaattaattaaatgctgtacaactccaagccctatttatgttcaagatcagttttgtaatttatgactaatttcagcattagcttgttttcaatctaggtttgctaaataatatagaatttcttttccaatgaagtttttcagggtcccagctgaaaaatatataccagttaggatgctttcaactgtaaggaacaaaaagtcacgattttattgggtttaaacaataatgacatttataatctcatataaaatgaagttcaaaggcatggtccactctaggtctaatccttaaggacttacgccttgcctttgctgattctttctcagcttcatttccagaggtatctcacttactcatggatgcaaaatccctacaacagttccagcagaaagattccagcatgataatgtccagggaagaaaactgaccacctcttcctttgttctcttctcaggatgaatctatctttcccagggacccttcactggaggaagagatcccctcacatctcactggccaaaactatattatatactgttccaaatccaatcattggaaaagggaatggtacctctataattgacttaggatatcaagatcatcccttgggctggggtttgacccaggattctccaaagtatgtgactgagggtaggcactagaatggaaccagagttgtgttagaaaggagaaacgcatggctattatagaatagttctaaatgctaccgaggagggcacaactgtaaaaaccaaataatcttttgccattcttttgaagttggcactttgatttctagatggttccccaacacaggttcttctcctcctcatcattatagctgccttgaaatttgagctggaagggaacattctgagacccagattgttaaatgtcttttccaaagtcatgcaataaattaaatggcaaagccagggcagtttcttgactcagtacagggtattttctttcattctttactcttgagacgttagaactgttggtactgctttaaaattcatggcaagaactggtcacttttgtaattaacacctccttataatacatttgttttgtttgcttagccagctagaaactacatggagtctgtgctttaaaaagcctgccgaagtccttattctctgttttggtattatgtgcatgaaccaccaattggttccttctcaccttacacttgatgaagatgtctttctttcaacatctttctctattgctccccatcttctcttgctctatttatgatcagctgtctgtttctaaatagactttgtggtcacccatttctttttgtgccagctcctatccactagttacttgaactgtggtctctgttgttcttcatacagcctactcacttgtggttgtcacacacatccacattgttatatgttcccaaactgtattctggaatgattttggtaatggctgcattggatgagattcaaactaataattaaagcattgagatagcttctgctattacaagtttactcctgtttttatagtccaagaggagctacttcttctactcttattacttaatgcttaatactacccttattacatacaatgcacaaaaagcatgtgatttatgacccactttaaacctgaatgcttgtgatttactttgtgtttttcttcatttctaggccaagatgttcataaatataaagagcatcttatggatgtgttcaaccttaatagtaacccatgcgctacataaaggtgagtgtgctaacaatttctttggtgttaattgaaataaaaatgtaagtgctggaggatgaaatggcaatgtggaatcactggaataaaagattgatttttaaaatctattaagtgctgaaaactatcagttaaaatattattggaccaaaaacattagttttaaataaataagtcaaaacaaaataataagtaggatgctaaagatgcaagtgagcttttagtaacttccctgattactttcaggctttgcaaaaaagctcatatatggtattgggcatattttaaaattctaacactatttctcaaaaactttcctatgcaaaaaaagaaacactattaaacacccagtgggctagaatttgaaaagaattgagaagataaagagaaagctgacagccatgtttttgcccttagttccttttcttttcttttttaaaaaagcagttggatatgcatatgccctagttttttaatttgaaattttatattcttccaatgagggctctataattccaaatttattatttaatatattcaaggaatttgaagaaagatgctatccaagagtttcactcatctgcttctgtctgtctagtgtacctctccagactcagattccatttcttcctcacacttatattatgcatcagactcaccttttatgattttccagatgaattccttttgctaaagtttaagtcatccatctattcattacccctccatccatccatcatctatctattcatccatccatacctccagccatccattcatctgtccaaaatctttccatctgtttgcttatcaacatctatccgtgtattcatccatccatccatccttccatctgtccaaaatctttccatctgtttgcttatcaacatctatccatgtattcatccatccatccatccttccatccatccatccatccatccatccatccatccatccatccattcatccatccatttttcccactcacccattcatctgttcacccattgatgatattttttgaataccttctttgtgccagatattattctgggtgtctgggaatatacccatggatgactcataactggcctatcgttctttaaacttacttctctagttatgggagaccagcaataaacaagtaaacaaacaatccaggtactttcaaattgatgaacataaaacagagtgacatcatagagagtggcttgagttgggggaagttgataagacctccttgagaaagtgaaatttaaagtgagatgagaatgataatgaggaaccagccagccaagacctgtctgtaagttaggaagaaacatcgtgtgtttgaatagcagaaaggtcactatagttggagagcagtgatcaaggggaaagtaggagacatgaacagagagattagcagaaaccagctcatctaaataataataacacccaaaacttgaatagaactccctatgatccaggaactgttttaagtgcttaacactaactcactgaaacatccattacccctgtattctattgaggaaactgtggtaccaagagaggctaagcagcttgctcgaacgcccatacccagtaagaagcaaagcttggagatgaaccaattcataggagtgtgtgctctttaccaccatgttatacttcttatctacatggaacactgtaggctttaaaaagtctagaatttttactcaggaggctgagacaggagaattgtttgaacccgggaggtggaggttgtggtgagccgggattgcatcattgcactctagcctgggcaacaagagctaaactccatgtcaaaaaaaaaaaaaaaaagtctagattttattccaagtgcagtaggaagtattgaagggtttcagcaaagaaagatatgagttgatgaatgttttgaaaattcagtttttgataatctatgcagatttgattgtaggaaagcaagggtagcagcagagatatcatttaggaggttattgtagtagcctgtgcatgaaatggggtggggagtagtttagatcaggtagcagtggagatgaagagaagtgaattggatatgtggagatggaggagtcagtccatccactgatggattggatggggtgtgtagtgaggacatgagaggagtcaagaataaattgactcctgggatggctctctttccccttttcacctccagattcccctttctaaccaatttaaaagctcctccttgggtgggtgcagtggatcatgcctgtaatcccaggactttgggaggccaaggtcggaggagtgattgagcccagtagttcaagaccagtctgggcaacacagtgagaccctatctctacaaacattttaaaaaattagccgggggtggtggcttgggcctgtagtagcttgggcctgtagtagcccagtagctggaactccacctactgggagggctgaggcaggagaattgttgatcacagggggtcgaggctgcagtgagtcatgatcgcaccactgcactccagcctggatgtcaaagtgagatcctatctcaataactggtaaataaataaataaataaattcctcctccatgttccccttgtcccctgtgctgttgcagatataataacatcttccatgctcttgggataagttattgtttttcttcccaagtaggctactataagctgcaaaaaggcctttcatcttctagcaaagtgcctgacacactgacagcacttagtcattttgtgtgttgactaaatgagtgaataaataaataaatgccacagtggaccacctggatagtttttagagtctaggttccaccaattggatcatgaagacatgctaatcagatggtgaagcctaggagctgtcttcctcaaagtttttgggaggtgaaggtgaaggtcacagagaggaaaggacaacagcaaccagtgaagatggagaaagggatatgaaaaggggagtggtatttggatgggctgtattggaagggaatttacagggaaagtagtaggcgaccatccttcagctgaaatttagactttccacttaaagaaagaactcatgcaatgaaaaacaacttgtgttgtacctcctttacagtatttacaacaataattttgatagccaacaacattgagtaatttctgcatgtctttacctattctttgtaaatccatgatcactattattagatgtaattagtttggggctaatttcaggagaatttttttatatcagaggtgaaagttacaaatatacgatccacataaaacagattttctggatttatagtggaaaacacagtagtaacttgttgagtcaagacaagtactttcatcttaaggtttttttctgtttattcccagtcactgatgaggtcaacgactaacataaatgaacaccttgtctattgttatgggctttattttaacccaagaagaactatttcctttaacaatacacattatattatcttacaaactgtcctaatcgttgattatctaccattggcctagttattttgatgttccccttatagtaggaaaaggagtcatgcacagtcgtgaataagtgaatgaactagatagtgatatttgtcacttgaaagagtgataaattcccatattctcaatttgacatttatttggccaaggtctgtgtgtgtgtgtttgctcaaattgtgcagatggaatttacatcatctttactctaaggaatctgctgacagagaatgaggggtaattggttattcattatttagtgatttctccctcactgtactcatttggaccacaaaccatctggtaacagccaatgttttgttaggattcatttttattacttgaattgtcagcatttcagacaaattcctgtaggtagcagatttcttttaaacatgcatactctgtaaacattatactctgaactactgaatttctttcttaaaatatttagatttagtgaatttcgtttttgtgacccagtgcattaagaccgaagatttaatacacaaaagatttgaccacacagctttttgttaatcttgttaagtttgtattcacatcaatatattatttatatccaaccaaagcttttaattttcttatatatataaacatctagaacagtaaacaacccttgggaaattgctttttaaagttatttttttccaacataccttttctttacagcacagctgtttagcaatgctctatgtttcagaaacctccctattggatagattgggttgaatctcatgtctgtccctatatacttcaaattgtgaagagaaatataatttgtaagaaatattgaagaattggaagacatatattttaaactaattttaaaagacatgataaagagtttcaaaattcataccagaattaaagttgatgataaagctgtttatttttgcatttgaaaatagtactttatttgtggcaaagttagtcatctaaataattcttcaggaaggaagatgagattttctggaacatatgatgaatataaatttggagatttttagagcacaaaattctcaccctttctcttctcagaacaatatctttgtgttatcatcatctccctaattaggtccaaattaaaggaatgtgaaataggtagaaggtactttcagagagtcctctgtgaaccttacggatttattaaaaagatcatgaaattactaaaatatttcagttcagatagtaattaaatacttatagaaataggatgcatctagactttgaaaaggaactgaaaagaacacttcttttacttcatttaggggcagaggaagcacaccagagctaaaagattccttgattaggtgtcaggagacatgtgttctgactcaggtctctcaccagccatctgggagcttatccttcctctcagtggaggatcctttgtaaggaattcgaccagttttactttaaggttgagctaagttagagaatttactttgtaagccaaggaggccattaaaagtggaattattcccttgcaattttattccaaaatgataatagtcttagcaatatttcaaaggataatttagtatagctaatagcacacttcactttgtttttatttaatttcattaagtgccttaagtctgctttggataagctacatgtagattaataaaataataaacaaatgcataacagcaatggttattatacatttgaaataaattagtgatttatattgtaagtacattaaatatgatactatattaattattttggatttatttgcatcacatgaaatgttttataggccaatctctttttaggttaaaattttaatctttagcaagacagtatttttttcttaaaggatatatctccatagtatcttcttgcaattttcaaaatgcttttctccaactgtgtttacattgagaatccacagtgtttacattgagagtgatatcatttccaatgcatgcccatgttgagatgtgtgtttccaatatgtttgaccactagcagagtgttagatatacatcattttgttggttaaaaaatcattatttcatttcacctagaggctactattaacttgttgaccatattttcatgaagtaagcattgtttgtgcattatcaacaacttccattattactaacatattgtctagcctaattaatagaggctggaagatagagaggagagtgggagagaaagggatggattcctctaagagtgaaaaaacatttattttgcaggtaatggtgttaaactgtagtcaatatattctttatcattaaaagtttaaaagtttaaacagaaggacattctgcagataaatattttaggacggttaggtgaacagaaaccaacctttccccattatataattgaaggtaatgtctcactgcaaagtgatggtagctggatttgttataattatgaaagcctttggttccaacacaggaccaaagtgcatccttcaaatgttaggctttccctggttccagtcctatgaagcacttttttattttcacttcatctttgaattttgttttcatttcctctaaggtaatgtggcagttattgtaacaaacattttttgtctttcgacctgtagacataattttcatctttcagctgctcttcctaatgttggtccagtcctttaaacctgccctacggattctagtctgcccttctttgcccttaattgcttgacctcttatgcttgccttttttttttttatcacttattttgttcatgttaaacactaagttaaaaaattttaaaatgaatgatgccacatttctatataaagaaatgagcattattaatccctgttgttgtaaaacatcattgaaattgtatgctattctctttatataaagtcattctaattatgtcacatgttgaagatgtaaccaaactattataaaggctgcttatccattcacatattgaatagattaagtttgggttttttaagattgttaatttgttattttctctttcctctagtcaaagtgggaaaaagcccaccggtgaggggctccctctctggaaaagtcagcctaccttgtcatttttcaacgatgcctactttgccacccagttacaacaccagtgaatttctccgcatcaaatggtctaagattgaagtggacaaaaatggaaaagatttgaaagagactactgtccttgtggcccaaaatggaaatatcaagattggtcaggactacaaagggagagtgtctgtgcccacacatcccgaggctgtgggcgatgcctccctcactgtggtcaagctgctggcaagtgatgcgggtctttaccgctgtgacgtcatgtacgggattgaagacacacaagacacggtgtcactgactgtggatggtaaggcttttattatctgcaagaaggtagtataacatgacacctggttcagaagcattgagaaatagcactcagaagtaactgttgtttggggtttggatgagcggaaaaacacctgtcaatccagtagtccacgtctttcaccaaaaatgaactggtactcattcaaaagtcaaggcaggtgcatttttggcagccacttcattgattccatgaaggaaagtattgtatactgaaaataacgaatacctcaaggcatgacacataatttaataatcattacttcagtgttgagtcttatcagtgattctttttcaagactctgaaggcgaatctacattttaaaaattattacatatgtgtgtatgcacatgtacatacatatacacacatatatacacatatacacatgaaaaacctttcccccttttttctctcttaatatgattattaaaatatttgagtttgcttttaggaaattctatcttaacttataccgaagaaataaggtatttaataaaaaccatggtacatatcagagtcttaaaaaggccaagacttaataaatatttgaattcgatcaaacagaaatttagtatattttttaagattaatatcctagttgttatccgttaagtattgcagtgagacattttagtttcaccctcttttcaggggtggtttatatgtcatttgaatttaagttaggagacaaagcaaagaaaaattgctttaattgggtacacacataatgccatagcccttggaagcgtaatattttggcaagttattaagcaaaattctaatacccagacatgatggaacagattttcttccaatcctccatttccctataaaatatttacctttcagaaatatatacaaagggttttattaaaagtctttcttgtgtagccaaaaggaaatactttgaatttcagatgcaacacattaactttctgatacccttttatattcaaattccattgcttccttctataaatctatttttatgttgtctaggcatccactaagtatcctgggttcttctaacctttttatcattatttttgttagcctcactactgtgatttctctctctctctctctcttctgtttacgtatcactttttaaaatccccaaaggagtttaacaacttcttaccatttttcatcattaaagaattagcaatggatttgccccttgcccctctgaaacaatgaaaatcctccacttaatctccttagctccatggggtcttcaaattattccagcaactgcagatacttatacagattgaagttccctgccttggtcgaggaggcctctttgtgcccctttactgccaatcttcagtgcacatggaagatttttaattaccaagaagactatttgaagctttgatcaacattaaactaatctaaatctattcaaattcttgcttaagccttagagatcattttaagctatctcttatattcaccagatagcaccatatatattttctggcaattttagagaggttctataaaggtacaaattggcgtttgatttttttttttggcaaaatctcctatttgagtcataaaatatcagaaatgagaaaatgaatgccagttgtcattgcatctacttagtgcccgtgcaggtctttttgcgttggcactgatctgaggcacttatctatgagatgggtagtcttttcccctgtagtcatattactacagtaatataactctggaagacagagatgatctaaggatgaacacatgggagacagtcttataactagaagtcaggctgcagaagataaactgttgtccatcccaggaaattactagggataagaagagtggcacgtatcttggaaaccacagtttatcccaaataacaacaacaacaaagtgttcttaaatgggatgactcttaataaaatctcattcataagacccagttgcctcaatttctatttttcagtgacttctctggcatattagttcaatccactttgatgtcttgcagaaatgagtcatcatatttaccccagctaaaaatggagagactcttgttgacatggcaagagaggatccagagctccacccccttgcttgctctatccttatccctttgaaaatttcttgagccctggagcacagttcaaaaccactagtttataccacccctaaaatacaacaaagtggaatttgaggcaagtatcaggagcttctactaggaagaatttgagaatttatttcaggctttctttggataaaaattatacatgttatctgtcatagcagagaccctacgttatgctggtcaggtaaagaatatgataaacatttgaatggtacatggtggtctactcaacattttaaaatcctttacctaatttgaccttcacaccaatcaagtaacatacatatttttagttccaccttatgggacaggaaattaaagctcagagaaactgacttgtataaaagtaaggagtaaattagggattggaacaagtcttctcactcataaatagtccagtgtcttttccactctagtacattgtctctgaaggtaaatatctcattgttttacatttggaagaagtggtgttagtgaatatttttatgagacaggtgagtgtttcatgcataaatattgggttgaccccggataaagtcctgaagtagaagttgatcttgtggtccccttaggtctttgtatcttctgcagaatctactccctttaggtatctggtgttcccatgattgcgtgaatactgcctgcaatcaggacaactattgggattcagtgacttaaatctcttccttgatctaggagatcccctaggaaattttctggtggagcagaatgggatgtctagatgaatggcatttttggagcccctcaaatcaacatgattttgcataatgctgcatgaagtaaaagtaaataattattatgatattattactatgtatccaactaagttgatacattgctccaatgagaaattttgcacagtgcagtgggagatttgaacaggctggcaattgtttgctgttgtttttgcaggggttgtgtttcactacagggcggcaaccagcaggtacacactgaattttgaggctgctcagaaggcttgtttggacgttggggcagtcatagcaactccagagcagctctttgctgcctatgaagatggatttgagcagtgtgacgcaggctggctggctgatcagactgtcaggtaagaggtctgggggccacaggcttcattattaacttgagagtgagaagaaagtgccactaactagccatttatttccccagatatcccatccgggctcccagagtaggctgttatggagataagatgggaaaggcaggagtcaggacttatggattccgttctccccaggaaacttacgatgtgtattgttatgtggatcatctggatggtaagatgtttgagtttctatatcttcgtatgaactgagaaaactgagggaagaccagaagttcattggaatagagcaagtcttcgtgcttgtttggattccaaacggtggcattttgtttatacgactgtatgattttgtggtaaaataagccgaaattaaagtggaaaggcaaggaggagtgtgtaaatggttatgcaggttagaaatgtcttcagttaatggcaggttttcttacagtcatgctgctcttggactgtttccaatacacttttagatcattgagaatagaaagctgtaagggtggtacctattctggtgagagcataagataaaaatcatgtgatgacaatccactgtgaatccaagtactgataaacaccccagagctaactaaataactccataaactagcccagcaggaattttcaagtttgacttcctgtttattttgttacactaatattcagagcaatccttccttcattcaaccagtcaatacgttaaaccagttaacacattaaaaatcacctactgtgatttttgtaggtactctgctggttgttagagatatgaaatcagttaagatatagcccttcctttcaagtcgcttacagtctgatttcagcactgtcatttctcctttgcctgagttagagattcttaaagacaaatttgagttcaatagtaccgacattatctaaagagcatggtgcagctttattataaaggcacagggaggtgggcacagtggctcacgcctgtagtcccagcactttgggagagctaggtgggaagatagcttcagttcaggagtttgagaccagcctgggtaacgtggtgaaaccatgtctctacataatgccaaaacttagctaggtgttgtggcatatgcctgtagtcacagttacttaggaagtgagagaagtgtgggggtggggggtcctgaggtgggaggattacatgagccagggtgtggaggctgtagcgagctgaggagattgcgccacagcactccagcctaggtgacagagtgagatcttgtctcaacaaatacataaatataagtaaaataaaggcacatggaatagaagtttctacaacttttgaaatggattttcatttgtattaacagctattattagaatcctaaagtatagataatagtgttaaattaaattatacttttaattttgagtaggtgcatataaaaagaatgatctgaattttcttatgtttaaaatgaggaggctggactagataatttctatggtctctttcaacattaaaattctgtgattccctgattctgtgaattgaataagcaatcttagagcccgaaagctagaatataagcagcttatattttcctaatgccttgactaaatttgcatcggaaggcctgctttcaaaaagggtgcttaggtgtggttctctagtatcttagcattcttattttcactatcactgaagattgccagatgtattttctaaaccaaaagtgcagatgtgagcaaattttatttttgtatataggaaaagggaaaacataacatccaagctatggttgaaatacataaaactagagcttttctcttgcctttattttaattgatttaaaaaatagaagaggagatggttggtaggagaatctgattaaataaactaggaaataaattggattattgctattttggtaaggtgggaatttgtatcactattgttttaatttagtgtaatatctacaagggtgatagttataaacaatatctgaaatgctagtaatactagaaatgatccagaggtagcttttgcaaaagtatatgtaagatctaattaacctaaaagatctttaccaaatattatttaaatggtgggctttcgtgattcaaatatgaataagcatcccaagccagattccttggtggaaagacaggcttatgtacccatgaagccaccagccagagagccctagagaccccccgtgtgtttgtttttgagtttactctgatagagctactatcagctcttagctctctaaggctctagactgcccaaattcaaaattattttttcaagcccagggagggattttatagaagtcccagaaatttcagggcctctgcaagtactgtttgaagaatttttgacaagtcttagtggtgggagtccttccagggatttcctagccacactgtcttcattgaacgatggctccccacagtctgctcatagtatcataaccagtgttcaggaactggactctgtcagaagaggagctctgaggatgtatgcatatctcccatgacgagggatttactagtcttatagacgtcctctcccacttccataaacacaatcacttctaaagaagccagtttgtgtcccaatgtaacccaactgtattttataaagttattttggataaatctacatacttggtgactgaaaacttgtaatgtggaatatagcataactttacttaggctctttataccaaatcaacagaattttcatctttttgttttaatatgtaaaaattggaagagaaatataaaagagtcagttcaaatattaattcaagcactggctgaaatcagtgtcagcaaagtaacaaggcatttatttgtttcatagaagaaacttgacaattctggaggatattcagcatgtttacaataacactgttcctgacatttttttcctccttgtttattggctcttggactaagtatcaaatctttggacactgttcttttctttcttggcttgaaagtgagcaggaatgggggtgaaaggtaacttttatggctgatgaggtaagaggaagatcacaaaatcattcttgtaaggcttctctcatttcttaactgaagtatatgtcttcccttttgaagtacagaccatggctaatgagtgaattaataaaaaattcttgtggaaagttgactacataaaattacgtctggtatttcaattgtcacgttgataaaagattatttgaaggtgagtcaagattccttgtaagaggcattgctaaattcatgagtcaaataattcccacctatattttattatatttgggggagtcaagtgtgtgtgtatgagaaatggtggggacagtaaaagatttggtatattcagaatgcatgtgatggaacacacacataggagttatgaaccaaggtgcaattaatttagatcagaagccatatattccagatggtctgatgaaaaagccaattaagtataaaatgaaaacttgctcaaaaaggcaattaattttccgttttaatttaattatttattgtgaaagatatatagttgacagtatgttgacctgtttttttctcctttcttgttttataatgtcatatcttcctgacatatgtgtttctctataaaatttgaataattgcactaaattaaatcctgctagttttgggagaaaaatctagtagggttctttttctaaggtggtgattataacagttatgcatattcaatgaatattcaattctgcttttcaaaataacctattaagttttaaagagtaattacattagctatattcactagtaaacatttcaatatcagctcgtgttcttagaaatggtctggaaattatgatggcttattagagatgattcaatcagtaatagaatgctattattaagaaattaatggaattaaaattttaaaatgggaatctagaaattaagatccacaaaataatccttattaggaattttaatctttgtttcccagtaagacagatttggaaaacattgggagggttttaaggtagagttgagatgattaaatggctcaagaaattaggtaaaggatcggaattatttaagaacgaaattaatagactgactatttatttggtttcctgatggtagcagatactttaaaaaataagtttcttttttaggcatttaatttatcctgcagataaattggaggattgcagatgaggtcctattaccttctttcattgttgacccacttagtttccttgcaaatgagtcaatacttccagtcttgtccccagacctgacaaatggttggttcaggagcttctctcccctgtgacataggcctatcctcttatggcctgcattttctatgtagccctgccttttggtatttacttcacctgggttaactactaccctactattccaattctctgtttttttacacaagcttccagcactttgacaggcctatactgtgggcactctctttcatctcatattccctcctgaagacctaggtgattcttctcatctttaccatctctgaaccttgaatgtatgactataattaccctcttgcaaatatttgcttatacttctttctctcctactaaactatggattgggggaaagaaggaaacatacaaattcatttttgtatgcccaatatgtccttagcatatagtaggtgctccataggtagagctgaataaatgagtgaattaatgaattaacttctaaaccattaatgcctccctactcaccttgatttacaattgctttctggatagtttcacacttctccaggatccatcagtatactatctgcttcctgatttttttattgctttaattttcttattagtttgtttaatttcatttttgttctcttgtacataacttgtaagccaaaagtcttgtgggacatatggggcatgaaagaataccaaaagaacaaatacgtgaacaatgaagatgttaatttctagttttgcatgtttagctcctgaattcttttctgaatttcatacccatatttctagtttgtgaatcacttttgagtttcatttttggttttggttgtcacaaatagtccccatcactttaagagtccttcaggggatctgttttactaccatcaaaacagttaaacaccattgccatgtaattctcctacttaacgttgtgtgttggttttgttggcttcttccacaagcacatactctgcctggtcttcaaaacctatacctgctctactgcaatctattcacccttcattcccacactcttcaatgtgaccccacacacgtgcatctcgccctgcacagaccctttgcttgctcctgcttgcaagtctgctctgttcctctcagggaacacacacccttcatctcttcaacattgtgattttgcctgtgcttgaagacttactgcttccaggatcccccttttggctattgcagctcacactgaaatttcttgactctgaacttctactttacttagagttagttccatgtgatttattgcttaattgttttctggtttctttgtgttcataaaatataaaatgttatatgtttgttttatttcagcaaaattattgtaagctcctagtagagataagaccataaacttctatatgtttcccaactgcaatcaagagcctgttccaattgcagacacgtaatagttatccaataaatagttggtggtaattatagtatttttccaacctttgtctcttctggaaactgccttccaccaccacctttccatttatctataacacttgaaaaaatgctttgctttatttaccaaattcaaaaagatctactttttaccattatttaatcaccatgatactattttttcctctttgtatttctcctctcactcttttctcctctcactcttttctttgatgtctcttagaaattactccttcccagagatactcctttctggcctctcatggtaaattattttccttgccttccactccttcccagcaaattgtcctctctgggattgcttttcttgtattaatacctattcatcaattataggttattatttttactgtttcttggtgtcagagtccaggatggctttgtcacctctgtgacttatctaatgcctccatatcattcttgtgcctcacctagaaccaaaaacaacttttccatttttgttactttatgagctcctttagatatgaaaatctaaacatttagataaacatcatcaagtaggtcttagagcagggttagttctagctttttaaaggttttggttggaccaaaatcagatatcgcatctggagattgtgtaatttctttcctatagattctcagattgcctattaattttaatgagatttacagtatgtaatctacagaatacttcactgatgaaggttatttaagaattagtgatttgcgtccttactgggcttattcagttaaaaagccacatatcagcttgaagagcctcttgcacactatgattccgccgatggttaaagtagtgattcttgatttcagaatctcttcacatttgttgcagttggccctagaagatgctaaaaactttttaattatccgtagcttcctatatagactttggagattaacacaccttgcttggagttgcttctgtgtacagtgtttgaacagtctacctaagagccaatgaggaaagcaatcaggcacagcatggtgggagcacctctggaagatgatgtccttatacagtgtagtgactccagtaagattgagtgtgaggtagtttcatgagtagaatgaggaaggaaaacatctactgtgtggtgggagtattatttaacttaaatcttatgaaacctttgtcaggcactttttaaaagaaacctcacttttgcctataagaaaactgaggcacagacaggttaagtgattagatatgccttttttcttcttctactgccataaactcacagggccactaaagattccccagtagagcagcaggcagtcttgcaagccaagaagataaaaagtaccctcaaagctccctcaaatctctgatatctcattagaaaaaatcataattcttatttgagcaatgattgcattacagattggattacaatgattgggattgctgggtcaaatggtaactactttgaactttttgaggaaatgctaggctgtttttcaatgtggctgtaccattttacattctcatcagcagtgtattagggtcctgattcctccacagtcttgtcaacacttgctattatctgaccttttgtgtagccatcttaatgagtgtaaagtagtatctctgtggttttgaattgcatttctctgatggctaatgagctccaacatctttttatgtgcttgctagttatttatcaatcttcttggtagaactgtctactctgaaactttgcccacttataattgtgttgtctttactattaaattttgagtgctctttgtatattctagatttgcatgtcttctcatgtaaatgatttacaaatagtttctcccattcagtgagttgtctttttactttcttgataaggccctttgaagcacaaaagtgtttaatttagatgaaaagtccaatttgtctatttttaaaatttttgtgcttttggtgtcatatctaagaaaacattgccaaatccccagtcatgaagatttatctctgtgttttagtctaagagatttataagttttaactcttttgcttttattttgatccatttggagttagcttttgtatatggtgtgaggttggagtccaaattcattcttttggatgtggtcccagcaccatttgttgaaaagataattatttctccatttaatgaccttggcaccctgttgaaaatcaattgaccataggtagatgcatttatttctagactctcaattatattccattgatctgtatgtctatctttatgccagtaccacaatgtctttattacaattgctttgtagtaaattttgaaaatggaaagtgtgaggcttccaactgtgttcttctttttcaaaattgttttagtattctgggtttcttgagttcccacatgaattttaaaattggcttgtcaatttctgcaaagaagccagctaggattctgatatagattgcaatgaatctctagatcaacttggggtatattgccctcttagaaatattatgtcttctgatctgtgaacctgagatgtctttctgctattttttagatattctttcattttattcaacaatattttgttcttttcagagtataagttttgcagttcttttgttaaatttacttgtaaatattttactatttttgatgcaaatgcaaatgtaattttcttaatttttttgattgtttattacaagtgtacagaaatgcaattgatttttatatataggtcttgtatcttgcaaccttgctgaacttgcctcttcgttctaattgttttttagtggattccttaggattttctttatacactctctttcattttataatcttactttacataagtagaactgtcttgacataaactccttgaagcatgtgacagtcatttgctttaaggttttcatgtcagggtctcctggagttctgaatcaaaagagcttctttggaaatacagtcaccatttacctcccagctgtgaaaagccaaaaaaacccaaactaggctgatactcctgtgttgacctgaggtcattctgtgcctgtcaaaccaaataacacattcaatcttttgtatattttgaagactcagaaacccagaaatttttagaacctctttctcactctaattaaaacctactgctctgtcaatgggaaagaatgagtccaaacattctgaaaaccgtacaaatgtgtttacattttagtgggggcttcctgcatctttaacctctttaaattgacataggtaagatcttgtgtaataacacatttgcaaatatgcagatgcattttcaaatgaatataatctgatttagagaatattaactgactatcatagtagactatggataatactctaataattaattacaggttaacatttttaaaactcaaagcatatgctttaagtttatgctttaagccacgttatgttctacttcagcctaatacaagggagaaatttggagggggccctcctagctttctagtctcattattcccaaattagaaacattaccagcctaacactaactctggggtctaaaatgaagttattttggcagccctagagttttcttgtcattgataactgaagattggcctttgtgcaggttaaataatcaaatcttagaggaaattgacatgcttttaaattatctacaaatattagcccttaaaagattatatagcagtatatattatgttaaccaatccatgtgcagctgatggactttgtgattcagtggataataagcattagtttttcctgctttgatcttatgtatatccatacagaaaaacaaaaaaacgatggagagagagatagagagagagagagaaaagaaaaagaaagtgttgaaaaagcttaaaagtccaacatttcaaagctaatcattttgttgaattgttgctatcaccttgatacttgatatattctgttagtgattttatcgtatgggtatttagaagctcatttcatgtaactacttccagcttactcatcccatttacttttgcatacatttattacttatacaccattttgacccagatagcaaggtaatgtgaaaacatttacaaatgttgaacttttgtagtaaaataacaacaacaacaagaacaaaaaaccaaaagagcagggagtgctgctcccaaatggacaaaggaaattatgaattagtttataagaactgattttcagaccaaacagtgcagtatagtagagctataagcactaatgaacagaagaaacataatcatgtatcacatcacccagcaaatatactctgctacaaaactggtaagatctcagctttgactgccacagagagcagcccatctgctgcagtcaggaaagaattgtgtaattatctgtgattaagtcctcctttcaccttggtgattgcaagaattgtcagtgggggagaaatatcctatcctagttttactctagactcaggctctttaatcatattgttgagtgactcctgagtataaactctagcttttgaacactttgggtcatttttaatgttttgatttgttttcatcattgcttgccatttcagtatgtgtcatgtttgagtctgccaagaagcagcttttccacttagcaaacagaattgtgaaaaaaatatacatggtccactttctagggagtcttgtagcagctagtgatcaaattagagtattttttcccttaatttctgatgttaattcccacaataaatttagtttgtggaatgtcattaaagtcttacaacatgtctcccgtttcttctagagcatccctggaaagttgaagtaacaggaatatgtcaaagctataagtatttaatttgaaattttggaaaactatggcttaagatactgcatatgttttccatatgaatatgcaaattatcctattcatgaaaggctctgttgtatatcatattttacatgtacactaatctgaatgtatatgtatataccttgatgaattttttttttttttttttgagacggagtctctctgttgcccaggctggagttcagtggcatgatctcagctcactgcaacctctgcctcctgggttcaagcgatcctcctgcctcagatccccagtagctgggattacaggcatgcaccaccatgcctggctaatttttgtatttttagtaaacatggggtttcaccatgttggccagtctggtctcaaactcctgacctcagatgatccacctgccttgtcctcccaaagttctaggattacaggcatgagccactgcgcccagcctgatgaattcttattataacaatttaacttactgtaaacctgacatcttaagtaatgcatcactttgtttatataaaatatatttggtatatttcctgatgtattagtccattttcatgctgctgataaagacatacccaagactgggaagaaaaagaggtttaattggacttacagttccacgtggctggggaggcctcagaatcgtggcgggaggtgaaggggactacttagatggtggcagcaagaaaaaatgaggaagaagcaaaagcagaaacccctgataaacccattagatctcatgagacttattaactattatgagaatagcatggggaagaccaacccccatgattccattacctccccctgggtccctcccacaacacatgggaattctgcgagatacagttcaagttgagatttgggtggggacacagccaaaccatattgttctgcccctggcccctccaaatctcatgtcctcacatttcaaaaccaatcatgccttcccaacagttccccaaagtcttaactcatttcagcattaacccaaaagtccacagtccaaagtctcatttgagacaaggcaagtcccttccgcctaggagcctgtaaaaatcaaaagcaaactagttacttcctagatacaatggggatacaggtattgggtaaatacacccattccaaatgggagaatttggccaaaaacaaaggggttacagggcccatgcaagtccaaaatccagtggagcagccacattttaaagctccaaaatgatctcctttgactgcaggtctcacacccaggtcacgctgatgcaagaggtaggttcttatggtctcgggcagctcagcccctgtggctttgcagggtacagcctccctcctgcctgctttcatgggctagtattgagtgtctgcagctttcccgggcacacagtgcaagctgtcagtggatctaccattctgggttctggaagatggtggccctcttttcacagctccagtagggagtgcccctgtagggactctgtctgggggctccaaccccacatttcccttctgcactgccctagcagaggttctccatgagggccccacccctacagcaaacttctgcctgggcagctaggcatttccatacatcttatgaaatctaggcagaggttccccaacctcagttcttgacttctgtgcacccacaggctcaacaccacatggaagctgccaaggtttggggcttccaccctctgaagccacagcccaagctgtacactggccccactcagccacggtttgagtggctggggcacagggtaccaattccccaagctgcatacagcacggggaccctgggcctggcccatgaaaccactttttcctcctgggcctccaggcctatgatgggagtggctgctgtgaaggtctctgacatggcctgaagacattttatccacggtcttggggattaacgttaggctccttgctacttatgcaaatttctgcagccggcttgaattcccccgcagaaaatgggttttccttttctactgcatagtcaggctgcaatttttcaaaacttttttgctctgcttcccttataaaactgaatgcctttaacagaacccaagtcacctcttgaatgctttggtgcttagaaatttcttccaccacatactgtaaatcatctttctcaagttcaaagttccacaaatctctagggcaggggcaaaatgccaccagtctctttgctaaaacataacaagagtcacctttcttccagtccccaagtccttcatctccatctgagaccaacccagcctggaccttattgtcaatatcatcagcattttgggcaaagccattcaacaagcctctaggaagttccaaactttcccacattttcctctcttcttctgagccctccaaactcttctaacccctgcctgttacccagttccaacattgcttccacattttcgggtatcttttcagcaacaccccactgtactggtaccaatttactgtattagtttattttcacactgctgataaaggcatacccgagactgagaagaaaaagaggtttaattggacttatatttccacatggttggggaggcctcagaatcttggcgagaggtgaaaggcacttcttacatggcagcggcaagagaaaatgaggaagaagcaaaagcagaaagcccctgataaacccatgagatcttttgagacttattaactatcatgagaatagcacggggaagactggcccccattattcaagtaccttcccgtgggtcccttccacaacacatgggaattttgggagatacaattcaagctgagatttgggtggggacacagccaaatcatatcacttgacattttatttactgttttcaattagagaaaaataaaacattttctcatggataggtaacatttagaaacatgttccaaatctgtgctctaattacaactttgataattgtcctatcaatttagctgctttgatgaggctactcctggaacttattaacaggcttcttgtcaaactacaaaaaagatgcttgttttccaggaaagcaactatccgttaaatctaagaatacattaaattgttcaggtacaagtatccaggagcagagatagaacacaactttgttctatgctactaaaatagtcattttctctcactgaaggctgtgcattccctgtctaactctaaaggttgtactgtgattaaaaactcagaaagaacttttattattcacatcagagataaaaaggtggctttatgataccctctgggtaggagcttacacagttgggccaattaaatcatgttgagagagagcaactaagcaaacgtgcctatttgatttgcttgatttcccatgtttgctgtgatcagtggctttctcttttgtctgttccttggattcctgatttggctttgcctctaggcattagatgttatctttggaggcatccttctatgagcattcatttttggaccaagcctggatttacaattctattactggcccagacttcatttctatccaatttcattccactgtgctatagtttacaacatataatttgacttataaataattcctgactatgggtttaaagactgaaaatggatcaatagaaactttgaaaatgttaacatcttgattgcttttctcagtgtagaaatggacaatgtttagcttaaaaactgcatgtttttaatgagatacggggttgaaagacttattcctggaatttattgttctggagaaagcctgttgctatctgccataccttggtttactttgtgcaaaatgagcttctttttaagtaatgagctctttccatgttcagcttaaattgctgtcttagacacttcatcagggttccctgctctgcctcattcccctttttgctcacttgcagcctttgacataatcctgggaggcaattggcatcatacatattttgctttgtaatctcctgctttgattctgactgggtacccagtctgctcactttgcttctatcttaaacaggttgacacataccagaaacttagtactaagttatgtgtgttgtaagttaattgagagtcctcttcttgattaaaatataggtctttagaacagtgttttccaaaatattccacaaaacaaatttatgtacagatgtccctgccttaataatagagggttgatacatggaaaggacagaagtttggacatttaacttatcacgtttggtatagattgggtgttagttataagagattaaagacatactcaattctatagtgtaaatgcttcactatatcattaggtttttgaggtgagcaaggaaatgttcacactaaacaattatgatttaggaaggcttaaatagttattttttagaacagaatttaagtcacttttttccttttctcattattctgaaataaagtaattattgctgaataaaataactgactgcacgttatcttaacagattaattcttttaatcctcaccttaaagtaaactcaattgattctggttaaatcttcctttttttcatctgaattacaagaaacccaatggtaatgtttcttgcaatatgttttataaaaattttatttggaaagtttgaaaaatttctacacataattgaaaaggataagttgggcacagtggtgcctgcgtgtagtcccagctactcaggaagctgaggcaaggaggattgctggaggcaaggaagttgaggacagagtgtgctatgatcatgcctgtgaatagccactgcactcctgcctggacaatttagcaagactctatcttttttgaaaagaaagaaagaaagaaagagaaagaaagaaaagaaagaaagaaagaaagagaaagaaagaaggaaggaaggaaggaaagaaagaaagaaagaaatggcattagggataacagaatttaatcaaagtagtaaaatgatcattctatgggtatcaaacaaataaatgaatatcgtatacttcaaacaagtgagttaaataattgatagtctgatataaagtcagatttaacaagagtttctacatgaaaagttctataagtaggtctgaactgattaactactactaagagaattctctttgtaacaggccagcacctactgaagcctttctttcttttaatactgcaaacatgtttgctgtttaaaatagggaaaccagctacccatgaaatcatgctgccattttttcctcattagccctttggtctggtcttccttggagaagttgatgttcctcaatagatagactaacagtgcagttggagaagcagagttttactcaattaattatatttctttgcccttccgtggttggctgataacacttgttacttaagaggaatggtagtttcgccttaaggtaggagtatctcaggaaatgcaggaaactaaggcaacacaactaatattccagctgtaataacaagtccaagggttctacctctcagggaaaactgttggcacgctgccttctttacacttgcagccctttcaggcctcaggcaagtgttattctgaggtgaaggaggctgttcaggatgacgtaatttctctgtctgcctttctccatgttgctttgagccaagtctattgtgagataaaatgcctgtttcaggcagcagccatctctccaaagctttgtagcagagttagctttatttaatgtgctgttgggaaggatagggggaaaaaagagacctagcttcttaataagaacttgaagtgccattcatttaacaaatcttattgaatacatactatgtaactggccctgtgacccttatgcttttaaaatttattaggaagggagacgttgtgagagccgggaggggaactttttcttagagtgtattgttgtatttgagattactgtcttttgccagactagataattaagaataaaaagctatgtacacctctaccacttctttcagtcaggtgaaagtaatttctctctcccttcttcaaatagctctcattgaaatttggcctactttcctcaatagcaattttagatatatagtgagaaaagccgatatgtgtgctttggccattttccccatgactaatttttcttgttttatagtgctatcacccactcagagaaagtaatagcactattcattttaaacaattgcttgatacatctggatttagtcaggtgaagatccaaatcatgacagctctttggatcccagttgtctaatatatcatagaatcagagatcagcttcagtgagatggaaacagtactctcagctacaatagtgggctatcaacattttaactttctgtttcagttttcatttctcctcctgactgtgatattggcttaggtattctataattctgcttctgtctttggttacttttgctcacatgtgaaaaacataatttaatttgtgtggaatttatttcagcaaactgttatgttagttagctaagtaaaattccaacttaacaaactctgaagtttccagaatctttcattgtaacatgttaaatgataatgaatataccctctgctaattagacttggtaataaacaaagcaactgtccagccttttcttgttaatcaatcagcaaattaaaaaacctctttaaccaatctcaccactttgggaggccgaggcgggtggatcacgaggtcaggagtttgaggccagcctggccaacatggcaaaaccccgtctccactaaaaatacaaaaattagctgggcgtggtggcaggtgcctgtaatcccagctacttgggaggctgaggcaggagaatcgcttgaacccgggaggtgtaggttgcagtgagcccagatcgtgccactgcactgcagcctgggctactgagcctccatctggggcccgagtgagtggggtgttgggggagtctttctctcttttttttttcgagacggagtctcgctgtgtcgcccaggctggagtgtggtggtgcaatctcagctcactgcaacctctgcctcccgggttcaagcgattctcctaaaaaaaaaagaagtctcttgaacctagttaaagcccctactagcacttggggtgtctttgtaagaattagcaaaaagtgctccctctgcacagagcaagtaaaacaaaggctttatccaaagaggctggagttcctttggctggctgagtgggaggcgacctaggccttccctacacactgggcctggtgctcctgtgcaggccgcgaccttcgtaaccatcatggcagccctgtgcctgatacgggaaggcaggaagtagaattctgtaccacttctgagcccttcccatcttcacatttctggaggttttcttatttttttttttttttatttaatggcgttaatccactttgtcggtagttataaatgagaaggaaggccagagaattactatttgattttaggataaacaaagtggaataaccgtggtggcagttcaatgcaaggtttcccttccaatatgcaatgttaggaagcacatagcagactttttccttaaaaaaacaaaaacctggatagtaatctaaagaatcactcagaaggatttgttcattttaaagaatgtattataaaatgttattaaatgactgattctatggccaatgtacacacacacatacacgtatagaataaaacttctcgggtatgtgttatttatgattatgtattcataattataacgaagctaagtcaccattatcttttctgctttaaagtatcagaagctgctaccttgccatgaaaaagtattacatgctcctccaattccttccccaccatatttatccaacaggaaaggaatgaataataaaactttgggctttttttcccttcttttttttccaggtgatgtgttccacctcactgtccccagtaaattcaccttcgaggaggctgcaaaagagtgtgaaaaccaggatgccaggctggcaacagtgggggaactccaggcggcatggaggaacggctttgaccagtgcgattacgggtggctgtcggatgccagcgtgcgccaccctgtgactgtggccagggcccagtgtggaggtggtctacttggggtgagaaccctgtatcgttttgagaaccagacaggcttccctccccctgatagcagatttgatgcctactgctttaaacgtaagtgtttgatacctttttaaaaattacagttttaaaaaaaatgcttcgaagcatgcattgatgttcaactagccgttggagtggattccatgtcttgcagtgtgtgcacggaatggaaacagttcagtgattttcaaaagcaagcaaactgaacagcagtgatatggttaaaaccacaggaattttggcaaatggatttttagaggggtgaggaaatatcaggttaagctgtaactgtgctctgttgtgtccagagccacagagcatttttctaagtattttatattaattgcagtccttaagttttgcaatttgtttattggtgttacaatgccaaggccaactgaggctgagttaaatccttaagattgttgattttgtcttcggtatcactctgtttctttgagatggcaaagaatttaaatttcagtaattacaggtgagtatttgaagctgacatggatactcaaaatgttcaagtcataactaaaaatgaaccatactatcaataaaaatctccatttatgtcaagtaatggaaatacatgccttctaatcattaattctgtagtatcatattgacgtacaatatgtgttctttgcaacctataacagagtatctttagttaggtttactaattaacatttttttttaaataacatttctcaacattcatgatataattattttaattttccagatgtcctcaagtaattttagcagtagtagtcacatgatatagtatcatagttgtagaatgcaaattaaacaagcaagtaatctagcatctcattggaatatttactgaaccatctatactatgctagctaaacaaagatctcccagaattttggtgaccttgggtaatatccaagacagagttaggttatgttgaaacaaatttgtaaacaactttgactaaatttccaatgtatcttgttatagcaatatgtctctaaaacgagtacaaaatgtactagcttattatataattgatttctagagtgaaatacacaggcatttttaagcaaccaaaaatacacagactgtgatgttctaggtagtcagtagaatggatgttaatgcaaccaaaaggtttgttttcacacttttatctcctagctaagaagcctctgctctgatctcctcccttagactcaactttctgagtgttaaagccatgtgttctgtattagcttgccacaagctggtcgctccataaagactgtagaaaatgctggcttttgttctcaggccctgaaacaacagaattcttccttaatcattttcaggaaaacaacaatagcataaaccttatctctaaaagtagacagatgtacattcctttaagctacattgtcacaacaatgatttttcaagtacttcaggctctaaaatcagttttacattacgtgactgatataattaaggagcaaaatcagattggtatgctgtggggaaggcattggagaggttaaattagggaacgaatagaattatccagcctgacttccttatttgatattttcttgtgctttattaataaaactggcactggaaaacttttaaacaacatttttcgtctctctgtgggtaaaatttaaatcaaagcctgtctgtagccacaaagactattattaaagaattcatcctgatgtgttttaaattatttatttaattgaaaaatacacatgaaataacaaggtacttatgtttaaatagagtaaccaaaatctgcacaaaattcaaaaaatgtttaaaagtttatattcatttttatctctctaattcatttacatgtatgtaacttgtaaatataatggactcattattttgctttccttcccacctaagcatgtggctagattcttatttatttcctacttaagacgttattatattcagaattcatttagtgcgtagaaggttaaaagcatttagccatatagaagcctttcttaaaccacacataatgccaatagttttccaaaatttctaatttatttttcaaaaaattttttagtgtatatgtgtgtgtgtgtgtgtgtgtgtatttttttttttttttgaggtggagtttcgctcttgttgcccaggctggagtgcaatggtgccatctcagctcactgcaagcttcaccttccaggttcaagtgattctcctgccttctcctgcctcagccacccaagtagctgggttataggcatgcgccaccgtgcccggctaattttgtgtttttagtagagatggggtttcatcatgttggtcaggttggtctcgaactcctgacctcaggtgatccacccattttggcttcccaaagtgctgggattacaggagtgagccactgctcctggcctagtatatatttttaaagaatttgaaaaatattttcaaaatgacttaattgatgtccacctttcccacatagtcaagtagtgactaaattctgtagggtaaaattcataagagtcatggcctcagctacagttccaaagtgatttcagagatatacagctggctggttatgtagaggaatttagaaatataaccatatttttcttgtttgcttctaccaaacgtagaaagtgttttttaagtcacttggtgaataaacaatgccaaatcgtaccttgctttaattccctttgcctcacaaagtcactgactaaaacattcacaaagacagataaaagacataaaattaggctttattcttttcaaataaatttgaaaagtaagcaaagtaatgtctttgtaagataaagttttcctgtatatcttctcttaatgattaaacaattttgcatatttagttttttacttcagaatttagcaagttctgtgaaagttggagagttatacaaggctttgaaagatcatttcatacatccccaaacttaagtgaatcaaaaccattcaaaactcatgataatctctcacagaatgtgattaattatctccaggagagggagatggaacatgtttcctagaaaactcattctaatattccatgaccttcactctcagataatttttctaattaagtactttgcatttgaatttgaacccatgttttcatttttgagttggagaccaaaatctgaataacagccatttctattgttgatcacaattgtttatttatccctcagcatcttctccaactgaaacagttttcttgttttacagtttcaatctccaaatttctaattattgatatgttcttgctttgaagtttcatcattgtttagcacattcctctatttatgcttaagtttagaaatcaagatggtggtccagagaaggctaaattaattcccaccactttctatcctatcttatatactcattcactgttaaaatttgcctgcccttctaacctttggttagttcattatcttttttgtgtgtgccctagttcataatctgaccacatgtgccaaaactaacctttccccgattggtatattacaaatgtttcctgtttattgaatttgaatttgttagcattccatcactcatataactttaaaaagatagtttgaattggccgggcgcggtcgctcacgcctgtaatcccagcattttgggaggccaaggtgggcggatcatgaggtcaggagatcgagaccatcctggctaacacggtgaaaccccatctctactaaaaatacaaaaaattagccgggcatggtggcgggcgcctgtagtcccagtccctaacccaaaccctaaccctaaccctaaccctatccctagcctgtagtcccagtcgggaggctgaggcaggagaatggcgtgaacctgggaggtggagcttgcagtgagacaagattgtgccactgcactccagcctggactacagagcaagactctgtctcaaaaaaaaaaattatatatatagagtttgaattgtaatttcactgctccaatctttacagttttataaccatgtttacatttagttatgtataacaaatttaatatagaagaaccaagttaaaattagtcatttctcaataatgtagagagcatgggaataagttaaattgactatcatgctgctaatgggggttttaagttttattaggaaaatctgtctcatgtctcgcaacagaagcagagaagatggcccataggacaaaaatgccataagtacagtgatgtgaaacatctgtgggcagacagctgcaaaggttggaaaggaacttttgtgggaaaagaatcgtgttgatttatgttggcttcctcaataataaagttgaaggaatactggtagttttccagagccaaaacttctccatgtgaatgcacctattggaaggacactgttagaataatctggaattgtttttacctttacaatagtcatcagaatacagtggtatttattcttaaaatatctcttcgtagatattgtgctttataaaattatttccttttgtggaatggttgaaacaaatggcacaaatcctcagatacactgacttgtgatcaaaatcagctgttaagttgatgaaaaagccacccaaactgaaaaggaagtctgaggttttccattccaagtagtagaattaattaacttaattataagcagaccttttcttttttaaaatagggctctaaaattattgaaaacccttgtttttggaaacaaagtcacataaatactggctttctagaacagattctctaggacatattgctaccactttattacacagcaggactagaggaaggaatgcaacagcaaactccatagtaataattgacaatgaaatctagttatttagttttaaaaatatgagtcaacttttaaaacactataaacatattttcatagcattgtagaaagttgctagcagagagcttggattggaacataggaagcctggattcacagcccctttggccctaatgcaattgtacctgtttctaagttaatttcatcagccaaggaaatactcagagggaaaaagtaaatttagcttttttgttgttattaataataatatgattaaattttctctaatatgctgtttgctaagtatttatattatgtttccatgggaactttttctgtatgtatctttttactatttccccaaagaatgcagttataagacaaacatgaaatttggcagttaaatgaagtaatggttatggaatttcagaggatagagaattgaattaaaatagtcatccacattttgggtttttaagttgttcatgtcaatcaaaatagaacaacgcttcttccaggaaatgaatgtagaaaaagcttttctttaaaaaggggaggaaaaggttatttaatgtttttaaactccaactcttttttggttagttttgttttaatattagaaagataaataatgacagactttaaagaatatttaaatgtatcataatgtaaatagccctcaaatgttcatgataaaatcagtgaagctgagctttaaaatggtctggggaatgaccacaactaataacagctcgtgccagacaaaaaataaggaacctgttacagccctagtctgatttacaataaaatcacatcattttatgattaagtttttacagagcaaatggagctaaaaggtagcctgttttgttttttgagggctcctgttctggaattattaaaaataaaaaagaagatactatagatactatggctattacacctcttttcagggcaaacaagcatttactcataaaactagctttaagtcctataggatgtagcaaaacaataactacaggtttcttcaggacagttcttttgagttcagtggcaactattaataggtttttatttttaaaaatactgatttttattttaaaaaaacaatcattatatagtaggctgctgccttttccctgtgttgagaaagaatcttgtttacaaactgttgcttttatacacaatttaaatttctttcaacaggccaggccattctctgtaaatctggagccattataatgcagcattttatgatgacaggttactttatattgcctgagcctgttctttctgatgcttagggttgttcccagtgatttgtaattacagacctaaaatacattatgtgggtactttacttcctgttctacatttgtgtttcaggctaaagtaagcctggaaacaagatccttaggagatacaaacagagtgtgtagaacatagaacaaaatgtagaactacaacaaatgccgactagcctctgccaggcacattttataatttattagaaacaaatctacaccatgaagttgaaagaaggatgaagacaaatgtccaacacctgggatcaagtgaagagtggtattaaaaagttttaatatcctgtttttatgaaagtctccacattatggacaatgtaatggtttatatgtaacttggatacatttcatgtggcttttttgttgttttgcaatctgagacacaccctctcccctgagataatatgcagcaacttgaaaagaagggagcatgtggagaaagctggagacagggtacagaagcctccagaagaatagtactaaattctcctgcgaggcttcaagttgacgctgtagtttctggtaaataaacaatctactgtatctaaaatctgcatttatatttttgggagcttttccttatcttaaaactacataatattaattttcctcaactggtaacagtcatgcatacttttaggtaaaagcagtgataacccttataacgtaaaacaactgatcaatttatgactattaagtgttcaattatctgtccttgggttaattcaagtatagttttaagactcctctccatcacagaacatttctgggccacccaaaaatactccctacaaaatactcaggagcacttaacaaacactgggcatacaagtttttattagtgacttgtctaatcaactctttgaaattatttttctagctaaagaggctacaaccatcgatttgagtatcctcgcagaaactgcatcacccagtttatccaaagaaccacaaatggtttctgatagaactacaccaatcatccctttagttgatgaattacctgtcattccaacagagttccctcccgtgggaaatattgtcagttttgaacagaaagccacagtccaacctcaggctatcacagatagtttagccaccaaattacccacacctactggcagtaccaagaagccctgggatatggatgactactcaccttctgcttcaggacctcttggaaagctagacatatcagaaattaaggaagaagtgctccagagtacaactggcgtctctcattatgctacggattcatgggatggtgtcgtggaagataaacaaacacaagaatcggttacacagattgaacaaatagaagtgggtcctttggtaacatctatggaaatcttaaagcacattccttccaaggaattccctgtaactgaaacaccattggtaactgcaagaatgatcctggaatccaaaactgaaaagaaaatggtaagcactgtttctgaattggtaaccacaggtcactatggattcaccttgggagaagaggatgatgaagacagaacacttacagttggatctgatgagagcaccttgatctttgaccaaattcctgaagtcattacggtgtcaaagacttcagaagacaccatccacactcatttagaagacttggagtcagtctcagcatccacaactgtttcccctttaattatgcctgataataatggatcatccatggatgactgggaagagagacaaactagtggtaggataacggaagagtttcttggcaaatatctgtctactacaccttttccatcacagcatcgtacagaaatagaattgtttccttattctggtgataaaatattagtagagggaatttccacagttatttatccttctctacaaacagaaatgacacatagaagagaaagaacagaaacactaataccagagatgagaacagatacttatacagatgaaatacaagaagagatcactaaaagtccatttatgggaaaaacagaagaagaagtcttctctgggatgaaactctctacatctctctcagagccaattcatgttacagagtcttctgtggaaatgaccaagtcttttgatttcccaacattgataacaaagttaagtgcagagccaacagaagtaagagatatggaggaagactttacagcaactccaggtactacaaaatatgatgaaaatattacaacagtgcttttggcccatggtactttaagtgttgaagcagccactgtatcaaaatggtcatgggatgaagataatacaacatccaagcctttagagtctacagaaccttcagcctcttcaaaattgccccctgccttactcacaactgtggggatgaatggaaaggataaagacatcccaagtttcactgaagatggagcagatgaatttactcttattccagatagtactcaaaagcagttagaggaggttactgatgaagacatagcagcccatggaaaattcacaattagatttcagccaactacatcaactggtattgcagaaaagtcaactttgagagattctacaactgaagaaaaagttccacctatcacaagcactgaaggccaagtttatgcaaccatggaaggaagtgctttgggtgaagtagaagatgtggacctctctaagccagtatctactgttccccaatttgcacacacttcagaggtggaaggattagcatttgttagttatagtagcacccaagagcctactacttatgtagactcttcccataccattcctctttctgtaattcccaagacagactggggagtgttagtaccttctgttccatcagaagatgaagttctaggtgaaccctctcaagacatacttgtcattgatcagactcgccttgaagcgactatttctccagaaactatgagaacaacaaaaatcacagagggaacaactcaggaagaattcccttggaaagaacagactgcagagaaaccagttcctgctctcagttctacagcttggactcccaaggaggcagtaacaccactggatgaacaagagggcgatggatcagcatatacagtctctgaagatgaattgttgacaggttctgagagggtcccagttttagaaacaactccagttggaaaaattgatcacagtgtgtcttatccaccaggtgctgtaactgagcacaaagtgaaaacagatgaagtggtaacactaacaccacgcattgggccaaaagtatctttaagtccagggcctgaacaaaaatatgaaacagaaggtagtagtacaacaggatttacatcatctttgagtccttttagtacccacattacccagcttatggaagaaaccactactgagaaaacatccctagaggatattgatttaggctcaggattatttgaaaagcccaaagccacagaactcatagaattttcaacaatcaaagtcacagttccaagtgatattaccactgccttcagttcagtagacagacttcacacaacttcagcattcaagccatcttccgcgatcactaagaaaccacctctcatcgacagggaacctggtgaagaaacaaccagtgacatggtaatcattggagaatcaacatctcatgttcctcccactacccttgaagatattgtagccaaggaaacagaaaccgatattgatagagagtatttcacgacttcaagtcctcctgctacacagccaacaagaccacccactgtggaagacaaagaggcctttggacctcaggcgctttctacgccacagcccccagcaagcacaaaatttcaccctgacattaatgtttatattattgaggtcagagaaaataagacaggtaagtctttgctttctagactagcattgaaggcaatcctcattttatcttgaaagttacttttggggaaaaaaagtcaacataccaaatgctgctattagaagataactggagtgtgaaaaataaatgttttagcttcatatatttgtacaagaattggaagaatatgttaaacaatgtggaagaatgttagatacaattttatgttaaaagtcataagaagccctgctttgtcatctaatataaccaaatcatcactgttacatcacttcaaaacatgcagaacaaagtgttttaatttcagtgtcttttcatacattactactcaagtgtagcactagactgtgttaacattccattggtctttaactattaaccttcagtacttacaatgtggacggctaaaatcgttttgcatatccctaaggttgacagaaagatatttaaaggtttgctttggtttttctcttccaggattttacaggtttattatatgacttgtgtggtgggtaataggtctctaatgtaagtgttattttaatgtaaatgcaacatattcttatgctattgttttggggtattttactgtggttttatctatttagagcaagtacaacctagcttagttgtagggagtattacagtttattgtattaaatataatttcagaaggtggctatatattcattatccttgcttcctaaaaaccaggctgtagtgttgttcattttatgatttaattgttttaccgctaggaatatttgtgatgccttctattccactcaaatattttagctctctgacagaactcttaaaagctgtttgtttacattgattaatacttggagttgtcatgatcaaatacgatttattgctgtctaaaggtgagcccacaccatcttttacatttgataagctgagttgagaatatatagcaaatgcagttcaataaatcaattcaggtttgtctctttctagtttagaaattacgatcatggattttagttaatttgctatattttcattttcatataagaattaaatgaatgagtattcgttgttttcttgacctggctctgagaagacaggatagaagatttttttttttttttttaagcagggttctctcttactgttggaatattccctttcgagtatcatttttctgaagactgatgctatcctcattagagtgctcaggagtgcacctattggaaacaaacaagtagcgttattgtcaagtatgtttgcatgtagtgctgttggtggacacttcatggcttctataggtttctactctccagaattttctgtgtgaaagcttttgcttgtcagtgaatagtagagaagagaacacacccacagagtattaaaattaacctccacttcccaatgcagtttaaaaaggacaggatttgatcatgattttcttgctaatgatattgtttcttggaaatcataacatatttcctcttttctacatccttttccatctctcggaactggtgtaggaaaaagaaaatgaattgccagtaagtcggaatgaggattgcgttaggctggaaaagagacaggaatataacggtgaaagaaaaacaaaaaagaggtaaaaggaagcaaaaagtaaatgactaccaacacttagtttcataatttaaaaaaatgcttgaatggatatgcagattgtttttcaattgatactactctgttagtgtagctaataagttgagttgaataatataaaacccagtaaaaatgttctgcatttaaaaactcttccaagtgggaaactgccagttaggaagtcaaattacaaaatggaaaaagtgaaacttgatctctctgaaagaattggcagtcatcaaaaaaaaagaactaagttataaatggttgctggaagtggagggtctgagtaagctaaacctgaaacaatttatacaaaggtgtacatttataagtgagttgtggacttgattcagctagacctgggagacgtatataggtgtttcttctccttctgcttctaaaatgtgagactataatccaccttgaaattaattttgttttgcataataatattaggtcagaaaaccgtgcaatacttggttacttccatcaggcagaattctaatgtgagagtgtgtatatgtgtgtacaacaaggggatgtatctgtggaataattatgtatctacctacctacctaccttcctacctacctacctgcgtacctacctacctacctacctacctacctacctacctacctacctacctgtcatcatctgtatttttgtgtgttctgtatatgctgttctccttaactaaaagcattgtttattgtcttcataagacaatgaagtttactcacctctaactgctcacctatactaatattatttattttctatgagaaattttatcctccaacattttgagctttggcaagggaaaatcctaaagcagatgttcaattaatgaatttcaaggcaggtgtataccttaataaggaaaagtgcatatgtgcctggagaaccaacctttttatgtatcaaggcacaattttccagactggaaagtccttggtgcatgtgtgaacttgtataaatctattcacaggaatagaatacacctttatatatactgtatatccaagtaagcaaaaataccacccatgctattctaaaccaaggcattcaataattttttgctgcactcagcgagtcatataaatcttgtttttttttttttttttactactatgaaacaaaacatgctactcaggacacacttatgttatacttgctcaaatggatcttaatagcaacttacggtgctctagctagagggcaactgtagttagcagttaaaaaaatctgaaagaacttttcagctcataaaagttttatgagctgaaaaatgctatggggtgtgtttaacagtggttcaggggatactgaaaactttactcctgtctatttcaggagtaatttgcacacctgcattttgaaaaattattgaaaggctttctttgtgaacatgcatgaaggccagaatttgaagctgtaggaagagtttcttcaactccagattttttttaaaagagcactcctctaaatcacctgaaatgttacaaggtagtggaacagaactgtgaatgtttttaaaaactgacaaacaggtatttttaaatcaaagaataatttagaaatgtatggatattaaataccaacattattatgcaaatgctcttagttataaccttaaaataggcagcttattaccttttttaacaaacaaattcatatatactacttattatgtgtcaggcctgcttgatgctgtcttgttaggtgttctttttcctactggttttgtaatttgtatctacccaaatgtatgtgtgcaggtgaaaagcaatattaaattaaatgatagaaagattaagatgttggtaaaattattaatgtaatgctattaaagattaattacattttgagaaatatacaaaaagctaaaggcttattgtctaaatatggtgttatggagaggataaagaacaaggaacattggctctgagggcaggagccatctgggcagatacccatatttacatcattgattgcagagtcatcacttttttttttttgcgacggagtcttgctctgttgcccaggctggagtacagtggagtgatctcggctcactgcaatctctgcctcctgggttcaagcgattctcctgcctcagcctcccgagtagctgggattacaggcgcctgccaccatgcctggcgaatttttgtatttttagtagagacagggtttcaccatcttggccaggctgggcttgaactcctgacctcatgatccacctgccacggcctcccaaagtgttgggattacaggcatgagccactgcgcccagccaagtcatcactttttaaaaggtaatgtttatttaagataatctcatataattttttaaaatcacacattttctgttcttacagaattttaaagaacattttaattatagaaaaattactttctgatttgttattataagatccaggtcctttcttcaaacaaaatgttattgagagcccctgtatcttgaacagacaaaagagtagctgtgttggttaatgtttgagggggacatcgagaacctcactcccttgggacctcctcatctcctgtggtggtttttaaaataacatgtacctcacaacacagctagaaaaagaatgatatctagaccattcaaaataaagcaaaaacagttactcattcctgagagaattaagttcttaaaagtaaaaatgtttcaaaaattggtctgattatctatatctttatctcattacaatgatacacatttaacatttacctttgaatagcactatgcatggtgctgaataaaacacattaaacaaatattgtttcaatcttattgatgcctatgtgtcatcaagataatatataatggtatgtcagagtctcacatgtatgtgcaaaactaagtcatcatcaaactcacacttcgggcttcatactttcagaccactttttctatatattatcatgtttaaacttcaaagataatttgtgagacaactagggaaagcagatagtcaaacgaaggtacactgagtctgacattcttggcattgggtctagcagccctggccctctttggagcatttttgccatgaagtgattctctctcctgatgagctctgagaaaacaacaaccccctgcccaatggcttaggtactgccctgtctgtcaattcctgaaagagcaaactctgggaagactggtttctcattggcattctagtggtttgttaagagtatataatttagatttggttgctgctaatatggggcagtatgcatgctcttcagatacctgacatagcaaggaaagagtgtgctgaaattggtagtacgttattctgcagttctgggcagcttctttcctgtagagttttggagcacatctctgaaagtggatgggtctggtgcctgcacacctccgtggttccttttcctgagctccagctgtggctgtctgtcagagaagcacatttttctgcagataattagaatggcttcccccatctctcacggactgtcccaagtctagaaaagaattgagttcctcttctattagtcaaataaaagggaagagaatgtttgtcttcctttcctttctgtagtgttaagaaaataaacgaacttaatgattctaaattatcagtgagcttaacactgtactatagaccaaagattaccttttcaaaaagtcctttgaggtgaaatattttgtatacgtaatacatagatgcacatataaacacacacatatagaatctcaatattttaacacttctttgggtagttgtactaactcactaaccctgaggaaaaagttaagaaattgaaagtgttttcttcaaaagttgagatttaacaataaaaggtgttactttgataactaaaaggaactttattatcctcttcctaaaataaaccaatgcctattctgaaaatggcacttgcaattacaatttgccattatcaaagctaccactgaggtagaggcattatctaaaacaaataccacttatcatttattggcagttacctcgagagagacccatacaccatcttctagcagagcacagtcaatcaaattaccttcgggtaaagctatagcatgtctagtcgtttgacagatattaaaggtggtcataaaagaaacataaaccataggctgtgctccaaaggcatattggccagctaacattaacacaatcaaatacagttgtcatactaaacatatagttacacagtaggtgtatggtgtgacagattgtgaatggtaggtgaggtcagaaaaagaaggaatcaagaaaggcaggaagttacagaatatttcatgagaaagaggagacttacgtcagtctctgttggagggatagattacaatccaattatgagaggccagttattagccaattgcttcccaacttaggctcaccagtggggttaaggagccccaagtataaacagctgtttttctaaatagagtttctaaacagcttctgaaggaggccatgtcatcccagtgctgtttgacatggcctgcttcagaagctgaataccttcttaggcctcacgcagaaactagtacagttcatgaaaacccgagatactctgccagcttcttgaggaagcagtgttgtcacacttttctgagcttcagtgattcacacattttgataagacagcatgttctgtgggttaagtacatttaccttttcaaaatatactcccatgaagtatcatggttcagaattacacacttacaaagttaaatggcataaaactactttgtaaaaagtgcctacactctaaaaggtgatttaaaggtttatgacatcttaattcaagtgaatactgaatcagtaggattatagagcaggtgctctaagttagggaatctggagtcagtctctcctttgcttatgtgcaatgtggacccagggatttctcaatttctctgtcagaatttttaacatggtaaaatggctattattatatggaatgatatttcctaagctctgacacatactctttctccaaatcacagggtttatgaaacaaagatacacacacacacacacacacacacacacacacacacatatatgtatacacacatatatacaggtaatatacagatatattttttctaatttattcaacagtcaaataattacaatatactaactacattagaactggatttttttgaagtacattctggttaatattctgaaccaacatggagatgtagttagtttgctttgtaggatacatggaagaggcagttattgtgatagaaagagcctttggaaagagacctgggttcactgtcaacattgttacaggaggcactctgtatccacaattctgcatcctctgatttgaccaaacatggataaagaatatttgaaaaaaaaaaaaaaagcaccacaataaaaaagaacaatacagcaataaaaaataacacaaataaaaacccaacacactataataactatatagcatttacattgtattagttattataagtaatttaaatgattacttataatacctgatttaaagtatatgtatatgaatgtatgcgtaggattcctgcaaatactatgccattctataaaaaaggacttgagtaccatggatttttgtatcctcctagaaccaatcccccatggctactgagggataactatatttacagtctgtttggtcttgtataaattacttaacctccacaggcctcagttgttatataattaaaaatttataataatactacaacctcaccacattggttaaagaaggggatctttgagtgattgccacatgcaagtcactgtgacaggcatttcacatatttaatactccttcagtgactagaaagcaccaagcacaatgcctgatacatagtaatgacttagtacaaattaatctcctgtgggctttaaaaattatttcatttccaacttctaagtacaggaaaatatagactgttttgttctaaataggtaaaagccaaatgatcttaaaattcaagatcatttatgccacaagaagccaagtataattgtactttagtgtctgcttaactgaaataacttcttaaaaatccgaacccgacataggttgtgtttttttgggtggtgccattttgggtgcaaatcagaagcagctgcagcccttacttaaaatttaaatatagtattggctctataggacctaagagtagaatttattagctttttgcttttcctcagttgtgaaagttgggcttatgattttgataactaccaatttaatttttttctcataaacatcattttacaaattcttgatacatttccccaggtattgagcctagcttcttgcatatttatagaatgaatggacattccctgctgtctttttgttgttgtcaaggaaacccccagttctctacacagggattacattcttctttcttaatagctcttagatcgttcatttgtgcaatgaataaaaaatgtactcacaggtccagacagtgttcagaacttttttggtgggtgaggggcgtagctaaggggagagacatgcctagtgagaggagcaataggaataaaagaaaaggagaaagaaatgctggctgaggttccattttaatgaggtaaagctgaaaaatttatgctttaaaaaagacattgcctatttttgtcactttagaaaatgtataacattacttttcattgaggtcagtgtttcatgtacaaaaatgttagtttttaagtggctttgttaagcgaatagctccaagaatggggcccaggttggtgagggtgggatggatgagggagtggtgatgcgttttagtagaaactattttttcatttctatagaagtatttgaactttttttacaacctaattgaggtgatacaaaatataagaatattccttcatcctggggcatcatgtggtcatctgagagctcatttgattacattaaaaatcgtgttccttagagagagagtgccagtatttagactttttgagtgtgaatcaggagggaaacacacatccattgacaagaagatggatataattatttttaaaaagagtgatttgatcctttggaggaaaataaattctggtggaccttctaagtaactgctagaatgattgggtaatgtatacagcttttgcttctccataaataatgtaagtattaaaaaggagattttaaactagaaggaaggaatctctggagtgagaggaaaagtttaattgtatttcagtatctatgtctatgaaaagttgatatacggtgtcactgtggtatacccaaacttgtttatacacatgtataaccagtacacagtaagtaccatgagtggcttttagtgattttatctttttaccttgtagtacagtctccctggtgtctcacaaggctagtttacttactttggccatatgcttcacatagtaggtttctggaggttttgttttttctaagatgagagagtgaaaaggtaatgtatatttctggagagtatattggaatatagtataatcatcattttcactatgctgcacttcgggacggctgtctattgtattttttaaataggaaaacaaaatctttttgttacacattaaaataaaatccattttaaaaaagaaatgtgatcctaatatatctctgctgagtagattggtgtacatttacgtttaattaaaagctcttaaacttaaattgtaaaattccccaaagagaacgtgaactttaaccagctgcctatgcatcttagcaactatgttttgtgtctggtaacagtatgactggaagacttgtgctctgtctacaaaactttgttatgaagtacttaaaaatacttgtgaataatttgaggtcagctagcaataaagctttgtgtgaaatgtcattaaaaaaagcctattaaccatggtactgttatattcaagtcaagctgttaaaatacattcatataaacatagaaaagattatgcatacaccctgtagagttctgtggtttgattcttgaaatccaaacaaaagttatattgccttttgagtaaaattctagaatagagcagtcttttataagactaagagcttcatctaagagcttgaaatgtcaattacaccattgggttgctctgttcctatgaaatagagcacatctccatttcggaatgagatacctcctctcacagtagcacaggtgtaccccccaacccccttactatacaccgcaaagaaacttttctggtttgcaataatctctgttgagattctctaataacgtgtgtggtgggtggaggtggtgacaggaaatggggatgaagaggtaatttcagaggaagaataaactaagagggggcaagtaggatttggtgagatgcaaggagttagtgacaaatatttgggtgatagggcagggaaaaatttatctgcatatattaatagtagataggttttataccccacctctccctgctatgagatgttaaaagtatgggaagaaattatactgacagaataaaatttagattgtatgtataggaaatgtcagcagaaaattttaacttgaaagccctgggtaattaacatttctctctccttcaaactgatattaagaaatccagccaggtgcagcggtacacactgtaatcccagcactttgggaggctgaggcaggaggattgctcaaactcaagagtttgaggctgcctgtaatggtacccctgcactctagcctgggtaacagatcaacaacctgtctaaaaaaaaattcaataaaaccatttgcaagttgtcgcgaacttatttaaagaataataatagttgcttaattgtgagactattactttcagaaaaaggaaacaaaataatttcaactcccattttgcatattttttgaaattaaagaattcccatttagtagacaattttttttctggggatctaatatacaaaattaagactgtagttaataaaattgcattgtattagagattttgttaaaaaagtaaatttcagttgctcttctcacaaaaagatggtatatatgttaatctgcttccttttaccatctatatgcatcccataacatcatattgtaaacctcaaatacacaatagagtttattttagaaaaagaaaatttctatcatacttattaaatgagcatattattttatttatatgtagattttcttctcaattacttaatttattttgatgtgctgccagcttcatgatgagaaacataagatgaaactgcataatacatttctgttttctatcattttgaaggcaagtcagatcaaatagttgcgaggtgggtggagaaaggaatcctaatctaaatttaatgattagtacatttgcaataagtacattccaaaagtttcccattaaaataggagaaaagagtttagtaaggccagttctctaacttactggcaggaacatttgtttcagagagagagagaggaagggggcaaggagagacttggaaagtatagttaggtctctctgaagttgacaagagagtgtttgccctagggtctgatacataacaggtactcagtaaattttgagaaatcaatgagcatctgaagagatattacattctgggcagcatgcatggttgtggtggtagtgaatttaattttgtgtgcaaaaaccgatatgaagcaatgctgtgtttgtgaaatgtatgcaaagattctgtctctgaaatgcttatactgctgtgattgaaacattatcatatttatttaggttagaaaatggaatttactacatctgagttggtttttggtgagaaattctgatatgatagtctaaaatggcaaggaagtccttatagatctatgagcaattggaagtgttagagttcttgatctgagagaaatatgacctaaaagaatattatactttgttaattggagctaaaatcagaaactataaagtgaatgccatggtctttagtagaattaagtattcttaatatgagttgatagttagctaaattattatacagtactgatttacaattagagttcttctttattttctttcccagaggaaaacaaaaaatttcagtgagcattatgaccatccatcagtttcttaccatattgacatgtgacatgttggcatacctttgtgtcttctttctctgcttttctccaccccactttttttagagccaccaacatacttgacagaacttccatctgtaattactcaataagaagatcatgagatatgtttgtatcagtcttatttttttgaagtaaagaatttacttagaaattcaagtaaatctataatagcaatgagtgttcttaccctattcttggcctaggagtttgtaaatatacaatattaatcagatatttccttatttatccttgtgttttgctggagaaacccagctgaatggctcgttttaacttcattatttacaaaagggtacaaaatatggtagaggttctttatatgcttgacactgacccatgtttcttatttaaaatcttttctctgtacttaaatgaaagttttggtgtcaccaaacagggtaagtaagaatttagtgtacctttgtctaatatttcttaatcatgaattctagttttatttaagttaatgaagcaaaataaaagagttgcttgcatgtaaaatggtagtgtgagcagtttaagatatgcacatttttaaactccagttaaatcccatgaagttgtactgaatagtttaactgagtctggcttaattcaactatattcaaatagttttagcaatgagagactcctggcttggataaaattattgatgtgaatatttcaagagattcttttgtacagaaggcattttaaatgcttctgctcatatagtttaaacattttcttcacattctgttttcatagcacaaagtttaccttcaatgcaaactgaattaagaggatgttatcatctgaatattttatggtgtcctattttaaaacatatacaccatgggtactatatataagatccgagtaacaactttagtgacctaatattgaagaaacctagtctttttagttacctatatttttaaatgacaaggcatttaatcattttcctgcactgagcaattagtaacaattgcaacatctgtgtcagaaataatctgtattcattttatgtttttataacacactagagttatgtatttatctcgcttctctttgtggtagaaatattttctcatttatttgaatacccatatgctgtagtttaagtagttgaaaagctgaatatacagaatggaatggaatggagagagaagaaatgaactgtagtgtgtaaaatttcaataggaagggtgtttagttaggataagaataacccagtcctacacagaagtattttagtgaaataatttagtgaagatgtggtgggatacaaaagagagttttctttcttgtttctattagaataaaagggataaatgtatatgtctttgcattacataaaagtcttattgtctgggttttttaatttaaaaaaaattcaaggagcttctgtggaatttgtcttggtagttcctacacttctatatttgtcttgattcataaaatagattagaatataagcaacactgattcctcttcaatagggttttttcttctctgatgaaacagcaaaagctagatattgtttcttctatacatagaaggaaatagcttcttgcaacaggaacaattcaggagaaaacagttgttttctcccctttagatgataggttgggaagcagggttggctccgtcataatgatttctcctaaacacttctcaggtttggcctatgcatgtgtgttatagattggggatagtttgaaaactcattctgtagtattattcctatgggcagggtggtgagtagtgtgtaaattctttgtcttctttatgggtcagtatatccacaggcacattttcatactgctttgtcactgaaagtaaggcagctgcagtggcaggaccctgttctaggacagttgaatgcctctatgatgagacctcagaatttcctctttcctagtgcccaagacaaggagctttgctgatgtatttctgatagcagaaaaggccattgagcttagtggttggtaccatatggcaatttacaatctgggaaatattctgatgatacatacttttcgaggaatgctagttagaatatttagataggactcctgaactttctttgagaagatgttgatgacaagaactaaaatcagcctaatctgggtcacatcccaggaaggataaaggtctataggtgtggaaggctctttctggtcctttcagtgagctatttccaatagagcccgcctatccagagcttcccactcttgtgcataggatgtggttaagctcatgtctcagtgccacagtaggtagaggatgccattgcaatgtaaaagggctataaataaagctctcttgtttttccataaaacagtctgctctagaacagattataaaggggccagaaggaatctcttctcattttcttattgaatagagagtgtataaattattcccttacataaaggacaattactttttctatatagatcatatatagaaatagagctatagaaaaagtaattaattctatatgatatggcctcaatttttaatttttaaattgtttttatatgaaatagtcttaattttactctttttgcagttcacacaaagatgaattcctgcacttcaagattacattgtatatgtgattccttgcttcattttaaggactatgttgttttcttaaatgtgttgatgagtctttataacctgttttaataatgttaaattgaattcatttttcttattgttaatacaaaaacagtaaatttgaagactgagaaccatataagagggtgattgcacttattatgaaaagatttgaatccttctttgtgtgtgtgggtgtgaccagccttgctatcaatttcttctgtcatacactgccaaattttctatttaagtattgtgaaaactctgtttttttcaggtcgaatgagtgatttgagtgtaattggtcatccaatagattcagaatctaaagaagatgaaccttgtagtgaagaaacagatccagtgcatgatctaatggctgaaattttacctgaattccctgacataattgaaatagacctataccacagtgaagaaaatgaagaagaagaagaagagtgtgcaaatgctactgatgtgacaaccaccccatctgtgcagtacataaatgggaagcatctcgttaccactgtgcccaaggacccagaagctgcagaagctaggcgtggccagtttgaaagtgttgcaccttctcagaatttctcggacagctctgaaagtgatactcatccatttgtaatagccaaaacggaattgtctactgctgtgcaacctaatgaatctacagaaacaactgagtctcttgaagttacatggaagcctgagacttaccctgaaacatcagaacatttttcaggtggtgagcctgatgttttccccacagtcccattccatgaggaatttgaaagtggaacagccaaaaaaggggcagaatcagtcacagagagagatactgaagttggtcatcaggcacatgaacatactgaacctgtatctctgtttcctgaagagtcttcaggagagattgccattgaccaagaatctcagaaaatagcctttgcaagggctacagaagtaacatttggtgaagaggtagaaaaaagtacttctgtcacatacactcccactatagttccaagttctgcatcagcatatgtttcagaggaagaagcagttaccctaataggaaatccttggccagatgacctgttgtctaccaaagaaagctgggtagaagcaactcctagacaagttgtagagctctcagggagttcttcgattccaattacagaaggctctggagaagcagaagaagatgaagatacaatgttcaccatggtaactgatttatcacagagaaatactactgatacactcattactttagacactagcaggataatcacagaaagcttttttgaggttcctgcaaccaccatttatccagtttctgaacaaccttctgcaaaagtggtgcctaccaagtttgtaagtgaaacagacacttctgagtggatttccagtaccactgttgaggaaaagaaaaggaaggaggaggagggaactacaggtacggcttctacatttgaggtatattcatctacacagagatcggatcaattaattttaccctttgaattagaaagtccaaatgtagctacatctagtgattcaggtaccaggaaaagttttatgtccttgacaacaccaacacagtctgaaagggaaatgacagattctactcctgtctttacagaaacaaatacattagaaaatttgggggcacagaccactgagcacagcagtatccatcaacctggggttcaggaagggctgaccactctcccacgtagtcctgcctctgtctttatggagcagggctctggagaagctgctgccgacccagaaaccaccactgtttcttcattttcattaaacgtagagtatgcaattcaagccgaaaaggaagtagctggcactttgtctccgcatgtggaaactacattctccactgagccaacaggactggttttgagtacagtaatggacagagtagttgctgaaaatataacccaaacatccagggaaatagtgatttcagagcgattaggagaaccaaattatggggcagaaataaggggcttttccacaggttttcctttggaggaagatttcagtggtgactttagagaatactcaacagtgtctcatcccatagcaaaagaagaaacggtaatgatggaaggctctggagatgcagcatttagggacacccagacttcaccatctacagtacctacttcagttcacatcagtcacatatctgactcagaaggacccagtagcaccatggtcagcacttcagccttcccctgggaagagtttacatcctcagctgagggctcaggtgagcaactggtcacagtcagcagctctgttgttccagtgcttcccagtgctgtgcaaaagttttctggtacagcttcctccattatcgacgaaggattgggagaagtgggtactgtcaatgaaattgatagaagatccaccattttaccaacagcagaagtggaaggtacgaaagctccagtagagaaggaggaagtaaaggtcagtggcacagtttcaacaaactttccccaaactatagagccagccaaattatggtctaggcaagaagtcaaccctgtaagacaagaaattgaaagtgaaacaacatcagaggaacaaattcaagaagaaaagtcatttgaatcccctcaaaactctcctgcaacagaacaaacaatctttgattcacagacatttactgaaactgaactcaaaaccacagattattctgtactaacaacaaagaaaacttacagtgatgataaagaaatgaaggaggaagacacttctttagttaacatgtctactccagatccagatgcaaatggcttggaatcttacacaactctccctgaagctactgaaaagtcacattttttcttagctactgcattagtaactgaatctataccagctgaacatgtagtcacagattcaccaatcaaaaaggaagaaagtacaaaacattttccgaaaggcatgagaccaacaattcaagagtcagatactgagctcttattctctggactgggatcaggagaagaagttttacctactctaccaacagagtcagtgaattttactgaagtggaacaaatcaataacacattatatccccacacttctcaagtggaaagtacctcaagtgacaaaattgaagactttaacagaatggaaaatgtggcaaaagaagttggaccactcgtatctcaaacagacatctttgaaggtagtgggtcagtaaccagcacaacattaatagaaattttaagtgacactggagcagaaggacccacggtggcacctctccctttctccacggacatcggacatcctcaaaatcagactgtcaggtgggcagaagaaatccagactagtagaccacaaaccataactgaacaagactctaacaagaattcttcaacagcagaaattaacgaaacaacaacctcatctactgattttctggctagagcttatggttttgaaatggccaaagaatttgttacatcagcaccaaaaccatctgacttgtattatgaaccttctggagaaggatctggagaagtggatattgttgattcatttcacacttctgcaactactcaggcaaccagacaagaaagcagcaccacatttgtttctgatgggtccctggaaaaacatcctgaggtgccaagcgctaaagctgttactgctgatggattcccaacagtttcagtgatgctgcctcttcattcagagcagaacaaaagctcccctgatccaactagcacactgtcaaatacagtgtcatatgagaggtccacagacggtagtttccaagaccgtttcagggaattcgaggattccaccttaaaacctaacagaaaaaaacccactgaaaatattatcatagacctggacaaagaggacaaggatttaatattgacaattacagagagtaccatccttgaaattctacctgagctgacatcggataaaaatactatcatagatattgatcatactaaacctgtgtatgaagacattcttggaatgcaaacagatatagatacagaggtaccatcagaaccacatgacagtaatgatgaaagtaatgatgacagcactcaagttcaagagatctatgaggcagctgtcaacctttctttaactgaggaaacatttgagggctctgctgatgttctggctagctacactcaggcaacacatgatgaatcaatgacttatgaagatagaagccaactagatcacatgggctttcacttcacaactgggatccctgctcctagcacagaaacagaattagacgttttacttcccacggcaacatccctgccaattcctcgtaagtctgccacagttattccagagattgaaggaataaaagctgaagcaaaagccctggatgacatgtttgaatcaagcactttgtctgatggtcaagctattgcagaccaaagtgaaataataccaacattgggccaatttgaaaggactcaggaggagtatgaagacaaaaaacatgctggtccttcttttcagccagaattctcttcaggagctgaggaggcattagtagaccatactccctatctaagtattgctactacccaccttatggatcagagtgtaacagaggtgcctgatgtgatggaaggatccaatcccccatattacactgatacaacattagcagtttcaacatttgcgaagttgtcttctcagacaccatcatctcccctcactatctactcaggcagtgaagcctctggacacacagagatcccccagcccagtgctctgccaggaatagacgtcggctcatctgtaatgtccccacaggattcttttaaggaaattcatgtaaatattgaagcgactttcaaaccatcaagtgaggaataccttcacataactgagcctccctctttatctcctgacacaaaattagaaccttcagaagatgatggtaaacctgagttattagaagaaatggaagcttctcccacagaacttattgctgtggaaggaactgagattctccaagatttccaaaacaaaaccgatggtcaagtttctggagaagcaatcaagatgtttcccaccattaaaacacctgaggctggaactgttattacaactgccgatgaaattgaattagaaggtgctacacagtggccacactctacttctgcttctgccacctatggggtcgaggcaggtgtggtgccttggctaagtccacagacttctgagaggcccacgctttcttcttctccagaaataaaccctgaaactcaagcagctttaatcagagggcaggattccacgatagcagcatcagaacagcaagtggcagcgagaattcttgattccaatgatcaggcaacagtaaaccctgtggaatttaatactgaggttgcaacaccaccattttcccttctggagacttctaatgaaacagatttcctgattggcattaatgaagagtcagtggaaggcacggcaatctatttaccaggtaagatcacaacattgataaatctgtttccaaacctggaaacagtcccttggtgctaacgtttatatgtatgtaatttttattgtgatgttaaatcaatggagagtttcatattattcacataacagcaggccaggccacagtattgagttcataatgagatgaaatgacagtaagtatagattagttttggactttagaagtagactttgtatttttctgggttttagaaataatatacaattacaacatggaaaagatgaaattattaatgttataaaaattcaatttgtttttactcacaactagagtattgctttgtcatatgtctcatagttatacatgttaggtttaaaagtagaaaaaaagtcctatttttaaaaaccctcccattgatggatgctattgctgtagtatcaaaatctgtcaggcctttaacatttgggagtagtacgtagctctaataattatttcagagtttgtgcagtatcaatatcagctcatacttatatgcaatgtccttgtttaagacagtctacataatgcatcaaacacagtgcctaccagtagtgagtagtcatttattatataaacatactgcctgttgagagaagttttctgtgtatttactgaatgtatggaaagcatgaatttgatactgattcatataagccatctcttctgattgccacgaaaaggctataaaagccctgtgtgaaagggtaagaggtgaaggttcagagaggttcagcaacttgcccaaggtggcacagccacattgtggtaaaagtaggatttgaacccagcttagctccactctaaagtccatagtcttttcactgctctttgctggtttcagtatagtataaaaataaacaattgatattgaataatatatgaaccaggaatcttggaatatttactttgtagaatttattttcctcttaatctagcctgagaatgttaagaaatcagctctaatggtgttttcccataatgttattatttaaattaacaatgtcagtggaatccacaaatagacatcaccacctagctgctacctgcaaaaagaggaagaaaaatcagtactttaatgtctgtcttggttgagaatatatgttttattttaatatgttttatgccatgactatcgttaaaattattcttctgatcatatcaatattaccttttgtgccaccaatgctttattttgatgtgcttcagaaagagtaaaatagaaagtacaatttttaataaatggcttgaaatattttgaggaaaattgatcaaaggtagttgacattgggttttttgttatcactgtgtgttaaatctgtaaatgataatctagtaatttggctaatatttattgttttttaatttagtttaatatacttcagtttgttaaaaatatgatgtaaaaataactggtaataactaggtacatatagagttaagtttgatgaatgagaaatatgtaccaattttccagtttacaatatttaccaagatttatagtttgcgtcttcattgcaaaacaaatggtcactttagcttaattcagtaaacagcagctcatatgggattacctggtctatctgttgcagattcaactttcagaggttaatacgaactgtttaggggagaataacattcataaaaactgaagtttcctgttaattggaacgacttccagttcacaggaagactcactcactcagtccttgtttcatggtctcagcatggtgtctagtgtcagtggtaggaatagtaatagtacttcttcacatttgtgtggcacatcacagtctgataaagcactttcacctagtgtcatttggattcagcacagagggcagcatgtggctatggcgtgtgttaactgcagccttgtcatcctggcagcgagcgtacttgtactttaaaattcagaaagctaaaattgttagggagatttcaaatagttttggaactataggaaaaagtgtcttagaaaactcgggggagtttttggagaagttgatgtactcatctgaattaacctaattttaacgtgaatcccaaacatgggaatgtgtacctatccaggtttatagtcattcagaatttacttaacactcagaaagtttgagtttgactttctggtgtggggaagtctcagttatcttttatagcagtaccttgtttatcctgatattctttaagctaatgtttcataagaagttagacatctttcttctttcatgtgtaattatttcagggtttcaggacttaagattcttgaaagtatgggtgtattccatagataatctattttatttcaattattttgtaaaactttcaactctcatttggatctttgaagatttagaaatgtaagcaagtctgaaacaatatacaaagaataagtataaactcaatgaaaatacacttatccaagcaatattgcaatataaaatatatgcttcaagtggtgtaaaagtgtttgcacttagaaaatatatttaaactgtttgtcctcataaatttatgtcttcggccttcatatttatctcccaggagtgtcggttttatttgtattttaataagaaaattataataaaaacttggggtttcattttaggtgaggtttttgtatttgggtttgtttttctacagtagagtttaatccatgtgttgcttttcttcaagtatagtttaaaggagtacatttggaacgtgtttttggaaaaagcatgttaatgtagcagaagagacttcagtgcacactttcgaagaaaaacagtttctgagcattaagtggtaaaaggcaataataattcaaatgatgataacaagccaacctgctaaaaagaatgcatgttctgtgtatccagccatttcacatgaactaaccccatttaaaagaatacattttccattcactgtgcacatatgtgtaatcatttttgactaaaatcaattgccattatcatgccaactaaatctgcagtagaatatattagttgccagatacagtacaaaaaatatcatttaagagtaatcgtgattgaatcccagaaatgaatagatgcaatttgtaacaattagttataatgccaagaaacactccagagagtaaagttaatgttaatttttatatgtagtaactctaaattgctatggtaaagcctataatatggtagcaatatggggcgttttatgctaaaatacacgcaaacattagagacgagcctaactgcttttcttactttcctgaatatggtaggacctgatcgctgcaaaatgaacccgtgccttaacggaggcacctgttatcctactgaaacttcctacgtatgcacctgtgtgccaggatacagcggagaccagtgtgaacttggtaagatggtacttggctgaaaaggtgcagttctttcacagaagatatattgggggagaatttatgttgtcgaatcaatcagagatttcaaagaaacccatatgaagattaattatatgttaaatgaagttaaaatctgagggtaattaactaggggctggaaaatgggtacagatattcagtgaattctgttaacgtaaccaagactcagtgaggcctgctgagtcttcttgtgttttttacaggtagaatttacaaatgtaaaaatgcataaatattaacaaaaatgtacatttatcccccaaatctgcatataaataaaaatcaatttcagtataaaaatctttttagaaagctagacttaaaaattaggaaaataataaaagttagagagctttgtccttagttttgggataatttttcttctcatttggaatgggaaagacccttccctgactcccagcaaccagcccaacgtgcctcggcctcagggagctgtgcaattgctgttccctgcctctcttttggttccaaggaatataattgaccctcacactcccatattcttatttaggcatccttctctttaaagaaaaaaaaaaaggcaccagtgttgatttggctacatatagacctcacttctgagaaaagaatgatgaaatatgttgtccagatgtcccttttagagatatcatgaaggtttgcttaatttgcttacaatgattgagtaaagaaagctcaccaatagcactttaaattatacatcaatattgcgatacaatcccaacattcatattaaaagagtacttaaaaaaagtcaacgaggccagcgcggtggttcaagcctataaccccagcactttgggagggcgaggtgggcgaatcgcttgatcccagaagttcgagaccagcctgggcaacatggcagaacctcacctctgcaaaaaaaaaaaaaaattaaccgtgcctgtagtcccagctacttgggaggctgaggtggaaagattgcttaagcccagaaggtcgaggctgcagtgagctgtgttcacgctactgcactccaggctgggtgacaaagtgtctggcactcagcaagcaccataaacatgtttggtattattactatataatatcatgtttactaagaccatttctttaggtaagaatacattatatgactaagaaatttaacttgctttgtatattcatttaaaaatattcttaaacattaaatttttagtgtaattgcaaaatgctatggaaataaagtcactaatttcatcaggggagatcatatgtagaaagattagaatctgtgtagaaagattttatttgacatagattttaaagttgggaagatttgacaggtggtggagggagatatggacacaacaaacaaaagcacagaggccaaaaactacagaaggcatttgaatgacagcctcgatccaggtatgcctacttaggggtttgggagagggagacgtattgggagacagtaccagaaggcaggttgggtctagaaagccctgacagtctaagaaggtcctgagttcaggatactgaatagtgttacttcacactctagtcaagtgattctgagaccttagcatgcatcagagggctggtaaaacagattgttgtctccacctcaaagtatgtgattcagtagatttggggtggaattggaattgtggatttttaacattcttaggtgatgctgatgttgtttgtggtccagggagctcacgttgaagactgctgccctgggcaattgggatccatggaatgtttggaagtaaaagaataaaattatcatgactgtgtctaaaaaagatgacatttagcagagtgatggatatattggagaggaaagggcctagggatggtgaggccagttagatactttgagtagtccatgtgtgaggtaatcagagaatgagccatgattggaggtgggaaggctggggctgttgattcttcattcgttttagggcttatctgattcatttatcagcaatggagacaatggccctactctgaatacctttgacattttcttagggttgccaaatttaggaaataacaattcaggatggccacttatatttgagtttcaagtaaaaacgaaataactttgtagtataggtttgccctaaatatggcacggacatacttatgctaacaaattatactttttttaaaatctgaaattcaaatttaactggctgtcttgtatgttatcttgcaacctcacactaaatggaattctttgatactttttgaaagtattttgtgagcttttactattttgtttcagattttgatgaatgtcactctaatccctgtcgtaatggagccacttgtgttgatggttttaacacattcaggtgcctctgccttccaagttatgttggtgcactttgtgagcaaggtaagagctattgcaacatttgtatgatgaacattattgatttttttttagcaattttggcctcaatgcataatctttcctgcagtggaaattcacatttccttaggtttccttattcagggatagctcaaaacatctgaatcatagtgttgacttgattatggttgtttagctgatagattggaattgcaggcaggcaaactgagctgaatttaaagacatccagccaataaaaggaatattatcgtatgtatttttcttggggacaaactaagcactgaccttactgtggctcatgtacgaaggagtactgaattcaatattagctgtttttattttctcctcctaagcacttgagactcaatggacttatttttcatagtcaatcatatctggagaatgagttgatatagttgttagaatacatttgctttggcacatgctaagtagaagatattgtgaatctgctcaccaggaaattttcctactaaagaaggattgactttttctgaatgaaagaaagccctatgttcatgatggcttgaatctcatgatccctgtaatttgcattttacggccaacctgagggtgtattttaggtggttaatgggagcatttcttggtccatcaataagaaacagattgcatgctaagcacactcagctttggaatgtcgatttcctctacttaaactcgtacagtggtttggctttgataaaagtgttcagtgccaaacttccattccaccagacaaactgaaaatgcattagacactcaggcacattggtctggtcccacattctgcttcatggtgttaatctggatgtcactgcgatgaatgcaaatccaaaaggagcatgtattgaattgctgttccaagtggatggatgatggctacatttttaggtgttggtttttttctttttttattgcatagggtaaatctgtttgttttagattttgaatataaagatagaccaagcaagatcctcttcttaaagtaaaaacattagaaagatggcatttgttgaagaaaacaaaagcctgagacagttgagacattccaatatgttaaacatgattctggcttctgttagttccaagtacaagaagcaattcaaaaaatcgttttttcaatgtgcatttactgtcttccaggcactgttctgggcattggagatagaaatatgaacaaaacaaagtctctgatcctggtgacttagcataactcttggcagagaataaaatttagttctttacagactatcaaatgcatcctggcacattgtttcatttggttggcatagcatttctatgcattcagtgggctagaaattaaggctcagagaaaaaaagtgatgtgtttaatgtcacacagctagtaaatcgtacaatgggaaaagtgaacctaaatggcttaactctacagcccaagtttctctgaatatcttcacacttctaaagtaactctcaaagataaacactttatttatatgtttatctgatgcattgagtggcaacagatttttggaagggactttggtgccattgaccttttctctttcttttcaaaagaatattgaaagtaaaaagtgttaattaattttatttctggtgccacctgactttcaggtactttttattgtattttcaagcaagtttgattttcatgcacatttttttgctgagaaacatcgatctcagtctgtttacgcagtgcagctgtgctcctgtgatttattgccaggatactgaaagatttttttcctcttttcaggttgcctaagaacaaatgttttcttcattaacagcagctttgttgtctaaacaattttctatccaaagtttggtgatgaccgtgtcagtgttccttcagctgacgttttctgttctctgactagtaacttcccaagtcacagttactccgaaataggggacacattttggtgcaataattacagatacaaaatctagaaagggctattggaacagtagagaggcagttctggctgcacaaactgcccttgccaaagtcagtgatacagcttgcctagtgagaagtgtggaggatgggcactttcttaggacttgacagctatatgtcagagaggttgaaaacattacctgtacagcatcaaaagaataaatttttggtgaatttgtttgtgatagtttcaccttctatgttcatgaacaggagctgtgcacactacaaatctgggtttgtattgtaacccattgaaacaacctatttttttgtaacctctttaaaacctataggagttttaaagcataagatgtctttccatgcattgaatgatttttaagaaaatgtcatccacaaaggttgccttttaataaataaaaagagtttcacataatttttaggtaaggttgaaaaaacaaatagactatttctatgaatagtatctcctatcagaatagcatcctgggagatgcagcttgacaaatgatccttcattacatatttgttgaattcatgaataataaaatttaagtggccaggcatggtggcttacgcctgtaatcccagcactttgggaggtcaaggcgggcggatcacctgaggtcagaagttcgagaccagcctggccaacatggcgaaaccccatctctactaaaagtacaaaaattagccgggtgtggtggcgggtgcctgtaatctcagctaatcaggaggcagaggcaggagaatagcttgaacctgggaggcagaggttgcagtgagcagagatcatgccaccgcactccagcctgggtgacaagagtgagactccatctcaaaaaaaaaaaaaaaaaaaaagtgaatcaatgtggatagttggctttgttttttttttttttacacaaaaaccactctaagtggtttttgcagatatatttatagtcattgggaagctatgatttagatagtacaaataaatgcattttcccagtttggttttaacagaaaccccgcctctattttttggacctgtgttctgattggaatgtatgcatctgctaactgagacaggcactgttagtagtgaagtggtcacatatctaaattttgtgatcatctgggttttcttgtttaggaggaaaaatacttaatgataaactatttagaagacaaaaaggggctgggtgcgatagctcacgcctataatcccagcactctgggaggccaaggcaggtggatcacctgaggtcaggtgttcaagaccagcctgggcaacatggtgaaagcctgtctccaccaaaaaatacaaaaattagccaggcatggtggtgcacgcctgtagtcccagctactagggaggctgaggcaggagactcacttgaacccgagaagcagaggttgcagtgagccaagatcatgccactgcactccagcctgggtgacaaagcgagactccaccacaaaaaaaataaaaaataaaaaagacaaaaaaggggaaaccaaactaaaaccaattgggttaatagcagataaaaaagggtatgtagaaaagttttttctgatgtattattcaaggggttaagatcctccataattttacatcatgtatcttaaattaatgtccatggttaaggaaagttatgccattataaatcacattatttactttggcagtaagaatgttctaaaagtttttttgattctcctcctctgtaaactaaccccctcatataggaagagctgtgttcttcctagccctctcaccttacctctaaattcttacaaatgaacttccccaaagcagaaatactacatccaagtagccaaaatttgcttcattttgaggcactgagtgctacttttataccaaaccatctagctgtgtcttgagtcctttcctatgagacttggtgatctccaaacaacactttaataaacgcaaagcttccagtgcacattactcaaaagaattagtcagctggctgcaactaaacaacaggcctgatagactaaactgaaataaatactgctctcagataagctgcatctgttgtgtgagtatggttttaatcactgaagccaggaaagaaatgaaatctttcagaattcatactttcccacagttatagaaagaggagtaacaggaataagagtcaagagacaatctgagtttcaatttggccaccaaaactaacgtataaagcaaacatttatttaatttagtagggttgtgttttcttctattaatcagcaaatttgggtggggggagatacttactaggtcatctggaaggttttgttggtgcctgaaattctataaactgcagttttgttagtttttacatgtaactacttcaatataattgtggggtgtattttgtgaaagtcaaccccacctgtggatgagcaattctgtgggaagattgccaatgaagaatacagtgctatgaacaatgccactttcttgtggaattatgtaaaaattggcaacctagaaagtgtagctgatactgccagtgtaaaatttagatatatttgaaaaatattattgtcccactggaatatcagttatagtgtgcttattgtgaaacacacacacagacacacacacacacatatgtatatgacctggtggaatgggggggtgagttaaataatttaatttatttcatttttaataaacttaaaatcttgatgcattttcattgggcattacctatcttacccttctttttaggaagaaggcatacagttctagctgtatcccaaaacgtacctattcataaaggatttttttctctttgtcagttttacatgacaagagcctgtgacttctcagatatctctttgggaaatgggagaggactacttccagaacctttgaagttgttatgcaaatagggcattcataattctattagccggaactcttatctatcacttgaatgagtctcttagaaaagttgtgttggtaaggaattagccccagttgcttcacaagtaagtcagccagtgctatagcagcccaagagattttggctggcccctcttccagttttctctggctttaatcaaggaagttgctgttagatgctgcctttgcaatccaaagatatatagccatccacttggcacgaatcagttgggctcacttcataataatttctttgtcatcgtgaccaaattttatgaatcagttacttcagggacattgcacagatactggcttgggtatcctactaacacttggttgggggtgccaagtttgaatgacgtatgtgcgtttaataagctcctgcctgtttcttctcagataccgagacatgtgactatggctggcacaaattccaagggcagtgctacaaatactttgcccatcgacgcacatgggatgcagctgaacgggaatgccgtctgcagggtgcccatctcacaagcatcctgtctcacgaagaacaaatgtttgttaatcgtatgtaccaaatagatacgagtttccaggaacttcacttctcatcactctcttagttttgtctgtgtgcaagtgaaaagaagtagctttttcaatcataatacaacttatcaaatccctcatctgtgaattacttaaaatcatctcacctatgttaagtcccccatttggggaaacattcaactataatataggtaggcattggtttgtctgccagcagtaatagttgaaacacttgctgtaggttgaatcataagcagttgctatttgatcatttttaaatatacaaaaacagctatttcttatggctcaatagaattcttactatggttatactttcatagtctctattttgaatatttatatgcctgtctaaaattacagttgttttcagttatttttgtcctgctaattaaaattgaattgttaataatagcaccctaatcttaccttttgggcatattgattctcattcaagtttctaaatattttaaattgtggaaagtgagctacatcctaagaacttgaataggtggagattgaaagctaatgaaacttaatatcagagctgtttaataactccttcaactgcagcaaaaaggagggcaactagttttcatgtagcaatatgtagaaatttgttgctcataaagcattttcttaagaggtagtgtcttgccatgctgtccaggcttgacttgaactactggcctcaagtaatcctcccacctctgcttcccaaagtgctgggatcataggcgtgagccaccattcccagcctcatgaagcgttgtttgatgttctattaaatattttctcgtgatgcctactatcgtttagaagtttgttaatttgtaatctggatagaggttcatttaactttactgcgtgatatccttgccagtgactcacctcatggtaaaagtaaatatttttgaggataaatctgtagaactgtctaatctaggtgttcactaattaaaatgttttgaaaaaaaggaacaagtggcttccaaaatgagggtagcgtggataagatctggcacattttattgggtcactgaatttttgccaatggcatcgcttaaaaacaacaacaacaaaaaaatagaaaatttctatcataaaaaaaagaaaatttctatcatgagtgagggtgggaaaaaatttaattatagtaaattgctaggggaattattgtctatgtcttgatattttaatgcttcacagggtttgcacattaaccttttcatttaaagcacattgggcagaagaacaaaaggtagactaggagagatttttatgagcaactaaataaaaatccagccagtaaagaggatgcatgattcatgctgaaaataattttctttgatatattttcatccatatatggaaaagtagtacaaatatctgtgtggtttcctatcccttaggtgtgggccatgattatcagtggataggcctcaatgacaagatgtttgagcatgacttccgttggactgatggcagcacactggtaagatgcccttgaaaatgatgtcaagttctaccttctggaaatttggtactgtgcactgattgtgcattacagagggtgcattagactggaggcaagttaaatgacttgctcaaggtcactcagtgaaacagagaagggttagaagagttccaagctacctgatccaacatccagtcctctcttcaatagttgtggttctcttcaaaagaggagtgtaccagatttctatcaaaccagaaaaccagacaattagtagaattgccttgggtctgtctttcagatggttatctttgctttttctagcttcagagcaaaaagagaagaataaaatgtagcagaaaaagtcattttaaaaaaatacctttccgtcttaaataattcactggaaatccgctataaggcatgactcatttccaagcaaaaatatccatttatttttatcttaaagaagactgttgatatgatcttgtgaatttctgccaactaattacatatttcaacttgttttctattttttgaagaaagaagtgacttggaaatgctggccacaactttgagtagactgtaataggttcttagaacaggtgaagctgttttgagtcactcttactaaactcaaataaatctaatttttataaagagttcaaatatgattgtctatactagtggtactcagtgctggctgttcattagaatcacctggaatatgtaattaaaaactggtgcttaggccttatcccaggtccattacagcaaaacctctagccgctgtattttctcagtgttccacaggtaattcttaaacgcaaagttgggatccactgggctagatagtaagtgtaaattaaattctaaattagaaacaaagtgtaaaatattgaagataattttaaaggcctttttgtgtttttattacttaggtattcagtttcattcattatctgccacttgtttggattcaatgagtttggcaaaatataaaattcattcaaaaacagatgtcaaagtaatctctgcttttggaagttctgctctgtcttaagagaagctgctccatcatggacacactactcactttatctatgtgccagccactgtattaagcacttgcttatgtttattccccacaataacttttaagagaggcaatgggttttccttcacctgttttacaggtaaagaaagggaaggtcagttaggttgagctatttgcctggaatcacaaagctgttaactgatgaagccagaatttgaacttaggcttgtctccaaagccacagtttcttctgaccggtacctcctcggctttaaaaagagtgtatcccttgttacattttcgctttgagcaacccaaaataagacctgagtttctctctctgtcaccactgtttatgtttaatcagcactgtttcactgtttgtcattcaagttcttaagtaggttatttggcaagatgtgagaaaaatagggaaaaataggttgttcttaaaatatgttcccagtaagcaataggaaacacaaccttagaatcaataggctcatcttcttctattaataattgtcctggctggatgtattggatctgtatctgcaattgttgcctctttatgttttcattttgctgtacttagggggataatactggcctattagattaatagcgattggtatagcatgaatctttatattacattaattttaattgaagataattttgatcctattaatttaatttctaagtgaacatatgattcagagattgtttctatatattataagctgtttttataattttattaatgtatatcatacagtgaatgcatttaatgagttttccttgttaaatgtgtacttcattctcatggaatacattgggttttagggtgcccactattaagtctacctcccacgaatttcccttatttatagcccagtgaaaagtgcagggttttgtgagcccccatcatgtatacagaagctggcatgcccaggactcagctggccatttctatctagttactgcttatttgtgcctggcagatgcagcccatgacttatcccaaagtgtacctgttgtctgggttcctgtagattccagccctgagcctagaatagctgcatttggccaggtggagtgtacgaaaaatctttttttcctacacacttacctgactgaaccaagtcccatctatttctaatctgtcattggttacatagatttgatgtgtgtgtttttattcttagcatgtatgtgtgttactagatgtttattctggtctctcccttagcagttcacctcttcaaagaagtaattctttcccctgctttttatttctcgtggtgtctgaaataaagtgttatcctttattcctgtgtgcttggttaaagagacttcatattggcctatatctggcagctatgtggattctgtagagtatcttaggaaaattatcttccctgccaagtgccatacaggtgagcttgattcatcatatgtcattattcccctatgccaaagcaaggcaactcaactagtttttgtctgtgtccattaatttttaatgtaggtacacaaatactctgaaaaacataacagtgactatttccatagtctagaaaggtcctaaacgtggtaaattagtgagcatcgcaccttgtcaaaaaagaaatattgatttccctctgaaattttgctctgaaacttccagaggaagataacataagctaacatagataactgtacaacataaacaagaaccctactcttaattagttggcactttcacttgaaacgtaaggattatggagaatgcactgagggcctcagtttgaagaagacacatgatgaaatgtattaacaagcaaagtttatcaaagaaatgacacaagtaaatccagaaaaaactctgacagaccctcggtttcttcttaattcactctctgtgtaaaataaaagtgtgctaaggaatgtcccttaactttgaaaatactggaacagaacagaccatctgtcttagagccggtctccctcgcattcaactgatctcctgcccactttcttgcttttgtaaccaccctttcctctatccttttcctctctgaaacagcctaggtgtcccttaaactcgtttgtagttttttctacagtcaccatccccttaacgggttccatatgtgtgcaggcctttgaataaaatccttctgctttgtttcgctgtttactccaaggtttttgcttttgaaaatatccctaacagtaaagtcttggtcagggggatcagtatctgcttatacttggaatggtgttaacttgactgtgtgcagttttaaggactttgtttatgttttggagtgatttctctcctcttccacaccctctctatctccatttttttctttgaaagatttattagagcttctccgtcttgggtggtagaacagtattaaaacaaaaagaacctttcatatttaccttaaagtgtcttttgatatttagccttacaatccagtaagaagaaacaagtttatattaggtctcaatttcaatgatccattttactcaaataattaaactttgctttcaataaacttacagtataaatgtatcatatttaatgttatgctatacagctagactaattcaactagtatactaaattaatgatgttatttggctaagttatctaaattgcccttattcttgagattctgatggattcattccacattactggcctctataataggatgttgttatcattgatgaaatgccaaattctcatttctgttatatttttaaaatctattactttttttatttggggtgtttgcccaataaatttcacaaaagtgaattcatgaataaaattgtgcctagccttacccttgtgatttatattaagattatttcttttaatacatttcagtttttactttgtcacttggctttctcctaacctagttattctttaacttgactattgttaacttgacgattgttctctatagcaaaatgtgcctactgctttattggaaaccctaacaaataacttcactaatgaattgctttgcttgtcacccaagtaatatcttcaaagacactcagttaaaccatccaagttaaatatacattaaagctggcaaacttaaacaaacttttcttatctagcttatatactgttagctgactttaaagttctttcttaaaccaactgttaaatgaatgactagtcagagtgttttctttcagatctgttttccagtgctaatgacctttcccttccctggctatgaactcttgtcgctcccttaaaattcttcagtgtctgctcattgccttcagtataaaatgttaattattagtatggcagacaaaaccaatccactccgtctgccacttcctgagctatagcatctcaaaatactctcagctcctggaataagccatgggttctcactcctgggcggctttgcctgtactggccctagtgtttagcatattctcacgtcttatcctcatttcatctcacaaacagtcaaataccctgcatagccaagggtctccttccaggaagccttccttgctgggaatgactaagagctcctcttctgtgctcccacatcttttttgtcctccacccatcctaactcaggctcctgtgaaatcaacttcctgacactgagtcttctgagataggaattaactttcgtctctgttttttcagcaactagcagagtagttgacatagaacaggtatttaataaatatttgaatgaacaaatgatcatcagtatacacacattgctcagccaactctatcttttgaatcctgaaatgaacacattatgtctttcagctgaatctctttgtgacattttttgcctaaattaaagattttatttaaagttgtaccagtatgaaaaacatcaaaacataatagatgggttttacggtgaaaagaccaaaaaaaaaaaaagatattccttaaaaatagaagtatatagttgaacatactgcatcttataaatgtatcaacccaaaggaaaacaagtgtttttactagaaatgatgacaattttgtccatggttgtcctagaaacacctttgcaataaactttgggaattaaaaatggaaagtaaactttcaacctctgccacccctgcaggtttgagttatatcagggcaggttttccatgaaactttaagaaaccaacaattactcaaaactttggaggaggatttttttttccagataggcacatattccgtaggtatactttctgaagaaaaatgagttttagaaaccttattatttatatccaaaatggagtgaaacaaacaaaaggaaatatcactcccaaatattatcagctcattttactttttatagatgctttggctaagggtgatttggttgcataaggtgggatagggcttcatttgtaaatccactatctgaggctgtttattcaagtgcagaggaagccagacaggcagggaacgttatggaatcatttatatttatctgtcagtatacctcctggcaaaatgattttcacaacactgttttcaactaaagactatagtgtctatgggacagcccaattaaggagctatcagaaactcttacatgctttcatcatactgttctgtctgacaaacctctccaacaagtggtttaaaatcaaattgtggagctcagagatttaaagctgtcatattgcttccttctctcttggaccctctggagtaagattctcacgaggcgattctctgggctccacattgttcctttcttcaatgattccccccagcaccatcaaagctgacccttccccactggacactggtgtcttcagtggatcagacgcatttacttcaaagggaaccatcactttagatggccatgtatagaggccgaggactgaataaaactgacattgccattccatttttaaaatattggggagtttttggaatatttagtttgttctgcagaaaaagccctgactttattcctaaacattttaaaaaacattttctgcatctccttcactttttttacttctgtcatctctacattgtcaggactcaaatgtcacaccccgtgaggctgctggcttccctgcttcctgggaaattatcacagcttccttcttctcactttccattctacagttgggagaaaacagagagactttctctcttctacatttgtccaaatctggtcaggaagttctagaacaagttactaaatcacagattcataaatatcttattttctagctctaaccaactcatcttgctatgatagttgtgatataaactaaaaaaaaaactaattgataggacaattagtacaattaattgtacaattaaccttcattacttaaattcttcttaaaaatatttctggaagataactcaattttgcattttgtttttcattttggtaagcatagttcagctttggcaacttaatacctacaatttccaacacccacttgtcccccttcaccagttgattcgagttgatgcacaagaatgtccagatgtgtggatttgactttaaatccagaggctccttcttcttctttcataaataaacacatcagtctgtcaagcaaagtattgtgagaaaagccagctttgaaaaaggtagaaacaataaagaaatagcccttacccaggaagagacacttaaaaggggcagaaaaaatggagtaacaaatcacggaccataaaccattattgtttttctgcagcaatgtatcattattaccctttcataaacacaaaggttcttattccccttcctctcccagatgtcttggacattgaaaagagaatacggagtattcattaattccagtgctttctaagcttgttgtagatttctgctcatttgaaaggatttcacatgatttgacagaaaaacaatgcaaaacacaatccccacaacaaaaatttaagttttccttttcctacctgaagatcttagaagactttctatacaacatttgcagatggatgtatgtcagctgtgatgtggcattagctctaagtcaaataccatttctctgtgaacaagtcacactgcatatcaacattaatttaattatgttaaacttcacaggctttattgtattaatccaaaagccaaggaaaacatgctcttttctcattctttaacacattactcatgagtggaagaattctcagattcccttctgtgaaagactactgagttcttaatgaaaattttgacttgtgttgtagtttaatttgatttggaatcaagaactgattcttctgattctaaatgtgagatattatgagtcatagagtagttctagaacgcaactctgctctctgccttgtctttcagttcagatagctagtggtgggttgaacagctggaagaaccatatttactcactactggaaaatcattttataattgacaagattattataaagaataagaaaaggagatttagtgcagtagcatctcacagatgcttttccaacagtcttctgtgcaactttaaaatctcatgcagatatttaaatctaattgctaattagtttaaggcaatgcataaccatggaaaaggccaaaaaaaaaaaatatattgaatgagctttggcagtctctccttacatttggatcgtcagcccttcatgactggagacctgtgcaaataagcttggggtaaaggagcctactggcaccattcattctatggattaaatgcaagttgctctctgggcctctgcctgaggccccctctctcacagtggtctcacagtgcgagtaactcacatccttctgaaaatgctgttgataattgctgctttgtagggcagtgagctcacactattacacaagattagtgctgttctcaagagctggccagattgtctttcccgcacagaggtttgccagctaggaaaataatgggcatattgccactttaacaactatcaggagaccccaagttagtttttcttcccttcagcatattcatgtttgtaggatccaactccaggctgccagcatagggtagtgacaccaaaacaaacgtctctttctcctttaaaacaaagctgctcttttcttttcagttgtcggtcaacgaattaccctgttcaactaaaagacagcagcaaaaccataacctcccttaaaacataaataaagaaggacccagactagactaaccttaagcaagtacaaggatcagaagaaggtttatctttaccttgcagggaagtcatttgcccctaacaaacaagacaaagttaaatgcaccactccccctccagactgcaaacaaatgcctattgtgtacaccagccatctagggataaaaaagtcattttaaaggtaccaaatgttttgatttctgtaataagtagtcctcatagcctcttttcagataaccatttgacctgtgttctgaaaggctgaggctaaccccaagtggttattctgtttgttatttagtgaaaagatggtttcttatcggcatatgtttcaaacaggtacctgtcctcttgggaaagtgttttctgtttggaatttgctttcctacttcggtggttatctgcttgcccttggtatccagtgcgtttggattgaattttgtagctctgggagtacagcagtggcaatatgggccccaggtgatgaaaagagtttgcgcacaaagaagtcagctcttactgcaggtgtcatgttttcatagctaatctagataaatttttacggaaaaacaaactaactgtgactcacgctgcagacattgcatttgtgtgcttaggtgtttatctatgatctgacctctcctaaggattttaggtggatgttgcacatttggctttggttctgatgcaatttcaccattgatgtaaatcatcggataattttaaaagacagagtggaaaagaagaaactaccgtaggtgaacattttagacagaaagaaaattcagattatggatagaatggcttgcaacagaatagaatgcagtcaggttggtaaatactggttcaccgaggtctgtcttcttgcaaagtgttctctttgtgttttcactcacaaaactgagagaacatatcccagacaatcttttattttttatttttatttttttatttttgccacatggagtacataattacgattttgggggacatattccaagttctcttttgttaagtggtgtagccgttaattcataatgtaagaatggatatatatcaccacctagtggtcgtattgtattttgtgtttcaaaaccacattcacagaactacacccagatacacacaagaataatactatctgtaaatcaagttcctgtagttttgaatagtttcttaattctagtataaattgcatgatactgtgatcctgaaagttaaatgtgaaatgagaggatttttcaaatgcagcatgaagctaacacatgtagtcaaatacttagtaaaatcctagcaactaaggcaaatattaggacctatctgtcctgtgttttcactttatacacaatagtagaacgctggagaaagttttctttggctagtttccttgggaggtgaacagagagggcttttgcagggttttttagatgtttttttttttttcactgtgaactaaattagcaatgtttggaggaaaacagagtaagtgaagagcagtgactgaaccgttcaagagaaaaactcccaaattatagtttgaagttcagtaagttctcccaacaattaaaataatgtattgtgaatggcttgactacacacatgtcaagaatggtttttctcaaagggatgtgcttggcaaaattcataaaatctataaaacatcatctttaattggccatttaaggtaatctaaactatggcgaattttaaaaaacaaaaggtgactgcacctaagctgaaaaattatagataatatatggatagatagagagagagagttggaaagtaggcccttggcagttacagattcaagatttgccgccccagttatacatgagatcctgaaggtctgcagtatgaaaacatttgtactttttgctcaggcacaaatttgaactgtacccaatgactggctagtgtgtaaaaactctcagtgagctctcaagtctgtgtattggacagctcagttttcccatcacaagaagtaggttgctgtctactctgctgaccattttgtttgttctctactgtatttatggcaggaaattatctgctacacagatgtgtatgaatggaagcattaccaagtcttaggtcttaggcacttctttaatgccaagaagtattgtatgtgtaagggtgtgtgtgtgtgtgtgtgtgtgtgtgtgtgtgtgtatgtgtgagagagagacagagtctcaaatttatgactcacaaaaatatgaacttgaattttgtctagtgtctatgaaaattctgtctctttttatttatattgtatgatttagaagccagtagagaggaaaagaaatagaaagattctaaacagtgtctgactcttctagagaaccagtgctcattgattattctttgtagttatttgaccaagttagagaatctcagtgaaaatgacttgaaatgggttgagtattataaagaaaccctagttattgattaggttttgataagaacgattgctcttaaaacttcttagtcttttgctcatagatgaatttgcttctgtatgtgatgtgcagggatcagctgggacttgactgtgacagcagtaactgatactggatggtctggtttcctttcttcaactgaaagtagtactaaagatgaacccaagaaaactcattttttaacacaaggaaaaaaaaacctcctggtttatttctaagtcttatctatttctgaaaaactgcttttttttttcttttttttttgagacggtgtctcactcttgttgcccaggctggagtgcaatggcgtgatctttgctcactgcaacctccgcctcccgggttaagtgattctcctgcctcagccttccgaggaattacaggtgcctgccaccatgcctggccaattttttttatttttagtagagacaggatttcatcaccatgttggccaggctggtcttgaactcccgacctcaggtgatccaactgcctcagcctcccaaaatgctgggattgtagtcgtgagccaccacacctggccctgaaaaactgcttttttaacctttgcaaaaaggcagttatccatcactgcataaggaaaagggctattagtgtacattacatttttatcatcagtttgttttgttcatgcttgtgatgctagttatctgctgagattttaggtcattgatcatggccacctggtgtgtgttttaaatgataaaagatatctctgaatgacagttgggatttcctagacactatgtaatcagaaattcaccttgaacagtgtaaaccccatctgaatttggtagattgttggtaactttcaaaagcagagacctctccccacccaccatcatctttttttttcctggtatgttgactgaattaagttggagactttgcaaagaactgggaaggagagaaatagctctccaaccattctgagtgagaaaaatagtcaaatcactctgagatacatggaattgaggtcactctctgagggttaaggatgctggcatgcacagaagtcatgtgcactgcagaagacctgcaggatgagtcttctcttttgtgttattgtgagacagaaataaatttttgacaagtacagattatttggaacaaaataatcgaaacatttagagttcgatagacttcaatgaatagcttcagtctgctctgagttttcaccctgttaggaatggttcacaatgagttctctagtttgtgaagagaaacatacttattagctgttagattttgtccagggttttttgaatcattttattattttggcagctgatttgcttgaattcaattaggggaaaaagaaagaaaaacaataactgaaaagtgactgattccagcttaatcgaaatggtagccctttttggcatgttattacagacctggagaactagttatttaattggactctaaaaataaagcaattttatcatatattatccagcattaagcagttatatactagatataaaataattatctcttaataaaatgcaagaaaaatttacatctgagttggctttcctctacatcaactatttgcgtttttgtttgtttgtttgttttgagacggagtctcacctgaccccctaggctggagtgcaatggtgcgatcttggctcactgcaacctccacctcccaggttcaagtgattttcctgcctcagcctcccgagtagctgggattacaggtggctgccactacgtccggctaattttttgtatttttagtagagacggggtttcactatgttggccaggctggtctcgaactcctgacctcgtgatccacccgcctcagcctcccaaagtgctgggataacaggcatgagacactgcacccggcaactctttgatttttatgtcacaatttcctctgccatcagaagagagtgaaaatgcaaagtaattttagggttctctttcaggtgtagtagtgatctaattcttgtccctggggaggcaacaagcgtttgaggtgtgttgcatgaacttgagtccctgaggcacagacaaacatgcaggggaatgaccagcatttatttttccctaaggggttaaaatgaatttccccaacccatgctggcttctgggaataattcttagtttgcacattcagctctagaagagggttgatccaagatagatcgctcaggatgtttgctcataattcaaagtgaaaaataaagaaatccaaatgggaggtactgagtttttccctgctaattccaagaatctgtattcctgtatatatgagacaccatattgtgcaagaagatctattaccttcttataacttagaattgattccctgagaagggatttcttcttaacatttaactttagtgaaaagaaaagtacgttattgaagctaaagttaattttttttttatattttctccctacaagtaatgttaaataaggctgtaaagaattcagaaagacacaaaggaagttgttaagaaaactggagttttctttgctaagtcagtttggcaataacatgaagcaaaatcaaagcatcctagccaagataaatctgcacaatggaatgatcagatatgaggtaatagtgtgacatgcctgtgggtatcagacattcttgtaaaaaccacagagctaaaatttggtactgcaccattaaactacagctctgccaagcaacaacaggaacactcattttaagtcattgctgcaagccaaatgtaattctcacccaaaacaattaaatcttttaacagaggcctgaatctgggcagtttgagccccgagaatcactttagtggcatggagtccgaatctcatttcagtgtgaaaatgagatggttattgttcagatcaggaggaagtgtcagctgcaaaatatagggcagtcaagtgactttagtaacttgcggtgatatttgttaagattagatttaaaaagggttagttaagaaatttgtattttttgtgagaaatgcacatatcattttataaagttcatttttagcaattagaaaaataatgctcactctagagaacttggaaaatatcataagtaagaatatatagaataaaatattatctcagtctcatatcactcagacataaactctggaagattttattgcatttgcttttggtcttttatatacacagacacacacgcaaacacaaacacacacacatacatccatacacccagctgtatctgagagtatgagtaaaatttggatcattataatgtaataatttaacacttgttttactaccccccatttctttatttattcttcaaagaaaattttaaatggtgatataatattctatttgtctggctatatcataatttattgaacatatgtttactctataaattgttttccctttactgctaataaacgtagtatttcatataaaatgtcattcacatctgtgattattttttagtatagaattttagaagtggaattttggggtccaaaagcaagaactttttgaggctcctgatatgcattgccacctgttttccagaaaggttatttacttccactggctatgtctgtaattgtctgtctcacctatttgctagcagcaagcaggatctttgattaggtattggtgtgggttgggaagaatgaaacaccctctgtggttcattgtctctaaatatcaaaaactatttattaaacaacataagtatgtgccaaacatagtttctggcactgaggatacagtaatgagcaaaagaaaccaaagccctgtcctcaatgaatttacattctactaggagaaaaaaatgcaattaatgagtaaattatgtaggatggtagaatatgataaatgttatgaagaaaaagaaattaagaaagggagatgggacagtgtaggtagggacaaaaaatgagagagtaatgcacagtgtacacatagtattaggatgttggaaaattttccacctttgaggacattactggtttcctgtaagagactagttggaaagtaagctagaaaatattgagctcctaaatccaaatttaatatttggcgaactctggaatctttgaccatagagagtaccaaatatagatttttgttagttttaatggattcttattctttggtttttaatttttatcctactttaactcattcattacaaacaacttagttctgtatcagcaacaggcagaacatgacatatctctgaaatgttgattatctattaaaggagagtatcaaaaatgtaaaaaggaggcttggcgagtggagggtgagggatgataagggaaatgagcaaagaaaaaaaaagggaaataattagaaacccagtgcagagccaatgtgagttcctggttgcagggagacctaccagtcaaggagtacttcagtgagtgtggtcccttgagcatcttttccaggccatttggagagtaacacagtggggccatttaggctacgagttggatttaaatttgcctcacttctggattaggtttttcccccgagaaataaaaccacccttcatgctgtattttgacaaaaaaacaacttccttaagggtctcttggttttttgcaagtttatcactcttcaaacagtcttttttacatagcagtgatctcttgtctcatatcttaattttggcaggattgaggaggactttaaagtaaagctaaaagactgaaacaaaagtaggttttcaaactttagatcttttcacaaattattttatgaaagatctaaattttttttaccatatttaaaagttttgaaaaccactttttctgagaagaaaaattacagacatcctctagtatattaattatactctttttgtttgtaaactagagcttattggtatacaaatccaatttcataggtaggagaataccttttaagttttttattgtgccaagtattagagatataaaacacagaagaaacatttggtattgaaaacactgcagatagctaagtatagtactttggtaaatacagtaaaatggatcagacatatattttaaaagacttaaaaatagtgatagtactgttgggagtaagtaggtagtagagtaattggaccttccctttttttttttttttaatttttgcattcactgatgctctgaattgaaaacaattgccttaaatcttatatacactttattctctttctctttgccaaataaattcacttaactcattgtctcaaaccataaacttattttaaacttaattcaaggaaagactaacagatctgtaggcccagaaaagacagtcatattagccattgtcacataaatctaaatctgtatttctagcatattttggaagtttgtcaccactaatgttgtcatactagacatgataaagcatgagagtagccaaagcatggtgggaaagtgatgctcaaattgacccagaaaggcgctgaacaaacaaacttgtctcataccacattctagttaagaggactcaagactaggaaactggtctcttatttataggccaatattattttcatcttatcaaagtttgttattcttgaataggcacagcgactatgttttttacataattattgttgccaggaaggcaatattttaagtaacaaagaaatgaacctaaaccggagagttctgggtgcataacatctctaaggtccaaataattccctattatgctgcattgttgtaagagacaatgcatatcaagtacctagaaaagggcttcatctattatagatgctaaataaatgacacatatgatggaaggcaaaagatattttcaattgtatattattgctcagagtaggatatatatatatacgtgtatatataaaggtaaccagcagagaaatgtcaaacccataaagtccttttcaatgatctcaacatacattacacacaaaaaaaatctgtaataagatatacttttgaaggtgtattttttatatcaatatgcataaatgtcataaatgtttctactaaaaagaaaacatttcatattaaatcataaagcacaactcaactgtatggtgcaaataagaatcacatctaaaacaaactagctttgaaaggttgtatataaaatgattagcataggtatgtcagataaatacaaaagataaatattgcaactatctcaacttttttaaccaaatagatgaatttgggtgaaaagcaattacaataaatgagacaaagttactttatagtagtacagataagacaagacaggctgaaaattcgattgaggtatcatcacaattatataaatttatatgtgcacataagaggtagaagaaaacaatgattagagtgatgagattattttttctctagttctacttccattaattttattgaattaataatatgatgaaattcctaaattgaaggttgatgatatatttagaaatctagaataactaggccaaaatttgtccatgatatctcattgccaaatagtagacattcgttcaataaagactttgagacacatatattttctactcacagtttaacagtctttttctgtaccaccaaaataatttcagctatatgaaacaacagaaattgttgagtctattccaattagattgtgatataataccgtcgttgctcttacgttactttttgactagcaagtagttaccttctccctccatttttacagcaatacgagaattggagacccaaccagccagacagcttcttttctgctggagaagactgtgttgtaatcatttggcatgagaatggccagtggaatgatgttccctgcaattaccatctcacctatacgtgcaagaaaggaacaggtaatgatcaccctgttaataatgtgtacttaatcttcatttcaattataaagataattcaggaatttgtgtctcaaattcattgtttgagacacaaactggatatgtccatgtatgtcatctctcgttgctctggaatatttcactcttccaaaacaattgaaaagtttgttttcaacaatgttctcaccttagatttcaggtccttaagataacaatgtgacattaacgtaggaatgctgcctggtaatatctttaagaagaacaactgccagtccaaaggccaatagacctttttatttttatttatttatttatttatttatttatttatttatttattattattattgttttttgagatggagtctcgctctgtcaccaggctggactacagtggtgtgatcttggctcacggcaacctccgcctctgggttcaagcaattctcctgcctcagcctcccaagtagctgggactacaggcgtgcaccatcacacccagctaatttttgtatttttagtagagatggggtttcaccgtgttagccaggatggtctcaatctcttgaccttgtaatctgccagcctcagcctcccaaagtgctgggattacaggcttgagccaccgctcctgaccgacttctttttttattttgatgagaacattacaaaataaaatagttgtcaacagttaaaaattaggctatattttttaaatctggattttcagcttttttaagaaataagaagacctggtaccatgtggcccatattcagatttgtcggtggtttgaagtactagagctgagaaccactgccctcccttggttggggctgcaatctccatttattgcagtcctcattgagtccttcctttgttttatgtgagtccgtgtcccaatcctgaaagacacaatcccaaatgccataatcctaaatgttgaaatctcaaaggattaaaatcccaaaaatagaattctggaaaaaaacaaattttaaagacatttatttacattttaaaatgatgatttattagagaaacatataaaaacatgacagcgtgcttcataagccactttagacaataaaataaatagacaataaaaacatacatatattttcaagcataagcactcaggtatactaatggcagttggggaaaaaccaaaatgtatgaatgcacatcactctggttgtaattgtgtgcaccagctttataacggtggtcatctgaaataccatgatgaacaacataaatcttttcacaagattgatgaagaactgagatgggttaccaccgcatattcagtcactcaaagagctgagatcttgagaaattttatctttcataaatggagatgtataaaagaacatctcttcatttattgaggaagtttcaatatttttatattgagaaccaaggaagctgaagccagtactgtaactctcagtctgagaccgaaagcctcaagacctggggggcctctggtgtgtaagtcctggaatccaaaggctagtgagcctggagttctgatgtccatggtggcagaagtctgtcccagctctcagagaaagaccagcttgccttctgtatctgttctctctgggcccctggctgattggatggtgcccatcaacaatgagggcagatcttccccacctcatccactcacgctgacacattaatcttctctagaaacactctgagacgtgccccaaataatgctctattaggtttctaggtattccttaatccagtcatgttgacacctaaaattaagtctacaggtctaccccttgcaacttggcacccatatgcatgtttttaaaccgtatttaaatttccaaataaagacaataacaaggtaatataataatttctcctgacatgatataactatcctgcatacaaccaaaaatgcactaatcccttccctagaatttggctttcaggatttcaacatttgggattttaatatttcagaattatgattttggggactttagatgttagggattttaacctctagggattttggtctttaggaatttcaaaatttgggattatgacttttgagattatgtcttttgggattataattgtcaccggtttttgccaactgcctggtctctgtaggcatttgagctttttaaccattcccttagaagtttattttatgcttataaactatggatcacaaatgccatccttatatctgtagttgaatatttacaagatataataaaataagaacatgtgtaatataaattttatgagaattgtttagttaacattaaacaagaaatattttaaaagcgaattttttaaaaggtgtgtttatcattggccaatttctaaagcacgctgtacagactttttccctaaacaaatagaaattctgtaaaatattttaacctatttgcaattaataatggtgttatcacatgaatatttaatccctagacccagacttttacccatctcaaataagagtacgaagtacacatgtaaaatataaacctatttgattaatttgtctttgaatacaaaaataataaaactaaaaaccatactctataaatattttaggaaagatttaaaccccaataatgagaaattctattagaagaaagagaacactaacatacatcaagcccgagtctcatatgaaagtcagctgttagcaataagtacgttagtctgctgttttctcacccaaggtagaatgtattctcaataccttttctacatgagaagctttcctgaccatgtcccttacttcagcacctctgcgatgagatttgtaaaactagcaaatcaagtattttctatttttctttttccggtgtaggaatctttactaaattattcgtctctatccaaatgtcatgtttgccctcttatgtctccaatggtccctggagtcatacttttcattttatgatttaaacattcttacatttcctattttattttctcctatagcagggtttctcaacagcagagctattgacatttttggtcagataattctttattttgagaggctatcctgtgcattaaagcatgtttagcataatccctgccctttgtatactacatgtcagtagcacctttacatcctttctgcattgtaaaaagcaaacatgtctctagacattgccatatgtctccagaagaggcaaactgtcccacgttgagaaccactgccctataccaaaaaagattcacaaaaacaccatgattgtttacatttcccaatggataacaagttttataaaatactggttctacctcattaaagaagaagaaggaaaaaaaccctatttttgcattttatctcccctactcgctgatttttatatttgtgcagtcaattctttactaatcagaactctggggaagtttttaaatgtttataggcttttaaaaaagatacccttttctctttttagatattttaaacctacagacctaagtagttttccttttaattaactattacatacttgtaacgatttataatatatacaaaaggcatattttttaaaagaacacctcaatgcatactgcccatgtatctgtggagtatcctgtgggttcctctcaatcctatctatttacttctcaactcccaccagagataatgacttaattcccttgcttttcccttttctattatgatatacacttgtttcactaaacaataaattatttagtgttgtacatttttgaactttaaataagtgggatcatactgtatatattctgtgctttgctcttttttttgttcagcattatgtttgtgagatttattcatgttgatgcatgtaatggcatgttctttgtttttgtttctgtattgtatttcttgtataactatacaacattttacttatcaattctcctgtcagtggacgcttgagtcatattcggtgtttttgcttttataaacaatgtttctatgagcattcttgaacttgttcttggtcaacttttgtgagtttctgtaggatatatttccaggagtgaagttgctgagtcataggatatatgtaccataaaatctactttaaaaagccaaatttttttccaaagtggtggtaccaattttcactcccaccaacaatctgtgatagatcctgttgctctacatcttctccaacatttggcactattggactttgaaatttttgccaatctggtgggtataaaatgtaatctcttgtgacttaattcacattttttgatacgtctctctgaatatcttttcatatatttatcaatcacttgaagctctgcttttgtaaagtttctgttcatatcttttggttatttttgaaaattgtttacttataatcttatacatactaatttgtaggagttctttttatattctggttactaatcccttgacaattttatatgttgcaaatatcttctcccagtttgttgcttgacttcacccttaccttatgatattttctgatgaacagaatccttaattttatttattttttttcctttatgatctaatcttttttgtgttttaagaaatctttacctactgataacctacaggtcacattggcaggcttccaaattaatccgcctgggggaggtcttatgattcatggcttacatcctgtccctgagtaaacaattttatcgtgagttcctcaaatcttatcatgaattccttaaactgttgacatactgattaatatgtagcctactgacagtggaaaaacactgatttgtttctgaatcctgaagttttactgattgttttgcacatagagcattttagcttgtattttgtaaatcgtagccaatgattataacctctgtattgtaccctccaatgaaaatcacaactcgggtctgaggagttgccctcccttctgaacttccccataaaaaccttccaacttgtagcagattctggaatatgcccaaatttgtggtgtgtcttcccaggtagatcctggcatttggcttccaataagcctttatcaaattatttctgcctcaacagccttaattttggttgacactatcctgaagtcataaagatattctatagtttctaaatgttttatagttttgcctcttatatttatatatttcaaccatctagaattgatttttaatgtcttttctgaagtatggaaccaagtttattatttctgtatgaatacacaagtgttcaaatgaaaagactacactttccctctgctctgccatgttgcctctttcaaatatcaagcatatgtgtgtaaatctctttctggtctattttcctgtccttgccaataccacactcactgaattattatagctttttaataagtcttcatatttagttttagaagaaatctatacaattatttcctcaaaattataaaaatgagttcaaatttgttagcatagcaccaaatcaagtacattgaattattgaattgatcatttttaaccttccctatcactttggtcttattccatctgatacttgctattgtctggaccctagtataggctttccatattgcaataaaagaagtgtgcaccatggaatacgatgcagccataaaaaggaatgagatcatgtcccttgcaggaacatggatggagctggaggtcatcatccttagcaaactaacacaggaacagaaaaccaaatactgcgtattttcacttataagtgagagctaaacactgagaacataaggacacaaagaggggaaaaacagacactggggcctacttgagggtggaggatgggaggagggagaagattagaaaaataactgttgggtattaggcttagtacctgggtgacaaaataatctgtaaaacaaacccctgtgacatgagtttagctatataacaagcctacacatttacccctgaacttaaaagttaaaaaaaaaagtgtgcaggtatccagattgaggtcaagcagaagtaaattagaagaaccaaacatttaaattaaaccaaaatttgtcattgcagaaggatatggttgtaaacagtcctctgaatatgtaataaatttaataattgtaaacttttaatattaggatgttgacattcaaatatttggtaccaaggtttctggtaatcattttcccactgaatatttgcaatatttcatgagagaatgtggcatgtttttgtgggcctgtggtgtaagaattcttaagcaatagaaatttccacttagggaaaattatatttaagttacatttgtattaaagatatataggtaaatataataatttaatcaaagttcatttttttaaagcatatcatttaaaataagtgtgctaatgttgaataaaactatgttaacacaaattcaattaaatcaattttccaagcttttggatttttttaaaattcaaaattacaaaatttttcattgtaaatttaaaatgatggttaagaattccaagctttaccctcatttgcctgtctcaggagttttaatttatattcattaaggtatttatgaaactcaggcatgaatattatggtctctttttcttgtctcaatacagaagacaaaaaagagcaaataaatataaatggaaccaaaagatatttgtatttaggagactttgtccatatttcaaaactatgatgttattgtagattgtaaggttttttgtttgtttgtttgtttgtttgttttgttttgttttgttttgtttttgagacacagtcttgctctgtcacgaggctggagtgcagtggtgcaatctcggctcactgcaacctccgcctcccaggttcaagtgattctcctgcctaagcctcccgagtagctgggactacaggtgcccaccaccatgcctggctaattttttgtatttttagtagaaacagggtttcaccatgttggccaggatggtcttaatctcttgatctcgtgatccaccccgcttggcctcccaaagtgctgggattacaggcataagccactgtgcctggcctgtagattgtacgtttttataaggaggtaatagtaatagttaaattcattattgtcccaagtgaaggtaattaagaaataaaaacttagggacggtgatgaagacagtatgctttttaatttggaaattttgtcagaatagtggcccttccagaggggtagatgaatgtatgaccatttagtcctatggttgttttaataaaacaaatttcaagatggcataatctgagattcaaagtaggcccagagcctcaacattacattttctttttgaaaaatttcatattcttaattctaaaagattgcctttgatgaagttgcttactttggtaccataaagaaagagagaaaaataagagactcatattagttgaaatacttagattatttggaaataacccaatttgctttcctttagtcgcttgcggccagccccctgttgtagaaaatgccaagacctttggaaagatgaaacctcgttatgaaatcaactccctgattagataccactgcaaagatggtttcattcaacgtcaccttccaactatccggtgcttaggaaatggaagatgggctatacctaaaattacctgcatgaaccgtaagtggtcctttagaaagaatggactaccgtgctataacaactactagacaccttcattttacggctgtggtatcggcagtttagggtatggagcaagtaatattgtgtgttttctttttttctttctttccttccatgtagcatctgcataccaaaggacttattctatgaaatactttaaaaattcctcatcagcaaaggacaattcaataaatacatccaaacatgatcatcgttggagccggaggtggcaggagtcgaggcgctgatccctaaaatggcgaacatgtgttttcatcatttcagccaaagtcctaacttcctgtgcctttcctatcacctcgagaagtaattatcagttggtttggatttttggaccaccgttcagtcattttgggttgccgtgctcccaaaacattttaaatgaaagtattggcattcaaaaagacagcagacaaaatgaaagaaaatgagagcagaaagtaagcatttccagcctatctaatttctttagttttctatttgcctccagtgcagtccatttcctaatgtataccagcctactgtactatttaaaatgctcaatttcagcaccgatggccatgtaaataagatgatttaatgttgattttaatcctgtatataaaataaaaagtcacaatgagtttgggcatatttaatgatgattatggagccttagaggtctttaatcattggttcggctgcttttatgtagtttaggctggaaatggtttcacttgctctttgactgtcagcaagactgaagatggcttttcctggacagctagaaaacacaaaatcttgtaggtcattgcacctatctcagccataggtgcagtttgcttctacatgatgctaaaggctgcgaatgggatcctgatggaactaaggactccaatgtcgaactcttctttgctgcattcctttttcttcacttacaagaaaggcctgaatggaggacttttctgtaaccaggaacattttttaggggtcaaagtgctaataattaactcaaccaggtctactttttaatggctttcataacactaactcataaggttaccgatcaatgcatttcatacggatatagacctagggctctggagggtgggggattgttaaaacacatgcaaaaaaaaaaaaaaaaaaaaaaaaagaaattttgtatatataaccattttaatcttttataaagttttgaatgttcatgtatgaatgctgcagctgtgaagcatacataaataaatgaagtaagccatactgatttaatttattggatgttattttccctaagacctgaaaatgaacatagtatgctagttatttttcagtgttagccttttactttcctcacacaatttggaatcatataatataggtactttgtccctgattaaataatgtgacggatagaatgcatcaagtgtttattatgaaaagagtggaaaagtatatagcttttagcaaaaggtgtttgcccattctaagaaatgagcgaatatatagaaatagtgtgggcatttcttcctgttaggtggagtgtatgtgttgacatttctccccatctcttcccactctgttttctccccattatttgaataaagtgactgctgaagatgactttgaatccttatccacttaatttaatgtttaaagaaaaacctgtaatggaaagtaagactccttccctaatttcagtttagagcaacttgaagaagagtagacaaaaaataaaatgcacatagaaaaagagaaaaagggcacaaagggattggcccaatattgattctttttttataaaacctcctttggcttagaaggaatgactctagctacaataatacacagtatgtttaagcaggttcccttggttgttgcattaaatgtaatccacctttaggtattttagagcacagaacaacactgtgttgatctagtaggtttctatttttcctttctctttacaatgcacataatactttcctgtatttatatcataacgtgtatagtgtaaaatgtgaatgactttttttgtgaatgaaaatctaaaatctttgtaactttttatatctgcttttgtttcaccaaagaaacctaaaatccttcttttactacac

SEQ ID NO: 31 - DNA, 182360 bp, Homo sapiens
accatttaccaaaggatgcctctagagcaggaagctttgagaagacctggggagcctggaacttctaagtctaaacaaggaactgactcagcagggtctggctatcttcagagtctgaggagaggcgcatcaaaggaatgacagcctggtacctttgatgaaggaactgacaggaaattaacagcctcgtgcaggcaaggacaaagacaagaaaaggcccatttgggcctcatatctctctggattggaacccgcaggaagcagaaggggctgtttaatcctggctccagagcaaccgtgaaggctggcttcctcccttgaagaagaacaaggtgaaggaaaggtgaggcaagttaagataaacacccaaacttctggctggctggctgaactgaatctttcgatttaagctgtcagtgggttcttttttttttttttttctattcttttacttttttaaatctaaactgtaatcacacaatactccacccaagtgcttgataaggatttctaagacagatcctaacacagtcataaaaaaatcccctctgaaatgtgcactttgtactgtgtctatgagtaggtgtgtttaaaatgtcacgaactggaatgcctaactctagttcccaggaattaatcacttagaagagtgaaaggggggaattaactttctttaaaacttataaggttctccaaagcagcagccaaaatagaacttgctgaatagaaatatggttatctttccataagaactaaaaatctttttttaacatatttttctctgaaactgctttgccaagtttcctcttgtggattagctgcaggtcacagatattctgggaataaagatatgaaaggatttttttttctttcttggttacaattcaatgattttagtaaatttatagatttgtgcaatcatcacaactatctagttttagagcattttgattgcccaacagaattccctcaagttctatttgcagtcaattcctgttcaaatcctcagccctgggcaaccacggctttatgtttctataagtttgcctttccagttcatataaatggccatttcatataaatgaaaatcatacaatatgttgtttttcatttggctttcagcatatgtttttgaagttcattcgtgatgtagcaaacatcagtatttcttccccttttattgctgaacaatattccatggtatggatacaccctgttttctttatctactcaccagctgatgggtatttatgttgtttcttttgtttatctgctcaccagttgatgggtatttgtgttgtttccagattttggctattataaataaggctgctatgaacattctggtgtgtgtttttgtgtgaacatgtttcctgttctcttgagtagaatcctaacttgctgggttgtgcaaagggttattgactgctgctatacactaggttccatctgattcaggtgtgtagtgtcagtggaaacttatcaagcagtttttaacttactttttaaaatcggctgatgcacccattactaaagggatggtctataaaaacaactgttgtgattcgataaatgctgaacagagaggagaggtcaaagtccagctaatgtcagctgacatgtggccaggttcatctttggacacgcttccaaaagggagtttatgaaacttgcttcatggatcaagagatgtcctaatcattacagatcccgggcatctttgtataatatatgtatgatcagattgatcgtgacttcacactccctctaggaccacgtggaagggttgagaaaatccaggcaatagtttgtagccaaacaagagcaaaactcgagtacctctgagggaaagccggaccccttgtccatcctctcctgtgtaagtaacttcatttataagctgaaatgacgccaccagatcatcctattaccatcaccatgcctcattagagtggggactttcggcggtggcttgggaagtacccaaagttttaggggttacagcagaggccaaaaaggcagacagaggaagcagggtagagctctgaaaaggttcagggccagggacccacagggggaggcaggagtggcaggcaccacgatctgctctctggcgctctacaggaaagcaccgggagtcaatgtcctcgcgcgtcccttgcgcagagtgtggtgcgaggttggggggttactggagacccagggggctatcaccttggacacctatggtggggggaaggctgaggagtaagataaccgggcagctggaaacttacagctcttcccccgcagtggaggaatgaggagttcaaaggccacgtccacacagagggtgacagaggcatcctctccgcgcaggacgcggactgggggcaggcacgcagcgccacccggatcctggagtcgtcaagaaaaacgcgggcgcgcaggccgaagagggtaggtcccggggcagcctcgccggcacccgcccccgcgggcgtctccccaagccgtgtggaaacccgggcggctgcgggcgctcgggacccgcgggctggtgaccaggagctggagggcagggctcggccgctcttgccttagccccgcactggggttccttccccatgcgctcaggatcccaagctttctcttccgttttcggcctctttttccgttaactcctgggcccgtctcctcccctctagccctttcaaactgcttggctgtggcgcccagctttccctccgcagcctccttccccgtctttttcgcgggtccatctcttctcctttcccagcctcatccccgtccccctaggcggttcctttttagccttcacccactggcgtctccaccttcctccgcctcctctcttgcctccacctcccaccctgcaaacttgttcaagccaggggtccccacacaggcatggttgttccctgctgggtgtgcggatccccacgccgttcccggtaccgcgagcgccccgcccagtccttggcgtgattcctaagccccggccctgccagccctttctcccggcgactcggggagggagggcaggaagcaggcccggggaaccctcacggtagcgagtcgtcagtgaggggaacagcggaggaaggagctaggactccggcgctgcgccccattaggccctttctcccgtagaaacgcacactccaccgggccctggcgggtctgtagcgagggagtggcaacaagtgacactaccggcgggggccactgatacctggctggggtaggggccaaggcaccctcccaaaagctggagcgaggccgaccccggcgaagcgctccccgcgcacccctctccgaggcgttgcgtggggggcactagacgagaggagagctgagagagaacggagactgggctcttcccaagtcctaagtctccctccccgcccgacttcaccaccagagccaccagaagagtttgcaagggatgggagattgagaggggtgggggctgggcaggagccgccaacgttgagggatttttggaaggtggggtggtggagtgagaaagaatagaacgcgctcccgaattcccaattgcttccctcacttggacgataccttcccccaaccaccatcccggcccgccaggcgagagcccagcctggccagctggagcggatttgggggaaggaggaaaatgggggctcccaacccctctccagcttccctccgccgccctccctgattggctgtgcgtccctggagcccaacttcagtcgctccagactccatctgagccctgagggagtcggagcgccgcgccacggggcgggaggggcggccacgaatccaggggttagcatctctgggcccctggggggaggggcgcggacggggtcggcccccgcagcctctgcgaggcccatctcgctgcctctcgcagcctcggcttctctcagcccccgccctttccttccctcacagcggcagcctccctcctcccgccccccccgccccgcacccgcctgcccgcccgccacctccccccggtttctcattcctgccactagcgcgctcggcggctcattccgcggccgccgccagctgaggggagcgtcgcgggccgaggagcagatgccgcgggggccgctcgcagccgccgctgacttgtgaatgggaccgggactggggccgggactgacaccgcagcgcttgccctgcgccagggactggcggctcggaggttgcgtccaccctcaagggccccaggtgaggtgcgccgccagtcccttcctctcgcctggttggggcttcttggaatggggggcaggattttctcaggaagagaatgtcttggcggggcggggtggtgagggggacggtggtatctgagtcgagaaggcttcactaacgcaaagcaaaagggagggagagatttgtttaaaaatcagaaagggagaagggagccagctgtgggcgcgggcaaagcaggggacggaggcttcagatgtgcgctccacgactctccctggctccggcctcctgtggggtctgcgccgaggccacagcagagggggtttgtacctggctggggcaagagactgcagagcagacctccggacacgccgactgtccccggtcatatctctggggaaagtcgcccacggcgcggtgcccgccagccctgcgccgcttccccaaagcggcgacatgaccgcgctctgcggggttcttactccatcctcccggatccctgccgaaagctccccggggcttagtccctgcagtcgagactgccgggtaagcccgggaaaacggaaagaccccagctccggaaggagattgcccgcactttaatagcgtgggtttggggccgccgactgtggttctggggcagcaggctgcggtgcgctacagccctccagcccgagtctctgcgggagctctggcgcccgtttgtaagctcccaccagcgcaggagtaggtccatgagcggcccagactcgggctcgcctctggcttgggattggcgaaagctgccagggtcaacgttaactttgagaaccacaccttcccgaaacctgcgccgcttctcggagcgcgccaagcctctctagctcccggcacgcacggcctccctccctgcgctctgccccggaacgcgagccgggaggtgggaagcactgagaagctggccagatggggaggacggcgaggagagctcccttctcccccctccccaacccagaggaactgtaggagggcccgcctcacgctgtgaagcggagtccccagagaaagtggggtcgggggaggcttgcgggtccggcttccttgtccgtttttttgccgaggccctgctttcgcccggggctcgccgcgcctgcctctcccgggtgaaaggttttctaggtgctagaagaagccctgttgcttttgctgataatgcagtaggaatttcatgggccatcacactgctattaagaaatcgcatcttttaattatttaataccatccctgcctgacgacgggttatccctaagggatgggagtggggggttgttcttgaaacccggctgtatgagggtatagatttcactaaagtcttcccccttcgtctccccctaaagaaatcgtgctacgatcgctctgaaatcttttcttattttcttcttctaatcatggctatcggtttaatatgaggcagtaagttttcgttttaatcacagggaggctaccataattaatctggctagaggacggatcaatttcctcatcacttgggcttgcagcagacgtcgatggttttgcggggtgtctggatttcctggggatggggatgcagatgtgttctcaggagcgaggatcctgtagcatcgcatgagcacatttgccaggctgggctctgagcgctagagcctaatatgttggcagagaagagaagggactgaccttcttttcgttaatcctggaattgtttttcctacaaatacgtaggtgcagacaccagaacagaaatattaactgcccaaccctagctgcagggagcctggtcttcttccaataggacaaaggaaaaaaagttacaaaacaaagggacagagttgtggccaatacgagaagcactctgaggctccagctactgaagttccttaaatgtaatctctgattccaagttttagagttggccagtgggctctggaattcgaacctctgtgaaaaactgaaatccagcctagtacaaaaggaatgtgagtgcttttcagtagagaccagggaaaggcatctgaaaggccaggaaactttgcttgagtaaggattatctttacatcttacttttgaaacattgtaaattaagacattaaaatgtcttgcaggcatgcactattattaataaaaattattactatcattttagttgttacttcagagtctgcataaactgggcattttatgacattgtttgaaagaataaaccaccctcctcacccctgggaaagggggaatgaaggcaggccttggaaggattgagactggataatctggcgagccccagacatgtagatttattcaaatggctgcttattgctgcctaggaaaataagcttttaaaatagttctaactgaagcagtggaccatcttgatagcacttcagaactttcattacgttcagcattcttatcagaacaccagacagtaaaattactagaaacctaaattctattttcaattaagatgcaatcttttgttaatttgaaaatttaaaaaaaatagttatggcgcaattttttttatgtcttagaactcatgttccctctgtagagtggtggctgtggatgtgcatgtttgattgtttatttgtgggaggagggggcaggggacagacttggagagccacgccatgatttgggggaatacggatcaatttcatgctcttttaatgcacttgtcttcataattcatggtttttcttctcctttgaatagaattacatggctgctttgtaaagattctggtttggggaccctcatatgggaaacgccatgacattgacctcgtggtctgatttacaatgccagtactgcgctcccaggagcatagcatgtcctggaaccttgcctgtgaatgcctgtgacttatgaagtggtaacttatgaagttggtaaactttgatctcttatattcaaatctgttttcagaaccatctaaacaagatcttcaaatctgattttagtcttccttcattctcaatacatgtatgtaggtagatgttggagaaacataacaatttcattggaatttactttcaatattgatgttttcactttgatgacaggcatacttactcattcaataataataaaacagtggaatatatagagtttgaaagtaggtatcaaactttttttcttgaattgtcaaatttgaagaatgactatgaactttcaagtttttttttcctagaaaatttgagcactgtataaattcactagccaatgatttaagggattgaaatgtgtttgggatgattttctcccttatggaattggctgctgtttcataaaaagttacctaatttgtcaagaatccctattctgcacttaccaagaattgtgagttttcagcctttttaatttaaagttattgcctctgaaatatataaaagtagttggtctatataaatttgtgatttaattgattagggggaaaaacatcaacaggtctgctaaagaaaaagaaaaataaagttggagaaaattggacacatcctggtgcactggtaggagttaaaaatgagctgttccatcaggattcctgtgatagccatccgcagcctcccctatgagcaggaaggactaaagaaaacactcgaggagcataattagacatctttctgctataattttaccctgacattgagagccttgtacaactctggaaatggactccttcgcggaagattgcacttctggccactagagggcaatggcacccttctccaactgtctgcatggagcccatctgcttttgagggcatcatgaaaagcggttttgttacttacaagccttgtctggccctctcaggagagaccgaattcaatctagctgtggttcaagctactgctcgagcagttggtcaggattagcatctctctagtgggtggatcctgttaccttcagcatcttcttcccaccttggagtttactagaaagttgggaaatcctgtaacttgacattgagcagcagccggggtgggggctgggctgcaggataaacaaggtcagctctcactgagacagtgatctgggaggattttctggatttttttctggcaaaaagagcatcatttctgactccaagtggaagggaatggataaagaagaaaaatatcagtgagactaccgtgacaccattgcccgttctttcatgaggttttgaagatgtctgcaagacacttctaatttgcaaaaaggaatagcagtttgatcttcggtaaacactttggggcatggaattttaatatagcagtaaatgttttactgtttcttttaaaccattcttgatattgttgtgaaaaacctaactttagcagagagtaaaatttaattcaagattgttcctcgtgcactggagtataatcatttgattttttttcttctcagcgatatggaaattatggcttatgattaaattgcatattccaggctacacaaatttatatttgctcctgtttgatagtgtcatgaaagttcaggaggagaatgcaaaaagaaactaatgctatattataattaagaggaaaactccattaaagaaataagtactgttttaagtggctacttatttgtgttttttgtcttaagtgagtacagttgcctccctggtgattcagcaatgaagttctttgcagctctgagctgtgttggaatgcgtagacagttgatgaagaaggaatcaatgcaaatggattatgggagggagtattaagtaactcagtggaaagtaagacaaagtgttttgtaaactgacgttcacttaccattggacagtttatttaactttaaaaggggcaattttaaattctaagctcttgtgaataatgcacattgtttgaactggaggcaaaatttcattgttatttggtttaattagtcatgagacggttgcagagttcagggattcttattgagacaaagcatttctctcacagtctgtatggtcgaggtttctgctcaatcagaaaatctggtacatcgggatattaagtgagaggaatgtgagagagaagagagggaaaggaggaagaaactcaaaagtatgagagagactaatgatgctatttcttatggaggccaatttctgatcttcgtacctctctctctctctctctatccttattaagccaattgaagagctgaatctaggaagttgatataaacagctttaaacagctttaaagactgcagtagacagtagccaaggtcttattctgtgttttctggcaccaagtgtccctcaaacaatatttgtgaatgagcaggggtttattctcaaaatttcctggttgctgcaggtgaaaaaaagctttcacttcctaaactccacaccccttatttgccagaaatcctcctgacatggtcctctgcactggaatgattttcacaaattaaagttagctctccacattcagctctcttgaagaaaatggcctggagcccggctttgtccttactatgatgatcacctcgcatggcaaccagtgtggtaggggaggctcctccctggtcttagtttaagacacgtagagatctcatttcagcctccattaggctccatcagtgagagcaaacagtgagaatttagggtagagtccctgctatcgatgcatctttattcttctcaataagagcaagggtggaggaagcaaggataggcatagcagctcaaattgcttcacacctaccctgcctcggattgctggcaatgttttacccataaactcattctggaaagttcagttttcatcatgctagaggcttggaccagttattcattcttggaagcaatagtgcccagcagcggggccaggatgagggtgaagagagtaagtccaaggcctgtaagtgcacggctggattctgtcttgattgaaaattttgtcttttgctcatcatagattttttccccactaatcttcattatttatttacttttttagagacagagtctcactctggagtgcagtgttgtgatcgcagctcatggctggtctcaaactcctggcctcaagcaatcttcctgccttggcctcccaaagtgctgggattacagatgtgagccactgtacctggccaactaatcttgatttttaaaataatgcattaaagtattacttattttgattactgaggttttgtttttttgttttttttttttttggtgtagccttatattttgtgagtgaggagttttgcctccattacttacaaagtatgtgaccaagaataagctatataagctccccaagactcaggtgtcttcttggtaatgatagacctaataataatatctatatcctaggattcttgtaaagataaaatgagaatttagtgcaaggcctagctcacgatgagccttcagtgtgtgctggggttgcttgccctgtctgaaatagacttgggattcagttttatggactaatgagaacaggtagcagttctttcttatccattataaggccagaaatcttgcattgaacatttgttttagattgaggcctctcccaattagcaatgaattgtttattagtgcctgccttttttgaatgatttcgtaaatttaagtgatccatccctcttccacttaaaatattcaagaggcagttgggatttgagatttgagagataattactgcttttgaacactgcctgcctccttcctacctttgcattttttccctctgttcgttctgcgtatgggttgctgtggtaagttaccctgcagtaataccttactgggaaagtttgctaagcatgccatattgagatattcatcacaggtttgctttcgtttaaaaggggctcattactattccagactagctcaaaagataattagtctcttgataaatcgtctccatttcaagactgttcctgtttgtttttcaggtaaatgtagtttgggattgtaaggggtttgagcagtgacagttttaactcataaatagactgtggctgaaaaagtcctggacctgccttgtgggtttctgtcttttgcaggcccaggcaaaagcacagtgatttggcatcatgctaaaaataacggagtcctcaccctctcttaagccctgaatggtttccaactgtttctcacccaaaatcacagccaggctgggctttccaaggctcctggaccttccaggttgtcctgcagtttcccatctgcggctcgccggtgtcatctgttcttgctccaggctggcgttccctcctgcctgcaccttgcaatgaaagggaatatctgtctgtgtttgccggggaaaaggaaggagagagagacaactttttgagatcctactgtgtgccggacgctctactcggtacctcatctagtctgtacaaccccccgagaggaaggtactttcatctctatttacaaataggaaaatgactctcagagggaatttaagacacttatctaagctcatgagtctggggagaaggaaagctggcttcccaaacctgctctgactctaaatcctcagttttccactgtttttggtgcgtgtctcaagcctgggcctccttcactctctggagaaggacacagaagagctggtgtgactgctcaatcctcagctcctacaaaatctcaaattttacttgtaatgggagcttctgagatcctctgatccaactcccttatcagtaggttttttgttttcccaataatcctacagcttcttaaatgtcctgatgacagcctgctaactacctctcaggaaacccaggaggtgaacaggtgattcattaactctagtcattaaaagcactccattttaatgaagaaggagctgaaataacctttatggtaactttctcccagtagttacgttttgaccccccttcactttttccttttcttgaaggctctgcaattgtttggaacctggtatttgataatagttaaaaccttgcatttattgaacactttgttagtttcacacactgtactaagaacattctgtataatatgagatttactcacaatgccctcatgagctacttaagattgtcgccagcatcttatggggggtgggcagaggggtgcggtggaaatcacgcattctagtgttccacagctggtaattgataaagctgggattgtaacccaagcatcagatgctgaagcttagtcaccatatcaggctgctcccaccattcacagtgtcagctaatctgatgagatacagtttccagacctctcaccatcctcatcactcccatctgcttccactccatgttgtcactgcccgctttaccacgtggcatcttaaatcatgttccctattgcagacagtctaaccacttcgaaccactactttctctaaggagggctgaggactccattttaccaagtagaattctcaggaatcagatgtatgcagtcattaactgaatcattagctattccagtcaaccttcatttagagatgagggttcaggaacccagagaggaaccaggacttgcccaagatcccacggtaatttagggtttaatggaacagaactgtgctcttgaggctcttaacccaatctcttttcactatctataaacaaaagtctttttttttttttttctgagatggaatcttgctctgttgcccaggctggagtgcaatggtaaggtcatggctcactgcaacctccatctcccgggttcaagtgattctcctgcctcagcttccagagtggctgagactataggcacgtgccaccaccccgggctaatttttgtatttttagtagagatggggtttcactatgttggtcaagcttatctcgaaattctgaccttatgatctgcccgcctcagcttcccaaagtgctgggattacaggcgtgagccagcgtgcctggccaaaagtcattttttaattgattattttaatagttgtacctgtggtctgatttctttgtaaacgtatcattagttcatttgtttatgtaaagctgcgccctctgatatccttgggcagttaagttgtgagccctaaacataaggctttaaatgaatctcttatttggaagttcgtgatcagtccagtgtcatttcatacgctgtttgataatactttgcaaaatgcaacacttggccctggccttaagctctgtcctactttatagtcacctcctattactaactccattccaaggttctgtaaagaacagagtaagaatgatgtccttaccttgccactgccaagcctatagaggacactttggcagggtttgatttgaaattcatttcaaacccatttctttgtcattaatgcaaggtcctgggttgggcaaacagaagtggtcaaatcacgagggcttcccttcagagagctgacaatattaacagcacagagaatactaggtctgttgattaaaactcaaggcttcatactgtaagggccccaaaggaagcattaaattgggccataggaaggacaagtcacatccagtttagtgatcaatggtggtttgggaaagaaataacagaattctactcctacatgatagggagagactacagaggccacctagaccaacaaactctgccatcaggtccttgaatcattgctaccatgtcctggtggtggttgtagcattgctagtgatatgtaactcattacctacttatgcaaaccattgagacattgggaaccttcactgttggaaatgcttcctttagttgagccaaactatctccccaaaggttatgttctttgatatagcctatgatgctatgcaggatagatgtaattcttcctccacattgcacttattctttttttttttttttttttgagacagagtctccctctgttgcccaggctggagtgcagtggcgcaatcttggctcattgcaacctccacttcccgggttcgagtgattatcctgcctcggcctcctgagtagctgggattacaggagtgcgccaccacacccggctaatttttgtatttttagtagagacggggtttcaccatgttggtcagactggtcttgaactcctgaccttgtgatccacccgccttggcctcccaaagtgctgagattacaggcgtgaaccaccgcgccctgttgcaattattcatttttaagttgtcttccaggatgccctctccccattcttaaaatctccagattgaactccccatttgtgtgtgtgtgtgtgtgtgtgtgtgtgtgtgtgtgtgtttctagctttcctcagaggaaaggactgaagccagaaatctaggcagctagactctagattatgaactcccttctacacacttcttttattgcagcctgaggctacattacattagcttttattgccagccacatcacccagaggacttacgctccacagtttatttgtttatttctttttccttatgtgctgccgttaagccgcatttccccacctgtccctgtgcacataagaaatgataagtcaccttcagtggtgttagcacaggctctggagtcaggcttccctgcttccaggcgtgaccatgtcactaaccagctgtgcaagtctctttatctgcttctcaatttccccatcgcactggggttaatgtcagtatctgccttctagagtagctctgatattaaatgatattaatctataaaattgtttaaaacagctcatggcatggagttgctgttattcttgttgctgttacttttcatattgctgagtttggtcaattgatccagtctactgaaatattttaaaatttaaatcttgagtctgttattcagcatatctgtcatccctcctagtctcatgctatgggttggtttcctcagttccaaccttgccttataaaaacagaacaaagcaatggcaatgaaaataccctgatgtgagcagggacagagtcttgttaaaccatatgatatatatacacacttctatttaagtgattcaaaaccatggaagacaacattccatgtgttactcattccatttagctcatgcttggcattttgtttgcttgttcaattgtttggctgcgtggcctcagaaccaccttcctatgtttaggaaataaccccaataagcacctttataggaggaagagagttccttctactccaggggcttaaagggccagagagttgattccctaactttcctggaagctagaatgccaactcagcaccaaatcccctgtgttttaaatttggattcagtatcttacacacacacacacacacacacacacacacacacacacacacacacacacatcattggccatggataactcattctggtcactgtagcagtggctgtacagcatctgatttccaggggccacagaggtggtaaaataacccatagccacccatgtccagcggggacaaccgtggtgccttcactcttctcgttgtatggcagagtctggcctgggcttctaactgcccagccttcctaggtatctggggtttttctgagcctctttctccagttttcctgcaaagactgtgctgcccagagtctatttctgttgctttcaactaagaaacccaaaagttttcatttccctacatatccttgtgggactgttatgaggaacaatatctgctgcattattgaatgagatatctggcttttgagttcttctcaaaggccatatagaatgttgagagtcagatagggtgtaaggttggagcagaaggaggttttagtaaacattgaataggctgggtgcaatgactcatgcctataatctcaacattttgggaggttgagacaggtagattgcttgagcccgggagtttgagaccagcttgggcaatacgatgaaacctcatctttacaaaaaatacaaaaattagctgagcacggtgtcacgtgcctgtagtccccagctactcgggagatattgcttgagccggagaggtcgaggctgcagtaagctgggattgcgccactgcactccagcttgggtgtcagatccagaccctgtcttaaaacaaacaaacaaacaaacaaacattgaatagtccaatttgtgttgagcaaatattgggcaggtgtcaggacctgggtagaagtccagtaatatagctcagtggatgaggtggcatttccaagggcagctatggcaggcagcataatagcttggcatgtggatggaaaatggtctcttgtaagggacacatccagttctgtgggaaagttttctatggactctagccaaggagccaatgcaaaaatctcaaaagctggaatacataggaactctcggcattgatgggtgcatgaaaggggaccaccccataaaatggacaagtggcctcaagtcgcatcttagcttctggaggggacagtctgcacaccttcttaactgtatagcctctgtgttggcccaattattgggtaaacagtggaagttgtcagtgcatacagttgggtgagtttgggcagcaaggacacacagttaaaaactttctctggagttagtctcataccatcccacaacaacttttctgatacacctttgaaaggaatttgctttactctttcagggagtgaagtctgcaggggaagcccaaggtctcagagcatctgagacatggtagcctgtctaatgggtcagagagtacaacctcataagggctttgattttgtagctgagacagctccttgcccaaatttaacccagttatcactgaactgaacagaactcttggagccattcatttcaatttctttttttttcgaaacagagtctcactctatcacccaggctggagtagagtggcgctgtctcagctcactacaacctctgcctcccacgttcaagcgattctcttgcctcaacctcccaagtagctgggtctacaggcatgcaccaccacacccagctaatttttgtatttttagtagaggcagggttttaccatgttggccaggctggtctcgaactcttgacctcaagtgctccgtctgcctcagcctcccaaagtgctgggattataggtgtgagccactgtgcccagctcatttcaatttctatgtggtaatccctgcctggtcactatgaacgcaaatccagatcactacccaaagaggactaaccaaacataggtgaggctatataggcagcttagtaaaatatcactagtaatcaactttcaattgtctactcattaaagccacatgtttaaaagtttttttttttaaatattgatttgatagcagcagcaaaactacatttaaatccaaagccaaattgaaaatcagggtgaagtgcttcatttatgcaaacaattctaaatctcaatactttgccaaaatattccagtagtaaagggagatctatcttgaacaacttcactccaccttcttcttcatagacactgctatatagtataagatacaattttcatttttgttattatttgggggagcttacaaagcactttataaatggagtgtcactatcagtattattatcttagagtaaaaattgcaatttagtagttagagctggggacgcttgccttccaactaatgcattggtgattcttgtgttttattcatcaccattcctgctgcaatcattgcagggaatcttcaacttcagcaagtctcagcagtgcatttgggagcattaatcaggagactaacgcagcctgagaagtcacatctttgaagtgaggaacggatcagatcctgaggcatcgttgtagctgccccctctctatcacccccactcctcctgtgccctgtatcgcaagccagaaaagcaacagttttcacttacagagagacgtgcctagtgtccttttcttattgggtgcctaacttctgtctcatttcttgtgattggggaaagatcacctgtcagcaagtttgtggtcaattgctgacaaattttccctaataggctgccctgtgattcccttcctctaggcagatcagcccttgcaatgctggcattgctgataaatagctgtgtggccttgagaaagccaattaacctcagtttcctcatctgtaaagtggccttttgggtcctttccagctcgaaaatggcctggccctcaaatcttcctccacaaatcacttggcatggcactttctaaccatcacttctcagcattctggagaaggaatcatggagacaagcacacctggatgtgaatgcacaggtttgctttgcccgagcagagtttataagcagagggtgatagtgagacatcattctgaaaccctttatgggatactttcaataccaaatttagagctttggactttattccctaggtcccaaggaaattttacaggatttgaagcatgctttattaaatgatttctggaccacattgaaaggaactgatagaaagagacagaaagtttaaacagggaaattcacagggagagtactcctgtgagtaccctctggcagtcacctcactggtagagaggatgaagccagcacgagggtggaagcattgttataatagctgatgtggactgagcatttactgtatgcacacactgcgttcagcatgtcccatgaattatctcagtcaatcttcaggacagtctcaatgaggtagaagctataattatccatttataaaatatgcaaatcaagacctaggataattcagcaacttttcccaatattatgcagctaataagtggatgagcagggctttgagccaagagatcccgtgttcttcattgctctgttatagggagacagacttaaggtgctttcaagggtaggtccgtgagacttaccactggtcatcgggaagtgcttactgacggcctgggactgggcctttcataggttatctcatttcatctttccagttccataaatgggagcctgagatcacatggtagacagctgcaaatgatttaaattcaggacctgaaagatccagaaaccttttcccatgacttttctcaggcatacaagattgatggattcttggcactctccccacccagaattatttaaggatgacaccaagtgttatgttttctgtgatgtgctcatgaaacttaaatatttaaaaagatgtgttaggcagaaagaagttgtgtttcccagatccatgttctctcctgagattttggctcctgtccagccctggcatacatgaagggaagatgctaccaagaatgtcatgtcagaacatttatcttgcacccaggatttacagtttgttttgaagggttgttgaaagaagatgtatacattcagtttttgtccatcaataggtactatccattctctgttatgcagcattaaggtcttgtatgttgcatgtcaaaaagggagtcccattgcagcttctctaatgcatattaataagaaacaagatttataagagataaagaataatctacaccgaatttgaggatgacattaagagatatgaaatttggcactctaaggcaggtcttcagaatagatgtgatagcaaagaccaagatggcaaagttttgttcaaagagacacagtccactaaggtttctatgttttgtattgatcaactcttatatttgtgtaacattttcatctgtagaccaccaggtcaaaccctatacccatcccactcactgttaacaagaaggaactcactcctcttgtgtggactcaagtttcctctttggtagaataagaggattagaatggaacattacctccctacaggagggattgggaaaaacagttgagctctgttaaaaaagtccaagaagaagtttcggtcacactgacttgacccagagaatatgtgtattattctcctaacacagctcctgggttcaaaattttatttgggcaatgaaaatcaagttgatagtaggctcatggaaactcagaacatagttctcagttctggcaaagaggcccccaaacctgtcctccaaggaacagttgtgaaaacaaagcatgtaagaaaagcattgtgggtaagactgaattgatgaaattcatggtaatagcatcactcttcaagaattgcctgtctttgcttaacgttgaaaaatattgatattatctatagtattgtttcccctgtttttacatttgcatgggaaacaattcgattaacatttctttctgaagatggtctgcttctaagagagtgacattgattgtgtcagcttggcccactaagcatgctttcaccttgcagggctgatttggatgcaaagcagagagatcttgaaaatatcaactctacctgcattgttgcatctcctttcaaagctcatttgggtttactataaggcaacattgaaaatgctattcatgcacatgctctcaaatgtgagaaattgtgctaatccaactttcattttcatatcaaattgaacaagaaatgagtttgtcagaaacaatcatgtctgttgcagaggtgtcaggttggatagtcagagggatgtgactgttgccctgggaggtatcttgtgttgtgggaatgtgttgatggaggttatccagtaggctagatccaagtgctccccctgggaaactcacagggattatagctagcagctggtttgtcccagctgggaatatttcccagtctccctctatattcggttcagccttttcctaattctcagtgctttctgggcccctcacaaaaacacaaacactaaaacctcttccaaaaacaaataaacaaacagcaacaacaaaaagaaaacccagccttcatatagatagttcaatctttatgaagtgtatgctttatgttaaaaaaaatattgtaacttgatgctggtgctgcaaacgtggacagagagattcaaagtcatttcgggaagaactgggaggacctcagatatttatttattttactggccatgcaggaactgattttaaagcttttaagttatctgtgaggccagaattcttttggctttatatttcgtaaattaacttttgaatgtatttcccccaaatatttaattcttatgaaattgagaatactaccaagacaacagaatttgcaaagtcagcttacgtacttccttgtcttttggggtctttcttttgaatgaacaaatggggcacagagtgatttaaatcttacatcctctccataattcgctatgccttcacaacagcaatataaatggggaccattatttgatgatcttggtatatgcttcacattcattgtctccttccattcccaggagagccataaaagactaatctgaatagagagcagtgattaaaagcgcagtgccaaaggggtttataccaaaacagattccactgccccctgtcttttgttgtgtccatgtgtatattacatgcttctgttttttgtttttttgctttaatttccttctctctaccttgggatgacagtggcacctacctacaaaaagccaagtgcataatgggacttaataaatgctagctatcaccttgtaagttagaagtatattagtatttctgctctatagagagaaagagattcaaagagtttatgcatcttactctgggttctatggctagtgagggacaatgtggaatttgtctccaagttccgtgtttccaaacccatatgtttctttccattccctttactaaaattgactaatctattgctgctcttccaaacctaactttcacctgggtataaggaagagaatctttcctctgcttatgaaggtgtcatgcttcacttttaaaggaaattggcatagataatactttccttcccagcaggaatcatatttgcatacctctgaaaataagaactcaattttctccaccaaatcctttgtttttgagcttttatatgtttataattgtaatttcatgataactctttaacccagtgcagtccaataaaaatataatacaaaccacaaacgtcattcacatatttagtttaaaatgttctagcagtcaaattaaaaaagtaaaagggaaatagggaatatttattttaataatttattttatttaagccaatatatcaaaactataacacaatacaacatattataacataatataaattattggtttataatcaatgtaacattattaatgtgacatttcatatcttttttatactgtctttaaaatgtggagtgtgttttatactaatgcatctcagttgagactaggcacattttaagtgctcagtaggtacatgcagctagtggataccttacaaatagtgcaggtctcaacttttgaagaatatatttatacacagtttttaaaaactactattggtgaggaagacactgttgggcatattgtcatgttatctaattcatcttcaaaataatcctatactaccatccctatttttcagacaaaaaagttagaatcggattacataacatgcttgccatcatataagctagtaaaatgtagagcttgaattcagatttaacatattttatttcctcatgtaggcatctttccataatactgtaacaccttaataatgatggcgattattacaacaatgatgaaaaaataataccattaatataacaattctgttaccacctggcatcagtgaatttataacattttctcttacattgtctcatgcttattctcatttcatacacaattgtttaaaacatatatttatatactaaataagcatctagcaggttgcaagatccaaagctaaccgagaatatgtgataactcaacaaaccaagctgctttcaacacccaggttatccaggaaatcagattcctgtgaagtttagagtttcaatggaacgcaaaaaatatgagcacccaggaggtgtgccatggtgcttgggccatgtggtaggcacctgcatgaatgtgcatgtgtaggcactgggtggagagtgacaagaggagggcacagagagacgggctggctccaggttgcagttgttgtgggtgaattgatagacagcagtagagaaccaaaataccttgacagataatgctcagtttcagtgtttttgctgcatctcagtccccacacttttaaaccatcttcctgcattttttgctccattgctcctgtcctgagtctccaccccaaagttgggttcaacagaaggatccatattaagaggatggccaagaatagggtatttcttatctgtacccagggataatcatgactttcagagggtgggtgagctatcattgacacaagcttcagtgtctctaacacatggccccttcatggggctacttgacttacagcatggtggttggctttggaaaggataaatctcaagagcatatgtttccaaaggacaaaaatcgcaacatgcaagggtgtttatggttctgtttgcatcatgcttgtctatatccctttggctacaggccagggtcatatgggcaagtccagagttaatgtattacagtcatgagtaaaggaagggtgatttattgggattctccaaagtaagagtttcctccacaggtttcccaagagggaggtaagtgacttttttttaggagagtgggtatatggtgatgttgcaagagacatgatcctattagaaatatttcctcatactctcttcaactgttgactcaatgagacaaattggccgtaagattttgggtctatagctacacagaaatctaaacagtgcagaaatggattttcaacatgaattttttaaaacttagactttgagtggatttaattcaaacattatctttggttcttagagtcagaagtttccttaaaagtcgtattagctgttgtctgcaggcattttttggaggtgtgaacttgcaatcattgggcaaaacaaagaatctggcacttttaattctactatgcaacctgagaataattttacttttaagaatacatgtctatattgtatgaatgcaatatgtcatcataactgtgagtaaagatgtccctgaaacaaacaacaacaaaaaacccatcagactaaggatatgtcatctgcccatccacccatttatcagaatatccatccattcattcatttagcgaaagtcattcacactgaaaatcagctaggctgtggatataagggttgacaaggtagacacagtatctattcttatggatcttatatttagtttgtgggagtggaccatagaaagcaaacaagtgaaaaaaataatttttagtagtgataaatgtgatcaatagtacacggcaatgtgatgtattgggaagtggccttgacacttgaggaagatagtcatcatcttggctgaggagcactgctcatgggaagatggtagtgatggtcttggtatttaccataataggggggcctacaaagtggtgagtagggagggaagagaagaagggaggaagaaggaaaatagaaaaaataaaaatgaggaagaaagaatgaataaatggagataggaaagtagggcaagatattagtatcacaattcatattttcccaaactgatgacctggaatccccacaattgtcctgggagtggggtcccctaatgttgaaggagagctccaaagaggaaagggagtttgactagcatcacaggtgaggtcagggctatgcccagagaagaacctgtgcctttggctgtggtgctctgcttgtgcatgcctgtctctcctcatgattggttggtgtcttcttggcaaggaaggtttgtctcagcaatgatggattaggagagtggtatgcatctcttggggttctgagaggccaacaaatgtggagaacaagtttgtgtaagtggttggaatggaaatgttattagaacatagttcctctgagtaatggataaaagctttgaggtgctatgcctggaagaatatagcctacacatatttgaggaattactttaaggaagaaagttaccagatttttcacctttgacaatattagaaaagcaattaaatgtctatcttaggatgaaaaatttaaattttaatcagaactgctcccttgataagaggtgttagctatagagggcatggaattgttttttcagatatcattacacatagtggttgtctactcattgtagatatcaccagtgaattgccattctggtgggggatgcccctggctgcccccttactccagtttcctcaaattcactatcttttggtttttctttttctttctttcttttttttttttttttgagacagagtctcgctctgtcacccgggctggagtgcagtggcgcgatctcagctcactgtaacctccacctcctgggttcacgtcattctcctgcctcagcctcccaagtagctgggatcacaggcgcccgccacgacgcccggctaattttttggatttttagtagagacggagtttcaccgtgtcaaccaggatggtctcgatttcctgacctcgtgatctgcctgcctcggccttctaaagtgctgggattacaggcgtgagccaccatgtccagccagtttttcttaagatacttttgtttttctgaaaaaggaattttttttttcaattttcttggttggtcactcatctcagcctttccagtcaaatactgctttcttccttagtattttcttccagtcttcttctcctattacatttgttgcctcagatgatccatgaaatttcatggcagtattcaacatcctgtcactaactaatcctcaagctgcatcccaaacttcacttagcaaactcttaaatatgataatttccctatattctatatttctgtgatgtcaacactatccacccacttttccaaccagcggtaaatgatcacacattaactttggaggatccatctttaagacctcacacccagtccattgccagttactactgatttcatttctgatatttctttcataatgtctatttttctaattcttttgccattgtcaaagttttctgcccttatcatttctcttctgagatgcgtccttaatctcctaactgccctctttgcctccttcctttgtgcagaacactctgaccttcagctctcacttttactctacctcttccacacaactgtgaactgcatgaagagttcattgtcatgagggcaatgaacttggcagctcatattacccctgcttggaggcaagtcattgccatgaggacaagttatgacttgccctcatggagtcgtctagcttctgtcaagactggatgaaggacttaaataatcttgtgaattttatatttctacatttccatttacatgggcacatctccatctactcttttctgggtctaatcaagtgttgaactcatattttattgatgctgagatatttttcctaggtgacagtaacaaagacacaataaccactggaagtctcagaacatagcttttgtgtcttaagatcattaaaatcaggagagaatgatctttctgccactctatcaggaaactgcaaagaactgagactaccttccttgagttacagtccatctctgaggccatttgctatgtcctgtgaatattctgaaggacacagctggggtcctgtgtttatccttgtgattgacagtgcacttgagacaaggaaaaacaacatgtaccacataggtcctcaaaattgttggatgacatgaatagatgagtggatgaatgaattaatatttggcttccctagaccttccctgtttttttaaatattccatgttttcacttgtattgtctactctccttgggagatcatggcaccctgtaatataaaatttattatcgtacagccgtctatgtgctgttcccagtaacaatggattccagaagacttagataggcattccatttcacaagtcatcatacccagttttattggattggtgaattaaagggttagtaagtgactgaaattatgaatgaatgcatgactaagaaaatagacggttacaaagcacatctgtaatttcaggttctctgctcaatatatcaaatataatagagatctgaaagtgacctcaaaggtcattttattcttaccttttttaaacagatttaggtgctgatatttagaaaaatttagaagactacacgccccacctcccccacacacaccaaatcacatggcatactagtggcagagacaagaacaggacttcagcagttttaatttctagtgaggttcacccttcattacacaatttcttatcttaagtaataggcatttgataagcacctatgatattccagacccaataggagatgctacgggtgatactaaaaatgaagacagaggcagggcatggtatctcatgcctgtaatccagccaacttgtgaggccaaggtggaaggattgcttgagcccaggagtttgagatcagcttgggcaacatagtgagaccctgtctctaaaacacacgcacacacacacacacacacacacttgaagacacagttgcaatctgcgattctccagcatctcatagacaaatgagggtaatttgataaattcccaacagcacatgtattacatacccagagaaggagggtcagtctggccagctgctcccatatttccttgctgctagagtaatatttgaatatatcatgtaactagactactaggtttatcttacagtagtatctgatgctgttaactctagcatgttgttctgtcatcccttagtatccaaggaacttaaggattaacagggagagggatgtggtagcaatatgaggttcaatagtaaatattgaacctctcattacccctgttctttccctgaagatacccattggtcagtaggttcttccagctgctgccctacccaatttcatggccttctcttccacagttgatctattttgataattgattttctccatcgtgttgagcaaggtgagtcttctggtaggaaggaagaatcagtaagggttgccatccttgtgttactccaataatctaagcaatcctaggctgagtttgagtggctcacctgctcttttttggtggtttctggttagattgtcattatagcagagcttagttattgggcgaaatcacagagaaaaccaatttacagattcaattgctgaatttcctcttatttttaaaaattttttatcttaacttttctgatcaaaagtccccagtagtggactggaagtagagaatgtgaaaggatcccatgtgttgtgggagagatgttacttttctgttctttgttataggactgattacaggggtgtgtttcctaattcatagagctgtgctcttctttgtgtatgttatacttaacatttttagaaaaataaaaagtgactactactgataataataatgattttgcccccagaggacatttggcaagatctagagacatttgttttgtcacagcttgggagagaatgctgctggcatcaagtggataggggccagggatgccgctagacgtcctgcagtgcacaggacagccctctgcaaaaaacagtcatccgacccaaagtgccaatagtgctgaggctgacaagccctaccctagagaatgagggtcaatctgaaagtttcattattgaacagtcatgacaattaccatttatagagacttatgaagtaaattggctatatcttcattttgcatttgaggaaatcgaggctaacagaagctaatttgtccagcatgacccagttgggaatccaggtccccatgcagtcccaaccttgttctttacaacacgtatattattttgcctattgtcacttctctatcaattttgaaaacttacaaatatgtttttcccaatagctgaaatgagtttgtgtgtgtttgtctctgtgtatgtaaaacaaccagtatgtaaaacaaccagataaaaggtaataacgagaagaggctttaaaagatattatccacatagtcttctgcaatgatgcctttatcaaaacataataatagactactgtgtactgcttttgccaagaacttgtcaaaaaaaaatcaaactgaaagcatagtcttctagttatttaacgaattgaaatttgacttttggatacaggtaagaatacaactgtcattcaagggagttaaaacatgtttctggctattgtcaggagactgaatagcctcttccagttccttgagtcagaaattttctgaagcttccatttgtaaatattaatatatacataaggtattagtcgaagttcaaccaggggaacagaaccaacaggatacacacacacacaccccaaatatatacatatatatttgtatatatcaaactgtatatatttggtatatatacatgtaatacatatgccaaatctatatagttggtgtatatatgtgtattatatatgttatgtatataatatgtataatatatgtgtgtatatatatttggcatgtgtttgtgtatatatacatatatgtacaaatatgcatatatacacatatataaacatatatgtacaaataggtatatatacacacatatataaacatatatatacacacacacacacacacacacacacacacacacacaccccgaaagatttatggtaagagattgacttaagcaattttagcatatagtagtctgtttggcctgttttaacaaaataccttaggctggatcatttataaagaacagaaatttattgtttacagttctggaggctggaaagtccaagatcaaggcgctagcagattctgtgtctgatgagggagagacaagaatacttgtaatacttcactggaagtattacaaagaagttgtagctacatggacgtatgcttgcgataaaatgttaagaggtacaagataggtcatcgaattatgtattcaatctgacttcaacttactacacacatacttctgcatttatgtatatatcagagcatgtagagaaattatggcaaaatgccagcagcaattgcatatggctggaatttaagtttaaaatttaaattgtattcattttcaatttgtaattactgaatattcctcatagatggcaccatctcaaggccttctcaaatagtggaagaggcagggagctcttttgattcacttttataagggcattgatcccttggcctaatcacctttaaaaagcccaaccttttagtatcatcacattacagattatgtttcaacatatgaacttgagggagatattttaagaccttagcacagaggttggctgggaaaattcaaaatccatagggcaggtaggcaggaagggcagactagacatctcagatgagagctgacattgcagtccacagatgggattgtagcttcatcagggaagtctcagttctgctcttaatgcctttcaactggttgaatcaggcccttccagataatctaggaggatttttcacacttaaagtaaactgattacagacttgaattacatccactgaataccttcacaataacacctagattgcttagattattgcttaattgtataactgcagactataacctagccaaattaagacataaaactgatcattacatgtagtaaactatatatttttcctaatttagaagttactttagatggtggagtaggtttatcaaaagccgcaagtgttaagtaacgtaaagcacattgtttctctcagcagtgcaaggatgtggttggttggccatacccacctatccagctctaatctcccagattagagatatctttgtatgccaccaatgcttgtaattctgtcttgaaactcactgtgattcattcagagacacaatgttgcagactggaaagaatgaggagtgaggcagacctggacccaaaccctgggtctgctatttaggagctatgtgaatatgcctatgacctacctacattagaggtagtaacacacaacttcacaggttctggtgagatttacctgaaacatgcttgtgcagtgtatggcaatatagatacatacctgtatagagatatgtatgtcttaatttctttgtgctgctacaataaaactccacatcctgggtaatttataaccaagagaatgtttttttttctcacagttctgcaagctggaaagtctcgggatcaaggtgccacatgtctggtgtctagcaagggcctgttcctcatagatgatgccttctgagtgtcctcagttgacagaagagatggaaggggtgaaaacaggtgtatttcctcctttaagtcccttgataagggcattaatcctattcttttatagtcctctgtttgtagtcagtatcatcgtgtctccttctgggaggagatcatgaaaccatgttaaagaagcacagagaggggtacaaaggagaggctgagactaagacaggattttataaattccatggaagagtcactggctgagattgtggttattgaactggactgctatgcttgggtccccgtttgaattaagcaaccctagagatgtgtctatatatacacctgcatatttatatataaatacatatctactgtgtgtgtgtgtgtgtatgtgtgtgtgtgtgtagttttctgtttatttttgggttattgtttaaggtattgatttctttattagactctgtgggagaaattctactgacatcaagtatcaagaaatgttttgtttcacctggacaagaatgcatttttattttgtttagttttataactattggtgtttctccagttgctttggcttgctaggaaagaacactatgtgtcataaattatggtgtgctttagaatgaagtactttgctccatcttaacaaccttacttttactttcccttcatcccactttctttaaaacttccctttgtttaaatcttagtgcattgctggtatttatgaaggccattcgacttctcttaagaagaggagaggccttaaataaatgggttagtaaatgggccttagtatttgagctcttcacaaggccaatcattgggagtccatctttctcctggaggcttgcttagagctttagttaaaccctatcaaatagtaatttcttattaaggcagagttggttctaatattcatccaaggaacatatattcaaatgatagacttctcactaattaattttgctttcatattttgacattcagtgaggcctttttagtgtttttaatgtgtgcattatagtacgtataagaacatactgaaattaccaatttaatcatatccttctccagattattagcattttgacggtagggactataatgattttatctctgtatacctagtatctaccactgtgaatatcacgtagtagattattttgttggatgaatggatgcttgctaaaataactgctgtgtacgcgtgtgtatatttgtacctgtatacacactgctatggtttgaaggatcatgtctccttcaaaattcatgtcgaaaaataatccctaattaaatagtattaagaggtgtgggttttgggaagtgtaccagagctgctgattgttctagaaccaccccactattccaagtttattaggctcagagccactgagagccttgagttctgggcacttctgtcacccatctccttttgcagcaccagacaaagaattttcctttttagcctcattgtttgcatgcctaggagtcggtcactgtgctcctcgtagtctttgggtctcagaaatagtgaacaggtacagcatccagggtggaatttttgcctttagtaccctcccttgaactcttaaaaaaaaaaaaaaaaaaaaaaggaacccaacactgggaggccaaggcaggcaggtcacttgaggccaggagttcaagaccagcctggccaacatggtgaaaccccatctctactaaaaatagataaaattagctgagtgtggtggcacatgcctgtaaaccctgctactcaggaggctgaggcaggagaattgcttgaacttgggaggcggaggttgcagtgggccaagatcacgccactgcactccagcctggacaacagagtgagagtccatcaaaaaaaaaaaaaaaaaggagacaaacttgtagttttgtaaatactgtaagctgaatgaatttgttaaaaagtacatcacatcactacataagtgacttgacttcagggttctttttatttattatttatttttcctttaaggaaaggtcaaggcactttttttttttttttggaaaatgtccctcaagatgaggaggaacctcagtgtcccaagaacagatgatggatctgttcatgggtgagacaaggaacctgtgatttgagctgagttgcaagagacacaggagacatctggggactaggtgaatggacacctgacacttggtctgggcttggccacttggctgtggccatgttcctcagctcctttgtgtctcaggcatccccaccaataagcagaagatagtaatagccaccccatctctattaagcttggtgtgcaagtggtactaaggcatgggttagatagtgcctctaacagccaagaatagaggtttctatcagtttggcccaaagcactttggtctccctgggctgaatgggattgaggtcatctttctgtcttctgctctgggctgtgaggttgccgtcactggaaagctgtggaaggaacattggcctgggagtccagaatttttaattctcatctagattctgtcatttttagttaaaacttgggtaactaatttttccacatgggacatctgtgtatatattttttaaataatggagctaagtttggtgacctctaagagacttttcagctttgaggggctgcagtgtagcaatcactgtgctgtaggatggagataagtgatgaggacagaccctgccatctatgactatggcattctatgggaagaggcacaacatctatgacaggacaatctcacattgtggtatttgtccaaaaggaaatgaacagagtcgtgtaataaaatgagaggtgaaatgagttcaggtagatccagagagacttctctggggaggtgacattatttattatccctgggaaaaggagggagcttgataaataattttaaagatacactagccaattgagtgaatgtttattgagcacctactctgtgcctgactttaaatagggaactgaggctagggtatttaagaaatctttcttaagaaaggcctaatctcgggtggatcacgaggttgggagatcgagaccatcctggttaacacggtgaaacgctgtctctactaaaaatacaaaaaattagccgggcgtggtggtgggcgcctgtagtctcagctactcgggaggctgaggcaggagaatggcgtgaacccaggaggcggagcttgcagtgagctaagattgcaccactgcactccagcccgggccacagagtgagactccgtctcaaaaaaaaaaaaaaaggaaaggcctaatctatagaggaaagacacacacagaaataaatctttcttctattgtaacaacagtaatcagaagacatatgtgggattcagggacattgatgtgctgaggtacgatcaacagcattcatagaaaatgagtgttcaaatggaaaagaaaccgccaacattatttttaagtaattatatttcttctgctgagattttacaataatcatctcacttttctggaattaatactaaataaataggtggaaatatttaaaaattagatgcacaaaaatatctatcatggcaaaaatcaaaacttaaatatctaacaaaaggagatttcttaaataaattatggtatatttttatggtggactaaattcagtcactagaagtattacaaaggagttgtagctacatggacatatgcttaggataaaatgttaagaggtacaaggtaggccattgaattatgtattcagtctgacttcaacttactacactcatacttacgcacttatgcgtatatcagagcatgtagagaaattatggcaaaatgccagcagcagttgcctagggctggaatttaagtttaaattttaaattttattcattttcaatttttaattactatatattagtactcaagtaggaaacacacttaaaatatctccaaacctggagtgtttggaaaagaatggaatagcggttccctctagtttccatctgtttctgatgaattagtcatcacacctttggaacaaaagcagaactttggatttaaaaataaactttacattttgtttttaatttggagcctttaggatattgtaattcatttctactatctacatttttcactacaaattaaatgaagtaagaatagaaagcatatgtgagttgggaaaaccttattttattgtgtgtttctgttggaccccaggaatggctggcgggagggaagaactgttgtaagtaaaaaggaccgcagtataattatttcataactgagggttctaaagcttagagatggggagttgtttgcccatggtcacatggctgatttatagggacattaggcatcatcaagatgcagatggggagaataaggcttaagaaaggattggaccaagacttgttattttcttgctgttggtggtggtgatagtggtatctgtggtaatggtgataaggggcagaatgaagtatccagcataatcaactgagagacacaatattgttagttgtaagatgacattcttctgtatacattcttttcaaagcaggaacacaatgttggaaaggaaattataaacccaatactagatcaggtgacacttaaggtctagatttcagcttttctattaagcgaaaacttagaacatgtcagttttcagaatagaaatgtttatttccgtatctgaattttaaaatgcattgtgcatatgttctgccacttaaaagtaacaatcttttccatttttctcattttattacaaattgcaatcacaccatgtcatcaaaaagttatttagtgacaacttagggggagccaaaaagtttcctgtaatttgcatatattttccacattcggaatgttagtgattaaattttttgtatgttcacttaaataatatattattattgaaaataaatacaataataaatgcaaaatgttggctctaatggcatatgctaaacattttcacagtgcaacacagcatatgcttagttcttcattaagagattttaaaataactcgtatttagcaagaatacattatcttttattcagaattaattatatgctgttttgtgtatggtaatttaaagtgctacccacttctaatatgtaacacgcaaaagaaactatggttacaattcattagaattggcttctttcctttgcaatttagtggcataattaatacatagaactggaatgctatttgttacttgaatcaaaagttatataaagtgctgataactagcagttacacatcctttatttttttttaagcactgcaagacttagaagaatgggataagtcatgagagtaagtcacacataattagttattttaccattctttcatagttttaagagcaagttttcacaagggcgatttgaattagagggtagaataatattttaaaaatcgttttctattattcaaatatagaatgttattaaattttttggtatcgctggttaagtgcctagaacttgatcatcttctatttctttttcctttttgctatgagaaaaataatgctcagagaagtttaaatccttgtctagggtaatgtagttcgtgactaggaacccagagttggaggtttcttggtttaggtgaggctgctgtttcagttgcaggaaagttactcatattgccactttctaccttggttattataacaggttcaataagggcaatatatttgaacagcatattaccccaactaaacaagaagctgacaagaagatgacctcaactaaacaagaaggaagaaaatgacaaaaacactcaaagtgcatcgaaagtgaaaaacaaaattcccaaatgcactttccatttctttgaacacatatgttgatgtcttgactttttccctaaaagtgaaagcatcttgaataataatactattcattctgacctgggtggaatgagatgagcactctaatactctgctgacgaaagtataaatcaatagtagaaggcatttggcaaagtttgtcttgaacctaaacatgtatcaggccctttgtcttacttggttaatttgtgatatctagccttaggaaacactgaaacacgcaagatagaagctcataaaaatgtgttcatccaggtgatttctacagtacgtaaattttaccttaatatagctgataaaaaatgctcaacaaatttttatttataggaggcaaaagtgaaaacgtgctaaatgattaccccttagaggaattctttgaatagtaacagttcattcatacaactgaaaagtttaagatgtttttaataatgaatatatttttaataatgtagagaattacttgtggtatagtatttatcacagatgcatgatgaaaattgtatgtaaatcacaatctatattttaaaaacaataagcatggttaaaattattagaaggtagtgagcattttagcatgacaactaaaatgagttatcactgggtgacaggattatccattcattattcagttgtcttatttcctttggactgctattaaaaaataccttagagtgggaaatttataaacaacagaaaatgtattattgacagttctggaggataggaacttcaagatcaaggtgccagctgattcggtgtctggtgagggcccgttccaaatagacggcaccttctgtgtcttcatgtggctgaaggggcaagggggctccctgaagcttcgtttgtaaggacgctgatgccattcccgagcttggagccctcatgacttaaccacttccctaaaactccatctctaataccatcatattgggtactaggtttcaacataaataaattttgaggagatatcaacattcagatcatatcaccagtcatttgtatatttattttgccaactttatttaatttattttgcacctctacatttccacgatattcttccatgatgattaattactgttaaaaagaaggaaaaagacaacaataaaggtcaaagtgaggagtcctgctatacggccatgttgtattaaatgtgcctgtgtcacaggatgcccacacatgtggcccacttttttgtagattccactacagtttgataatagcccttacctggtcaagaggacccaagttaatagcattgataaaattcattaacatttcattttctcagtcatagcaattctcgatcagccccgagaatatcattctgagcagcttgtgttgcaaacaatttacctaatgcagttgatttacataaatctccttctccacatttatccaacagtagggtttttaatttccattatttttatcaactctgataaaaatattaagagcaaggaatttgctccctgcagcagcatgtgatgtatgatttgcattagagtccacctagtacttattgcttgataccttcccatggtcagactctcagttctagtccaggaagtaaacatgtttcctacaagttaactcaattacatagtcccctgaattgcagcaaacatttcttatactgagccacttgcatattctctgtggtagctgacacttcataattcctaagggaaggcatgaagaattagactaaattccctggattcagaaagaaagggaaagggattaagatgttgaaattgctcaggctctgctgctgtcattgttggaggaagcaatacctgtgtcaggtgcaaaatgtaatagttctgattacctactacctatcatctgggacatttccaattcacacctaactccgaagtctgctctgtatcaaaagattctagggcatgctggcctagggctttctttcatctcaaatgatatcacttttcttctcatttaaaattcactctgaaggccctaaagtcgaatatttgacgtagatgtttccatgaaagcaattttaaaatacactttcttttactgtctgttctggaatatctaagagtctataatttgtataatgtccaatctctataccataccctggccttcagagtgagggctgtaggacctattgccttttgtgctctgggacttgtgtttgttttatgagagttttataaaaggtagtctgcagatcatctgcttcaacattacctgggaaactcgtttcaaaggaagtttctagagccctaaccctggccttctgtaactgggggtgaactctgagacgctgcatttgtaaccagcttccaggtgactgtgaagctacctaaagcttgagaagtgccagattaactattttctgttttcggagagctttcacccatgctatctcattctgtacatcataacagctttctttacaggaaggtgccttcataatcacaaagggtgaataaacattctaacatcacagagacaacagaggcggatctagatgtagctttcacagtgtgctttctgggccagcagtttcagtatcatctgaggatatgttaagaatgcattttcttgagctcaccctcacactttctgaatcaggaacccttgaggtggctttaaagagccgtgcaagtgactctgatgatctataaagtttgagaaccattggtatacctagtgtatggttttacagcatcctggtactagctgcatgccactatgtatttaaattatctacgttaccaatttctgtaaagggctagacagttgttagcttcagatcccaatttcttttagagaatatcaaggactgaaagctccagaagatatttttgaatcaatgccattggcaaatgatgcctttgaaacagggaatggttctaccaggaaggtaatggtctggactcttaaaagcagcatcaaaatagcaccacaagacccatcaagttttaaattagataacagacttctaagttaaagctagttgagttgaatcttggttttgacatttaccagctgtgaagctttttgaaaagctaaagaatatctgggagaattacttttcatacctgaaaaagagtataaggatagtaccttcctttcacatggcaattttgagcattgcatgaggcaatgaatgaaagtgctttgctgaggatctggtaataagaaaatgcccaaagaatgttataaggcacgtaaccacacatatgaattgcagtttcctcactcttagttccctcattttaaattttgagtaattatagtgtctaaaagtagtgagcttcagtaaaaagcagaaccgagtggatctctgtagcaatagaatctacagtctatcctatgaaagatgaaagaattcagaccaatcaatctacctacatctcctgcctctaggactaattttgacacgtgttaagtacttgaggaatagatgtgtgaataattaatcaatagctgtgttttacaaaaggggtgcttttcagagttcagttatatacattatttggctaatattcccagtgattccacgaggtaggtataattactgatgtcattttacagaggaggaacctcaagcttgtggagatgactaaggtggaatggggcagcaacccaggttatctgactcagggatcctgttcttaattacttttctatcatgctttaaccactatgcagctttggctggtaatctctagcaataagcagcaggggcaagaatggttagaaataattttttaaggccaggtgtggtggctcatgcctgtaatcccagcactttgggaggccgaggcggatggataacctgaggtcaggagttcgagaccacgctgcccaatgtggtgaaaccctgtctctactaaaattacaaaaaattagccaggcatggtggcaggtgcctgtaatcccaactactcgggaggctgagacaggagaattgcttgaacctgggaggtggaggttgctgtgagttgaggtagtgccactgaactccagcctggacaatgagagtgaagctccatctcaaaaaataaaaataatcataatttttaagcacctgtggataggacagtaaaagaaattatgcattaggttgaatcagcaatatatttttgtgaattcagtagctagaagctaattaactcctagccaaattgggaagagaaggctttttattttgtgattaatattttaaactatgttcttgtaagatattatacaaaaacacatgtaaagcacttgtgtagctgaatgcattattgcaaggtaaatacttttaaaccacctctgtgaggatcttaaacctcgtcagatactcaggatgcttccccaaagccatcactctgcacaaaaatgacgactattctcacttatatgattccctccttgttgttaatgtgtgtgtgcattctgaaacactatagcttaattttgccatttaaacatttttttttaatctttagataggcttcttcttctttttctttttctttttgacagaatcttgctctgtcacccaggcttctgaagtgcaatggttcaattttggctcactgcaacctccacctcctgggctcaagcagtcctcccacctcagcctcccaagtagctaggactacaggcatgtacccccatgtgcaactaatgtttgcccaggcaggtctccaactcctgggctcaagcaatcctcccaccgtggcctcccaaagtgcagggattagagatgtgagccatcacacgtggccttagaccttttacgtttattttcatctgtaaattatcctatcatcctatttcattgaataaatgaaataatttatttcataatacaaggtttctcaacttcagcacttattggcattttgaacaggacaattcttgactgtgggggactgtcgtgtacattgtaggatgtttaggagcatccctggtatctactcatcagatgccagtagcacctcctcttcagtcgtgacaagggaaatcctctccagaacttaccaaatgtctcctggaaaataaaattgctctgattgaagagctctgctgtgttttccctctgtcttgttaattttctgaaaattgcatcttggatgagtcttagtctgattcagattcaatttttaaatttattttatttattgctaagactacttcctaggtggcatggggacttccctctggaggcacataatgttggtaatttctcttgtgatgtcagccacccctgatgtctgatgattagatcctttataagggagttgcaaaatgctgacattccaattctctcatcccttggtcactgctttgtcagaatatttgtgtcaagatatgtcttgcctcagcaatgatttgtttgccaggatggctagaatgggaaaggccccatgtaagttggcccattgtttttccaggctgtcttttacctagtagccagtcttccccatttttgctatttggacacacccttctcagctttgaagaagcagcttatcaaatgagacaggaccagtgtggccctcctggcccatttctgcctggagtcaatcactcctatgctgtcctggctcaatgccacttaccatgtcaggcataataatgtgctctcacgtccttctttcccattagtcagtgagtaaagcaaggctgtctcactcttctttgcatccccactgcatagattggaaccaggcagcctgatacctggggaagagtgcaggctttgcagggagacaaacgtggatccaaattccaaatctgaaaaggagctggtggctaattcaagtgaggcactcaaactttctgtgtttcagtgtgttcattgtcaaaatagaaaaaaagtcatttctctcagttacttttaagggtcaagtcatttggaaacagtgttcatgggattcctactcaatatacacgtaaggtattctttcctattgtaatagtagcttctatttacccactcaccatgtgccaagccctactacataaaacccttgtgtgccttctcgtgtgatccccctgcagtgcccacagcctattacaggtaaagcatcaatgtcataggcaaatgatgcctttcaaacaggtaatggtcctaccaggaaggtaatggtttgggctgttaaaagcaacatcaaaataggtaaagaaaatgaggcttaccgaagttaaatatcttttcctaaatttccaagctgatgtgagttgactctgcacttaaactcagaccttactgatggcaaaattcactatatatcctgcctttaattgggtattacaccttgaataaatgaatgaatgactaaattaatagaagaagatgatactaggagtttattagcaaataattatttcctcccagacagttctttttttctgggaagtcagttgaatctggagcttacattttacacgtgggttgaggctacaatgaccagtcagagagagccctgacttcagtgtggacttctgagggaagaggaataccaggtgcccagtctgacttctgctactggttggcggtgtggtttgtataagcctcacatatgctcagacactacctggcacttgtttctaaccagctgttcaccttcctatggtgaggggctcactgggccacccagtccaatggtgagcacagtttcctggatcccagccttttcatctgtcctctgctattacctgttaaagtgtgagctttctatttgacacctgggcagaccaagctcagctgagccctgacctggctagatgtcagggtgctactggcaggaatttaaactgcctcaacccagggagccagacttttctggaaaagaatgtaggtgggcaagcagttttgtggtttactccagggtttgggaatctcctgtccatggcctctgggaaggaattcattcagatgggaagatgagagcctgttaggcagctcctggaaagggaagccatagcactggggaagcagtggccctgtgcagggtctggaggactcagtcctcagcaccttttctccccctgcttcccttcccccaaggacatgtgatgtgacttcacataacattttcttgaattcattctgtgttcacactacaaatcacatctatgtttccaacaaaaattaattcaggacagttataggtacaatatagctgtttgaaattaatacattttattttagaatgtattcagaatgaaagtttttgagtaatgtgatcactttatggtttggaagataaaacaaaacaaaaacaaaactcaggttctcttgggggtgttcaagccattgatcctgacagataacattatactttgatagacaaccaaagtagacccccattttgatagggctgtattacatggtagatgctttttttttttttttttgagacagagtctcgttcagtcacccaggctggagtgcagtggcccgatctcggctcactgcaagctccgcctcccgggttcacgccattctcctgcctcagcctcccgcgtagctgggactacaggcgcccgccaccatgcccggctaatttttttgtatttttggtagagagggagtttcaccatgttagccaggatggtctcgatctcctgacctcgtgatctgcccgccttggccttccaaattgctgggattacaggcgtgagccccagcgcccagccctgtagatgctccttaccttccctgtgcaggtcattgtttgatggccattgcactgaatggcttatctgtggaatatgtttatctatttcatactgatattcagaacatgtaatttgatagatcaatttaggtatttaagagaaatattgaggtatagaatttagacagacatatgcatatagtattaacgattattgtatattcaacatatataaattattaaaatgtgaattttgatatatgaaagcaaatgatttgagagatagcttttactggtatgatacaataaaatacaatacaatttggcaaggatttattgaatgatgatgatatttcgggcactaccattgcatcaatatgctagagatacaaagatgaataaagaaagaaacctttcttaatgaagatcttgatgcatcaataatctaagcatgtgaagaaacaaccataaggggaaataacagcagggaaaagaatggacaaattaccaactcaaaaatatcatgagcaaaatgatgactaaagaacaaatctgtgaaaactcaaaacaaatgaagaggtattttaatattttaatacagagctcttgcaaatgaattagaaataccattgctcccatagaaaagaggggaagcagctaacaatacaattaaccaaaattgtatgcatgactatacccacatacacatacatgtacacgtgctcacatgaagaattcaacttgttactaatcaaagaaagatattcaagcaatgcatttatccctttacaaattttgttattgttattgtgatgggatgggggattataatgagcatttaaaaaatcatactggtgtgtttgttaattaaaacatctcttctggaaaataatctgaaatatgtacatagatgtttaaaagtcttacctcttttgacccagtgatttcacttctaagcacccattctaaaggaataagcaagaatgaagacagacattaatgcacaggttttttttttttttgcatttgtacttataataggaaaatgttaaaataccgagtagcccagtagtaggggttgaatggttgtatagtttactgtacatcggacaagcaattatgcagctgttagaggcagagctcccagagacttctcagtagaaatgcatgaaaatattcagggtttatattaagtcaggtacgacagaagaagaaaaatctcaattgcatttaaaaatagaaaaaaaatagtgtaagccaatgtttattttctcatttatacattttattttctaaaattttgacactaagtctgcattatctgataattagaaaaatatcaagaagtaaaacttaaaaattatatggataattataatgcaatttgagctgagagctgtgcaaagaaaagagatgtttccaggagatggatcagttgatttcacttgatgaaacagtcagagaaagctagagaaaagagatgaatttttaaggatgaaggcataatttgcccggttagacaagaaagcaaggtggtttcaagagcataggttatgcgaatgacagaagcataaacatacctggcatgttcaaggagtgaaattgatctggtgtgactggggcacacactctgcaggcagtccagaggggtcaactgaatcaagaaaggtagagaggaacaaggctatgagaagcttttcattctcaggccatgctgaagagtttaagcattaaaacctaatcctagagaattggagacacagcagaatgctgattggaacacgcacacacacaaacacacacacacacatacacacgcacatgcatacacaatagtgtaaggtaaattttgtcacaagaatcaaagtaaaagcatacatttaaatgtgtgtacaaatactttttagaaaacatcttgagaaaaaacattaatttttttcataataaaatgcaaagcaaaccatgatagaaaaaaatgcatttaaaaataatatttcccctcaactcctttttgtgcttcaaggctttctgcccttaaatagatctgtcatagaggttttcttggtcagccgccctgtagcaagtgttccgtcccatctgtctactagtagtcactacttagattgcaaactttgtgcagagaggagctctgttgtatatgccattgtgtccctcacacctggttcataggacatgctcatcaatagtttcttcctgaatgggtttgcaatgccttgcatatgaaaggctttgtcaaaattcatgaagtggaccttgctaatgactcaggccacttttagcttcggaatcaacacaggcatattaggccggggtaatttcacttttcacatccaaattggtgtttatttttaaattatttttaaacttggagacaaaaacagctggattatacattgcttacagccaggcagtcagcagccccaggttctggttgacattctgccaaataccccaaatggcattagttgcacatggttccctcagttttctcccctgtgaaatgaggatctggagtctgtctaggttcccgattccaggagcctcccacaggaatctctattgcttacctgccttgtgatttctagtgcctcattcagcagaaaacagcacctgataaatgcttgatgacttattgatcaaaaaaatgtctattagactagaattctttatattttgagatgggttacactgtcctatgaagtttctggaaagttctggcaaatatcagcttcttgcagtgtgatggggattgtattcaatgatgtatttaatgggggaaacaatggttttctttgggggctctctatactgctattgggggaatgatataatacgaagtagtgtcttcgctgatgctaattctaaagctttcctgtcactacggggatatcacatatgcctgatgccaccagaagcacgaatgtatcacatgtctcaagcaaaaggcagaacgtttgagctcggtaaacacactcacattcattcactagcagggatttgtaaactgtttttctacacatggaaatagcagcgtgagggcaaaatactgtaaagtcttatagccagacaccatcacagattgagctcttgaaatttcactttcagtgtcagggaggtttctttgacttttccatattgtcaaaatatatgaaagaaatatcctgcaaaattaacagaggatgcgattatttgctttcagtggcaatgtaccttggcatagtaggggagggtaaggattgctagagcaagtgatcatagttcacaaatcagaggatcaacctaattgctaccctctacttcagaaaacttacccgtctctgtatttccacttctgtgaatgaagtcaattctggtgttaagacacagagagcctacaaatgcatttctggctaacattaattgaagggaaaatatttgagaagagtcttctttatctttgatgtgaaaaagtaagctgcagcaaagtcttagagatgaacagaatagcaaaatataggatgtttaatttgttttatatgttccaccaaatatttgtgaaacttgatacttctgagtcctatagctgcgtaatgacgtaatatttaatttaaaaggatttcccttgtgaagcatattgtgttgattgtaaaacctgtatgtttccttataaggtacctatagttcatcttttcactgtcttgactacagggtacatggtaagatattgtgcaggtgagatgtgatgcagcacttgttaacttctttctcttttctcagtttccattgcatttttgcatttgagttcacatttatagttagactaggcaatacactcatctccatggttattagttattctctttacatcacaatttcactcttctgcacatgtgtctcacaataagatttgtttttacgcagctgtgaaaagaagctacacacaattgaggagcttctacctcatgccaggctcagagcactattatctcattttatccacatgtaatcatcagtaaagatgcttatactcacttttttttcctccaataaggaaactgacatctagagagatcaagtgattttctggtgttcatatgttagcatggcagagccagaagttagacatgcaggtatctttactattttgtgacctttgcaaaagcactgaaagctaataggatttttctttttctctcttggaaataacaagatgcagtggaaagtgtatgggatgcccagtcaggccattctgggtgtcttttatactcctgatatgccctcaatgggttttaggaagttacctaagtctcttgggcctcagttgcccctgagaaaaatggggttgatcaaagctccctgcttcggtgtctcggattagaaataccatgtgctaagaaaatgtggcacatatacaccatggaatactaggcagccataaaaaaggatgagttcttgtctcttgcagggacatggtttaagctggaaaccatcattctcagcaaattaacacaggaacagaaaaccaagcaccgtatgttctcactcataagtgggagtttaacaatgagaacatatggacacagggaggggaacatcacacactggggcttgtcggggggtggggggctaggggagggataggattaggcgaaatacctagtgtagatgacaggttgatgggtgcagcaaaccaccatggcacgtgtatacctatgtaagaaacctgcatgttctgcacgtgtatcccaggacttaaagtattgaaaaaaataccatgtgctgccaggatgggctggatcaaagggagcccacacttgtttccacctttttctccacccagtctccttttcttcaggccatgagacatctatgaggttattgatggatgctgctggtggaggagcagctcagtgagcctgagggagggaggttttttgtttttgtttttgtttttgtttttttggtttgtcggcatcaccctgtaaaagaaaagaacaaccaaagaagcaaaggcagttatgcctttcaagcttagatgcaggaattggaagaggagtttgtgggagataaatcaaagaaaattgactagaatagatacaaatgaaatttgagtttaacaagtgccggagtggtgaggcaggatttgggatcctcttgctgaaacacaattactgcacctcaagggagctggcttgttggcaaactctcaaggcacaggtgcactcatctcattctacggggactgcagctcacagcccctcccacaggcagagctctaggtagtcagtgagtgctgccttcttcttcctacacatgctcacatcctttttcaaaaagaataggtactgtgtattagactctgcccataaatcaggtgtaagataaatcaggcatttgattccattcaacatcttaatcttgatgacagccctaagaagaaaacacaatcatttatatgttatggatgagataacttggtaagagaggtttaactacttccctgaggtcacacagctatttgggagagagttggtgtatccaataccacattgtctacgctggctgtgcaatagcacattgtctagggatggcatcctgggagcattaggatttgcctgcttcatcagaggagataaatcttcagggctgtattgcttgttagcaatagagtctcctgaaatatgctttggctgtcctgtgaatgccagtgattcaaagatccttgccaaaggatcatcataaatcctgcttagacagagaaatccctaatggaagaagggttctttgcagtgtcccacagccttgagcattagtgtggagaagaggacaatttgcaacaatgcttgagtgagagtcaagaggcctatttacatggtcagggacacagatggtcccgtaagtaggatttgatgaagagagccccctcatcccacttggagacagggaaacgggctttaggacagtgttgtctgaaaggccactgccacatgcagagtcctctaatcctctgcctgagtggctctgtttctttcagagacaagaagcttgtctgacattctgtcccccagcatggtgacaattaaaggcatgactgagagccattcctttcaggcctactttccccccatttttccctatccaagtctagctgacagaccaggctggcagtgcacacccacaaatggtggactgatgagcagacgaccagccatgcaagcctttccttccatgaattcagcctgcttatgtttgccagggtgtactatgtgtaggacacagtgccatgttctagagagtgtaagatttgagacagcaggaggaactagtgtgtgtgtgtatgtgcgcatgtgtgtgcctgtgtgtttggtaatttccaagtatatacactttaatagagaatattaaccatttcttccacctaaggatgtaagatgatttaatatttcttttacaatgtttgcattgttctgtataataattaggaacaagttaaagaggaaaatactattttgaatgtgggtctttatcactactcaaactctttctttttctttcagttaagttgtttttatttattattcttctctctcccctcctcttctctatctctgtctgtctgtttgtctctctctgtgcacacacacatattctgggggaagatatgggcttggaaatagggaaaattacacacaagggtacatccataggaacttgtcataaatgttccaattcttgggtgctttcttgggactttggaaaaagtcatgccattgttcacatattgtgtgtgtgtatatatatatgaattatcttatagcaacaatcctataaggcaggcactactaggatcacattctatgtagagaaactgaggttcagagaagttaagccggggggttgcacagctaccaaatgatggaggctgggtgtgaaccctgagttttttaaatccaaaactctgaactcttgctatttcctgcagttttactgaagggcagtgacagacagttaatttgggtatatcgagctggcactgttttattacttttagcagcaatgtgtcccctttggagtctgggtgttttgcacagctctgttctctgtggcattcctatccctgcttctgtagccattcaaaagaataagggaatgaaagttaaatgaactccccaaagggcagtcaccaggagtcaataggtatttgctttattctatttgtttgatttagaacaaaacaaaacaacaaatgttccccgcctctgggtccaaggacttagccacagctttagcaacagccatgaataatgaaagagtttccaagttatctgaaaacaaccatgacatcaaaaagacaaccaaatgaaactcaggtgtttgcttcccctctccattctccaagcatctactttctgcaaggccttgcttctcctgatgctgtctgtggaccagtggtggcctcaccatcacctgggcacttgttaggcaggacctggacctcatcccttttcccagacctgctggagcagagtctgcattttaataaggtccccaagtgacttgtacattacagtgacagaagcacactctgaagaaagaggaggacttacctcccacccagagctaggtctagtttgggatgagtgagtcactggcccagggtccaaaatttaagagggtacccaaaaaagcagtaatcaacaaaagcaatatattaaaaaggaaggccaagtgtggtggctcacgcctataacatcccagcacttcgagaggccaaggcaggtggatcacttgaggccaggagtttgaaaccagcctggccaacatggtgaaaccccatctctactaaaattataaaaagttagctggatgtgttggctcatacctgtaatcccagctactcgggaggctgaggcatgagaatcacatgcagaggcaaaggttgtagtgaaccaagatcatgccattttactccagcctgggtgaaagagggagactctgtctcaagtaaaaaaataaactaattaattaattaaataaaaatggaactggacaattgcagtcttctcccttctggatttttgggggagagggcaggggaagcttatggggtctaggtttcttgttttctctaaatattctgaattttcagcaagtgaaattacattgagttgtttccattttggtccacatacttatatattattggattttcaataactgtggttagacacaaaaaaatgtagcattgtaacctaagcatttattctgcaaggtcagttcaaatggccaacatagatcacactaatgatgatgataatgatcaaggtaggtagcctttattaagagcttgctctgtgctgagtgcattgcatgaattaacttatttaatttttataggaaaccccacatgggaggcacaccctaatctccattttagcagtgaggtgatggaggtatgcagaggttgagtagctggtttaaggctatccagctagtgactagaacaagttggatcaggcaacttgcccagagcccactctttactactttacaatatacaatacaatagtgtaaaataaatttaaattgtttttaaagttctaaagcaatttcatgcatccttttcttcaatatacaagtatttcactgccaagtgtgtttccattctgaaaaatctacccctttaggtttttaagttaaaaatgctccctaaaacaataagagtaatagatagatgatgtcatttactttttaaaaatatccataaaattttggctgccaatttaaaaaaaaaattggacaagaagatgctgttagttcaagggaagacaaatagttcgaggtcctcccttttggattgggaccctgccgtgggctgggggtaccatgagcctggtgggcacaatgtgatcctgcctctgccggacttggcttcttctctgcctgttttgtagcaaccactgcacttgtctttcttgcttgtgtctgtgtgggtctcattagcagtgggtgtgtgtcttaccacagtggctcattcacagggctgctggcagtgccagggatcaggagccgcctctccgtctgtccagaacaaagctgggctgagccctctcacggtcctgtggcccttggtctccccacatgaggtgtcccgagattgaagagagaaggtgcctcctggcattgccaaggctggaatctgcctgtcaaggaagtccctcggcggctagctgctgcaccatgaccttcgtgatggtggagtgagtaggcactggaatcaataagcctggcctctccatctgccagcctgaatgcaggtgccagttactactacccagcagggacgagggacgggaacggtggcgcatagatcccagcaaaggggattggcttttgtggacacaagcttgaggctggcagtgccgttttatttatgtcttgtccctgctgtaacagctgccgcctctgtatgcctttgctctttctgtactttcggctcgggtcacgatcttcctttgattcagagtttgtttttattccagcctggttgctgctgccagagccatggctcaacggcttggcctggactgttgatccgcatgtcaggagtttccaaaagtttgttccggtctatctttgagagaaatagcatggactggatcccatcgccagattgtggtgtctggggacacgcgcttggggcactatttccatcttctgtctttgtctggtcccctcctcattaaatcttcctgggtctgtggagctgactaccaattggtgcctgacctagttacagagagccactacgtaaccccttactcatcaccataaatggatcataaccgtttgttcactgtgattcaaagtggactctgctattttagagtcgtttctccctttttggagtttgcgcatgggggtgtatgtgcatatatttatacatgcatgtgtgtatgcacgcgtttgtgtgtgtgcgtgtgtgttgtgcagctgcctaaattaagctggcattttccgttgctatgtggggactctgcttttggaaaacacttctgtggcattgtatggaatcgttaacgggcttgctggtttccctgccttgacctcctttcattttccactgggaccactttctcttgagcataggttctcacattttctgctcgaggtgtcagctctgtggccactcttctgccaaagggcaccagggagttcctcaaaggaccttttgaactgtttgttcaatgaatgaagagttcagtcggacagtgacgaggacagcacatacctctgattggtccctgcctcagaattgctgggcatgactcatgcatttggctcttgcctctgctgatctcacaagccatgtgggaggttggtttttttcagcgtctcccagagtctgtgaccttgtcatcaccattttgccttgcattttgaaaaatactctccctgaacaaattgtgtttataaagtaacaagcaattccttttcctatttttagttattcatttgtacctattttccaatcagagtttctaatcagtatgagttaatcagagttaacatttatttatttactgagcaccttctgtgtgactgacctataccaggtgctggcactaggaaagtgaacaagattcagtcttagcaggggtttccaatgcataataatatttctgttaattcacattaatttgggtaaaatttattgctcacccatggcatgtgtggggtggtgccaagtgccttatgtataccccttctttaatcttcagggcaatgctgtgagtttgtcattagagataccactttgcagatgtggagactgaaacttgtacagttgagtcgagccattcactcaaagtcacacgttcaattacagggtagaggcaggatttgaaccctggattgtcagactccaaaacttgccccatggagattatagtcaccagctccctgcattccttccttcactctcctactggataggtgtttgcttttgtggacatgaggagtgtcctatgttctctccatgttccgtggcttttggtttagtgtgaggtgtctgaatatcctggggacaaatgaatttgttgccccataaaataacggagcttctagctttctaagatattaaacttacttacctcttgattgttcagatggggaaagtgaggctctgagtgcaaagggatttgccacaatcgtacagtggcagggtctggacttatactcagcagctctgatctacaggctgatggggttattggctaatttattctgagtcagatggcaaatctcaagagttctcctgggaaattctatccaggtttgaggtcagagcagccaaaattagatacaatgcaagctcatgaggggcaaggttctaatcttgttcatcaccgtgtccctggtccccagcacagtcctatggtgcaattggtggtcaactgatgtgtgttggaggaataaactgggtgaaatgaaaggggcttccagggagaaccttctaaggtttgtgctatgggattggtagttgcttacctttcttcctgggttctgttaacccaagaaagtattttagactcaaattgatggtatcaatatttaatttgacacttcgatgattcagtcatttggtattgtaaaactatttttccgtttctattttggaataaattggcttgttctttgggcatctctgggcagagtagtttttcctggctgtacaaaaaagaggatgctcaggtatcggtatttgtacccaagctcactttagatgtggccagctcaggtgtctatgttgcaaaagaggtactccatgtgtcatgaagtgactacaagattaaaaagtgtttccagaacagacaataccttaaccatcatatcagaaataaagaagagaggaaagaattcacccagaattcattcactctgactcacgaattgtccttattttcttcctcctactattcaaattagtcagaaatatttttacattattgtaattggagtcgagatttgacgtcataatgaaccatgtggaaatagtcccaagtattttcccatgtttctttataagtcacagcattgtgactttggggaaagcctgctattccatgcacagcatgtattctgttttacttaaacgttctcctattacaacaaggcaattgtaactttatgggaatgtaaaagagtgtttcttgttggcaatatgggtgaaacttaatgagattacgcaaagaattgcaataccgacaaggtcctttacttcaagtgagtttttctgtttggagtcagcctaatgctctattttcctaatgaaatgagaatacttaaaacatgcatagggaaacatcaaattagtcaatattagaattatttttgttctttttctattttttataatttaaataattaagatgacattgaaagcaagcatctttcttaattgctcagagcatttttcttatttctgaaaatgggtggcatttaactgagagacaaaacaagaacatcaataagaaattaaagcgaatggcttagaagtgctaacctggtctttaatgtttcttcgggaaaaaccactagaaaagcagaaaactgttcaagtaaatccatctgctaactttcaggtcaaacctgttaggattagttctttaatgaggttacagggttttgggcgatgagtgtgcagaaatgatctggtaatgagctgacttcgaagagaagcttgagagagctttcattaactgtgtttgcatcataatttggcaaggtcacgggagagagtcttctttaggccactaaaaatagacagtctcatagatccaatcatgtcatcatctctctccctcttttttttttttttttttttttttttctgtagtcatatcttatttcgggagctcccttcattcttctcacccacctgcctcctctggaaccctgtgattactttgtttaagacactgcctccttgtgtgctgaagaagagaggaaagacagggcatttcaggcccctcactcacctgattactttatcttgcagtttcccttcctccctccttccctctttcccttcctctttcccttcttctctcatttccttcctttcttcctttccttttttctctcttcctttgtctctccctctctccctgccccctccctccctcctttcatccctccttcccgcctttctttcttctctctctccttctctccctgccccctccctcccttcctcccttcttccctccctccctgctttccctcttctctctctccctcccttcttccctccctcccttccttggttccttcctccctcccttccttcctccctccctccgttcatttctccctccctccctccttcccttcctttcttccttccttcctctctccctcccttcctcccttcctttctccctccctttctccaattcatcctccctctgttcctttctctctcccttcatccttccttctttccttcctctctctctccctcccttccctcccttcctttcttcctccctcccttcctccctttcttcccttcttcttctcttctcccttcttccctccctccttctctttctctgtctcacctttacataggtcccaattctatgtgtcagtgtgcatagaaatacttgatatacaattatttaaaaagtaaaaacaatgaatgagctccatttcaaagtaaaaagaatgaatgaatgagcaataaagaagacaaaacaataaatcaatgagcacaatttcaaaggaaaaacaatgaatgaatgaatgagcaacaaagaagagaaaattcttgagagaatggtggggctagaaagacttctgcttccctcgaaagcatacttcgctactattttaatacctctttctttcacactcttgtacccccactgccaaatgtgtgctctacttacattgtgtatgtgttctatctatgccttgtcatctgtctgtggttgtatgcatctgcccatatctaaacatatacatctgttcagaatgaggttctgtaaaaattcaaaggattcatttaactcctggattcgtcgtttctctttttttttttttcctgttgactctttgtatttcatgcaggttttggtaaggaaaattcttaccctaacctctaaaacatatagaatggataaagtagagcttctgtggattaaatagaagaaaggagaaagttgtaggaatctgcagaagcctccctccagctctccccaccacaccacagcccctgcaacagcctttgggataccccaggaataccactgtttgccaagaacagttagtaaaatcactagattagatcactgctgacttttcatttggctcttacatcctgtgatttgtgatgtctctgatgtcaaactttaagtccaggtctctgtgtttatggtttgcagcaaatgcagatgattctgaagtaggtactgtaggagctataaacacgatgcagatgacagagtttctgcttttcataacctcacagggactggaggagcaggcagacagttgggaaaatggtttcttaaaacaacaaaatgttcaaacacataagaacagaatgactgataaaggtggttgtaagtcatagttgttgcctctcatttcatcaaatagttactgagcatcagctatgtgctggccacatgtgtattgctttaaagaggtcctaagaagatatgatcccctctctgttttattaacgttttaaaattttctttgtgtaagttatccctgtctaattctttgctgctaatttttctgtttactttttaactctaccagaggctgaacactctgtaaaaagagcaatcttacctgtttggtatccagggatttgactgatgcctggcacataatagatgctcaagaaacatctgctcacagaattacactgtgtcattatctccaccaatcacagtggttggcggagatgatgccacagtgtaagctttgtgcgtgtgtgtagttgggaaggtggactgtcaggaggtgatatttggccaagaccttaaaagacaaggataagtttgtgaaaaaggaagaggaagagatattcagttcagaggcaaaagtaggaatgaaggaggcagagtgaaacaatatggtaagttgaggcaaagcaatgggttcctagaaggagcttccccaggtgaagctgaagaccagtgaggctcactaatgaagggctttccctgagggcagaatggagtggtgcttaagagaggacgctctggcgtcagactgcatggatgtgaatccctacaagcaaggcaggtggcatcagtaactcaccctctccatcttagatttctccactttcaaataggggttatctatgcaacaatccactttagcacagtatctggaacatagcaggcttggctattgttaaaagtagaggagaccaatccaaggagaccttgagggctttgcaactgagagtggcatgagcaggcccctggtttagggtgtgcctgtagcagctgtgtgaaagaggggcttgctctcaggtccttctggcagaaagatgctgttgagtatcttcctctatctccttccttcacctctgtgggccagtgatgctgttctaagcagcccaataattatctttccactatgtttaagattgttgctttgtgtcttgcacagggttgtctctgtgggaaccaatgggataaatagtatgctggcatcagtacccagaatggctgcaatacagctcagcagcagttttatcttcatgggtcctgcggtcctgtgccaggtcgtgtgtccccgtccctttcgtgaagcagcccttgcaactaatatgactttagcccaagctttgcatatgaccttcattcaaattatttcatgctgttctttctccttttcacatatttagtattcaaaatagtcttatatgtgtttgtactgtatgcacctttgtaggcggcctgaaattccctttggaataaaacaggatattggtaaaatgcacggcatgcgtcacagggaggggcatgaggtggagagtgggccgggtgagtcttcaacctagtttctttgtgaagacctactttcctgtagggctttagactctgctccctcctccaccaccatgtcggaactggcatttgtctctccctgtaattccttctctgtccttggaagagaactgtgatcatttcttgcagtcccctcgcatagctgacctgacccgtgatattaatgaaaatgcggtgcagagaccctgggatgctggaggcagggtctggggcggtttagatgctgtaggcaccgctcctcacccatgtccccgttgggcctccgtctccctgtccataaaataattgtggtgccatggatccgtgttcctcacctctcagtcattcaggttttgtcttccctaatatctggatacaatcacattgttatttacttaatattttcttttgactccttctactttctgctatttaaaaaaatatttttgaagaaaattatattgctctaatttctggaaagccagtatctcttgtcataaatatgaggcagtcaaaaaacagatacaattaaaaggaaacaacataattgaatcctctctgagcctgagactgccttgtctttgttaaaaaaaggtttgtttaggaatcactgcaaacagagactttctctttgctgacatcaggactgagaaagaattgaaaaggtatgtctccatttcccccatttattgtctctgaaggccagtaatctggcaattggtggggcccctgttgtgtcaggtattgcattaatttctttatgttgagtctttgtaacagaaccctgatggtattgacttatatttactgaacagtaaatttgtgtcagaaacaatagcgtgatgtgcacatattatcacctctgtgctcgccacaggaatgtgaggtgttatgttgctcattttacaggtaaggaaacagagtcctaagccacagaactgaagagtcatggaggcccaaacaggaatcagcttgcagctgcatcttatgccaaagtctttctaattccacaaattggccccttggcttgctgggggacatgcccctttggtttggctcctagataaggtcctctgggccttctctgaggaccatcttgactctgaaacctggctgtgcctacacatcaccctgagagccaaaggtgacccctccctggccgccaaggtcttctgcacatgcagtgtcctcttgaagatggccacatcatggtattgggtttggcccatgaaatccccaacacatgttgaatactagagaagtatcagctcttagctctgtgtttcctgaagtgtggttggaacactcataaagggaggtgggatgcttttagccaggggaactgattattccaattacaaagttctgtcatttcaaagtaggaaacaatcttactgcccatcaaatccaccctggtacccaatgccaaaattcatttacttactggataaggaatgtgactgaaatgtttacaaatataaatgatcaagttatgaataacatacacatgcatgtgtgtgtgtgtactgacacacatatagatactattatatatctttatatctctgtatgtagaacatttgcagatatcaaagccaaggagtcattttaaaagcctgtttagaaagacaacctccttgcttcttggccttttggctaagatcaagtgtaggtatccagcctcattttcttgatggaagccatatgatagagaatatgaatattgtagaagaagtcctcctgaaacctctgatccactgatttgcagacaaacagggccatttttctgtcatttccacactcatgatccaagcacagtctggtaagatgacccagctccacatagctgttgacagtgctttttttgttcgtttgtttgttttttctctttattttcagttcttaacaatggagttagtaaaagtaaccatccaaagagtatttaaaaaatgaaaagaaaaaaacatccttgagaatatgtgttttgtgtttgtgtgtgtgtgtgcagtcacatttacatctaaagcacacacacatgtgactcacaaatcgaggtagaatagcctacataaagcttcctatgaaaatattagattctcaatattgacaaatgatttttcgcattcttcaagaatgtcacaatttgtgcatagcagtgaagaatgttcttccaccaataaagtccagcaaacgcgaaactgaaacattttaatggcctgattcccctgccgaccctgggtgaatccagtgtatttaatgaggtgtgatgaggatgtagagcacccgctagactctctccctggctcacgtcagcccctctgtggccaaattcaaatttgtgcctgaagaaaatcagtctccacttactgcagcccttcagaagcacttgtaaataggtgagaccactatgtccagggctcagatttttatttactaagtcattggtttgaaagctcttttgaagcatttagtttgtgcctttgtctacctgattataaagtggacaaggaaacatatatgcttcttatccctgtggagtttatagacaagcagagtttgtacagcttgtgtcttcagagtaagtgcctaggaaaaggcaaataacaaaatggcatttttttcttaacctaattttatattgcaaaaggatagtcccacttaattttgagaaacctgattttgtttctttctgagtataatggccccagagggaactctctcctattatatcataaatcagttgtattgctatggactatgcagtttacttttcttactatggaaagatagcgggaggctgtgactattttggcatacaacaaacactgcagtgtgtgtgtctctgtgtgtgtgtgtgtttgcagtacttctctgactttgtgaatatggagatttgcatactccagaaacttgcaaataagcggatttcttggttgtctggaagttgcccagatttggtaaaatgtaagagactgtctcaggccttgtgtctggttaaaggtctttgtttttctttattacatgcatgggttctccttcgtagttggtttctgcttttcctggatagttaggtagcctggtaaagtgatgcagtccttagtcatgtttcttttaaatcattggactactttcctaatttagtgccctattttatagccaaagaatggagtagagtacagctgttgggtgaattgctatagatgcaaactgcctgtgtccgagtcttggcttcactggtgagtggctttgtgattgagggcaactttactccgtctttttgtgctccaatttcctagttgtgaaatgaagaaaaaccacagaacctgacttataagattgtcataagatgaaattgtgtgttgtagaaaggtacttagcccaggacctggtccattggaaattctcaataaattttagccatcataattgcctgtttggattaagttgtgtctgcggaacattcagctcctgggggatagagaaatgctgagagttagcatcatatgtacatgatggcattcatgccttaaatccccaaagatgattaaatgcttcatttggcatgtgaagtatttagaaaatattgaccacactttttcaaacttaatacttgcacaaacacaggcatttaatgccagtcagaaaatacctgttggtattttattgttaatagccgattatttgcaaaatgataacctactttactgattttaaatatttaaatattatagaaaacaaaccaaataatgccacgttgcatttatcaaagctgaataatttgtgccaaatgagtacattattacagtccttgaaaacaaattacaaattatacctgtcatttgacatcaagtagataaaagtcaataggtattttcaatcttttaaattaaaaaattatataattttgtggccattctttgtctaattactaccgttcatttatttctccaatagtctagctctgtggagtgttagcagtgtactgacctgggacaaacaaaaatgagaataatatgtgatttctgtcctcaaatagctcacagcttccttgatggaaagttgggaggaccaaatagccacaaataacaaagatctctaattgtgggagaaataaaaaagcactatgttacactaagggaatcctgaggccctctgagtttatgctaggtactgaggagaatttccatcaaagtcacactaacagtaaatggaagaagaggtcagatgcagagaagcacagaggtgcacagcctgccaggctcaggaacagcagtacttactgaagcaggaggtaaggtgggcaggtgaggctggggacagacaggagtcagatgcataagctgtgttaataaatgtggaatgtgggcatctcctgacctgacgggaaaccatttagaattttaatattgtcaagttttttttttaatgtaaaaatcaccattcttctagttgatggcttctgttgaaaaggggatttctgtttgatcatgtgcattatattcaaatgtttagatatttatacatgacaaggagacaaataagtaaaataaaatcagctacagaagaagaggttaaagttattctggagcatatgtgattgtgtgcatgctggttgctttgttcaccctagtagttctttagaaaactttacatactgaccatatgggcatccttaaaactttcctgcagcatgcttgtacttatttttgtctgcttctcacctccaccctaaaaaaaagtttaaaaagtaaaattgctagcattttaggcaaaaataaaatatactctcctggagaaagtcttttcattttccttctattctagctgttctcaagttgttaataatatagtctctctctctctctctctatatatatatatatatgcaaattttatagtgggtgtgcttagatatttccccttattctaacttttattcttctttatttggtagcaaaatcatcattgctgagtgggaggggaagagtctttggagcaagggaaatctagattggaattcccactctgccactaattagcttggttatcttgggcaagttgtttaacttctctaggttctaatttcttcctctttcatgaggcagaaataaaatttctagtgttgtggggaagagtaatttttacaaaacacatgtagaagcaccaacgcaataataccgatggcgtgtagtagatggcacgtaaaactggagcttctagtacctcagttgttaatatgttgaaaggagaaagtgaagctacataatttgggcaagaaatacagataaaatgtagtgagtagtaggaggtttgctcatatgctagatgactgtttgtttattcatttcccaaagatatgacaaaggccgtgaatatttatttagttctgctcccaatagcccttctaatagggaattatttgggtacaacgaaagacatttgtaaatgcggctgataagaccggcattggacaaggcgtgttttgttggacacaagaattctattgtccctggcttcagttgtcaagtgcccggggaacccagaatttatggtggcagcacaatgggcctttcagggctcagggaaagagctgtgagatcctgctccccggcttttcaaggcctctagtctttttatcaggcctggacaatgccggattcagcggctgcctgagcctcctgaccgtccattggccgtcaggtattgtgcagtaattaccatggtgacaatggactctctctacgcccgtccatcggcgctttggaaaatggtgaaggttgtcactttgcattaggtgcctctaaaagcatggcttacttagaaaaactactaaatagaaatgaagataatcgtagtaagagtttgatttaaaaggccactgtgtcaaatccatttggggctcagaaactctttatggatgtcttcttctaattacagatagacgttgggcatcatcctctgtacaggcagtaaggagccagccttgaagattttgcaggaagggatgagcagaggacagctggtgtcccctaaccacgcagtgggagtagaggtctaatctgggtccaggaactttgaaggatctctaaatttctttgagactcagattcctcatctgaaaaaaaaattttgcaaaatgcttatagattattattaattacatgtgataaaattgtatgttaatatttatgcacatatcaatattggttctgtataaatacacatctattaaagggtttttgaatagcaaatatacaataaaaggtaaaatgtttaatcatgcacaatcatagaagcacaatatatcttttcataatcacaactattgatttttgagtgtataagtgaagtgttccatgtattgtgattatcctccacaatcattcttcaaaataattgttattatccccattttatagtgaggaaactgaggctcagaaagttcttgcttgccccaactcaaactagcttggaggaggaaaaacttgattttaagtcttgttctctcacatgcaacagcttcctgtttctcccaattttttacaaaaaaaatcatgatctacaatcctagcttacgaaatatgctttaccatatgggtttggaactttgcaataacaggaaagaaaaacacccaatggagattattaactgagtttaatcatccgttcaacaatgtcagaaacatgtgatgctcaaaaaaggaagaagcccccatctgcagacccccagggatgactgtgtatgtgtgaccccttctcctgcctgcacagagcaacatcaacaaagcaaattggtatttctagaccaccagaaaagtggatggccgttgttcaacttcttcaccaaagaaaagttttaaaaacctgatatttcacttgtttatacaacagtaacatgtaaacatttaattatagtttgctttaactaactatgttccaaaatatccaaaatatcccattgtggtggctttttgtttgtttgttttgtgttgttttgtttttgagacagggtctcactttgtcacccaggctggagtaccgtggcgctattttggctcactgcagcctcgatcccccaggctcaaacgatcctcaagtctcagcttctcagtagctgggactacaggcacctgccaccacacccagctaatttttttttacacgtttcgccatattgcccaggctggtcttgaactcctgagctcatgtgatcctcctgcctcagcctcccaaactgctgggattacaggcatgagccactgcagctggccttcccagtgtgtttttaccaaaaagtagaaattatctgtagtcacacaccatgggaataggcatgatttgcctggggagtgggcctcctggtgggttcttaaacctagggaaaaaggagtgggtttattgatccagcccagttatgctacttccttgctctatgcacttgggcatatgccattcagcctcagtttctcaatctgtaaaacggagtaactccatctcctcgggctatgctgctcccttcattgacaactctttccattttaatggagagcctaagagagggaaagtggaaaaaggaaggatatggctctgcacgtactgagccttccacacaatcagagcttagcaaaagggagctgccacagtcacagctgcatcctccactgactgtcttccttgattttggtatgcttactgagtatgtccttcattccactttatacactctggcttcacggtgttccttttcctgatttctagtctctctgaaatagtatatagcatgtactgtctgagcccctaagaggcttagtgctgtgggcagccaagcacaatgatggaagggctgatagatgacaatggcgctgtacttgaagacagcccatgatggtgtgcagagctgggaagatggcagagagaagtcccgagagtaggtaggaagtgggtgcagcaaggctggagtgtggtttcctggctgagaggggaacacatgattccaagtcttgggggagtcatgagctgtggggaagatgaaggaaaatgaacattccagccatgaaggccggtgcagagaatgcagaaacagatgacccactatagcccgcacagccatcttagctccatcaactatgctaaaagcataaagaacaacttggattttgtatgttcatttttttttgtaagaaacatgatataattgtataccagtttttttcacagaatccacagtccctctttctcaaatgtttgcagtgattagaattcatagacaattcaccatctatttttgcttttcttccaaagcttttttgattgactgcctaggcttttggtgaaaggatttctataggaaacattttgcagggaggtaaagaatgcaagacaaagtggggagttcgatcggtcttttacagatttgagaagtcaaccctttttaaacacgctggccccagtcacagcttcattattaacagaagactagagaaggaaaacagaaggtacttgggctatgaggtcagcactgctggattccaaccataccctgggcattattggctgtacactttcagcaagagtcttacctttttgtgttgtagggtgagatggcgttcataatacccaggatggttatatgtgcttaaggataattcactggtgagatacatggcaaatatcttttccacccctgtttataacattccagttatctattgctgagttacatgacatcctaacatttagtggcatataacaacaacgtattactatctcttacagttttgtggattgattgaattcatttaggtatttttacttgttctttcctgccatgtagtcagatggctggagttacatgaatatttttatgtattaggtgtccaagatggcatctttagtcacctgtctggcacctcagcttggaaggctgaaagagctggaaatggattggcacctctctctccagccatacagcttctcctcctggctgtctggagctttctcacagcacagtaatatcgagtatttgaacttttgacatggcagccaacttctcctagagcaagcgttcaaaaagcacaagataagctacagggtttctgtattagtctgcttatactgctataacaaaatatcacagattgggtggtttaaaccacagatcttaatttctcaaagtcctggagaccagtaggttctgttctgggtgaggatcttcttcatggcttgcagacaacagtcctctcactgtgtcttcacatggcagaaacaaagagagagctctgctttcttttccttttcttagaagaacaatccttcatgacatcatctaaacctaattacctcccataggccccacctctgaatactatcacattatgggttagtgctttaacatgtgaattttggggaacaaaaccattcagcccataacattctactgctgatcctgcaaaattcttgtccttcttgcatgcaaaatacattcattctataccagcagcctccaaaatcttaacttgtttcagcataaattctgaggtctaaagtccaaattctcatctaaataagtatgggtgaaacgcaggatactattcattctgagacacaatcagtatggatgagatttaaagtactgttcatcctggggcaacatttgtctgcagctgtgaacctatgaaataagataaattatgtgcttccaaaatacagtggtgggacaggtgtaggataggcattccctttctgaaagggagaaattggaaaaaagaaagtagtgatgtgttccaagcaagtttacataaaaaggcaaataccgctgaatcttaaggctcaagagtaattttctttggttcaatgctttgccttttggaccgaccagggtggaggtccctctcccatggttctcagagtgtcacttctgctgtttcattgttatgcagagccagctcatagtcccatagaaggagactgcacaagggcatgcctatcagagtgtctgggttattgtggggtaattttagagactggccacagcatgtaacatggttgacaagcagggtccttcctcattcgttatgcattgtgtgaactgctgcatgtagcatttcctccatgactccctgtatctccaggaataactccagtgttactctgtcctgacatttggataaatagcacacaagaggacagctttattgttcatcttgctacagtcaccaaaaccaggctctatgaacaaattttagtagatctaaggtccatccacatcccttcactaaaaagggcttttgtttgcttgtttgttgttttggagaaggctttgtgtatggtgttcgatggaagcaatatcaaacaaggaaagagatttggaaagaaatgaagtcaagtcaaagaaataagctgtttaagcccctaatgcaggctgagttgatcctagaaggtagaagcctagagatgaaggacattcaagaactcctttatgctgttgtgttatggaagctatgccagctggcacctttcttggttcagtgcctcagtttttaaagatgacagctgtttagacactccatattcctttctttattcactcaacaaatatgcattgaacagatgctctgggctaggaaatgtgttagacattttgggagatatgaagatgaatcagaccagaatccaagcagaacacagcccccattttagacacagaaagtctaaaacgtggtgttgtgggtaggggaaatgcaatcttgaagagctgcaacactgtcagcccaatgctctggtctgctggagtggggatagtatctcctattaccaccactgctattgctactcttcatccttgagcctgttgttcaagaggatctgtcaacaccagaacggtgcttctcactttaggaaggaagacattgctttggctttggaacataggttctatcagaaatgggctctaagttttcataccttcccccaatagcttgttcttcatgcaagagcaaatgtatgtgaatgacacagcatgttataagaagttgtgtgtaggattgcttttatcattgtcatcaaagtacgaaacgcatgtatggttaatcacactatccggtggtacttataaatccatgacaagtttttcccacttttcacgtaattttagtaatttgtttctctctctctttgcacacctggattgtcatcttctaagagaaaagtctgtcatatgcaactgtgtttaatactgtatcacttggtcaattcatggcaccactaggttactaatgatcctttcactttttgcagaaatcactgtgttttcagctcagcggccctgtgacattccttcgtgttgtcatttgttgagtgaccaatcagatgggtggagtgtgttacagaaattggcagcaagtatccaatgggtgaagaaggtaagttggactaatattactgaacaattcacatattactatgtatgtcaagatggaaagtatgccactgggtctgtgtctcaaatgtggcttgatttggaccttcactaaagccaaaagtagaatctgagagggagagaaaggcctacgtttttcggtagtgaggaatgtgattattcagtgttgatgttattggattctctttattgaacacctattatgtgctagtaatagtaagatctggaggagaaagaaggaactaaagggattataattgtttagcaaggacccggctgaacaggccaactgagatgattgccatgttgcttttttccccttttcttttgaaataagtcttaaaatgggaacaaggtagcttatgtcccacaaggaaatgagattgctaggaggctgaaccttttagacttcaaatgacatggccctcgatcacgagccaggaggcctgatttctacacccagacctagctctgccattcactgtctgtgctatgggattaataagccatttactggactgccagggtggctggacctaggatttctaacagttcttacattttaggattctacgaatccatttaccttctccatctgctcggtggtaactggagcaatattcacaggagacaactaaatatccagatagaaatttaagaattaattctaccagtgtgactttccactcttggggaatctagaccttcttatccaagtgcctacggctcgtctccatgtagatgtccagtggtgacttaaatatgtacgtcaaatccaggtttttcctgggtcccacattcctgtaatagtatcaaaattcacccagaatagaaacatggacggaatactttaagcctctcaacccctcacctccaatagcagttaattcctcttgattcctattcattctatcatttggctatctctgaaatagttttgtttctctctatccctattgccaccgttcaaatgcaagtcaaatgttttttctctaatattactgaaattgtcacctattacgtatttttgcttccagggttatttctcccttatcagctccaacgtgatccattatctatgtatatcctgaacaatgttcttaaatccgtacatattgtactttcccacttatttcctttcaatgatagagataagcttttcttaacaagcttctaggatcctttaatgggaagggccactgttttgctgtccagattcatctctcagctggtattccctctccaccctgcctgtattatatacatccactctaggacctcctcataaggcacagccattatttcccccaaagcctcataatctctctcacctcataagcactcttaaggcattttatatcttagcttggacttcactatctctaaggagctatttctaatagcctaagattacctagacaatgctttagcagccagggattacaccatttactgtgatttctacattggactgtaattgcctttttagttgtctgtcttcccagctagacctagagatttttgaggacaggacttatttgggaccactgtgctcccagttgcaagtactgtatctgggccaaagtatgcacttagtaagtacttactaagcaaatgaatagggaccctcagtatatttttaattaaatgtgaggaaggtggactaaggtgactaacagagaaaagtcataataacagcagctaacaggttttgcatgcttactatatgtcaggttcctaaggatgttaagtgtatcactccccttactccttccaaaagccttatgtggtaggtattattaatatccaacattttataaatgagaaaactcaatcttggagaatgtattagtctgttttcacactgccataaagaacttcctgagactggtagtttataaatgaaagtggtttaattgactcacagttctgcatggctggggaagcctcaggaaacttagaatcatggtggaaggagaggtaagcatcttcttcacaaggtggcagaagagagaagagaagcatatgttaagggaggagagccccttataaaactatcagatcttgtgagaactcactcagtatcacaagaacagcatggaggaaactgccctcgtgatccaatcacctccctcccttcacacttggggattacaggttcctccttccacacatggaaattacaaattgagatgagatttgggtggacgcacagatccaaagcatatcagggaagataagtaacttgtctatggccatagtgctataacttttatccttggaatttgtatttatgggaagtctaactttagctagagtttgtgtcttaccactgtccttgtctgcctttctcctgaatgaatctcccatattatgggcaaaaaacattacctccacataaggccaggggcttttcctgcagcccacacaagctattgttaaatagatggtagtcccctgtgactgggaactatacatttctgataatttctcaggtgttttacactcttgtgttaatgtgggtctgttttgggaggacatttcaacgtgaggagtccccacctctttctctcattgtctggtcaatgtttgttaagggaataaaccaatgattgaaaacgcttatcctagaagcaaaatcgcactcccctacaaacgcaccagaatgatttggaaattgtaggactgactcctcttgcatttgcttattttgcactcatttgctccgaagcctggctcagcagaggaagtgcatccctcctgtggatatgtctgtgaatgatgatcatctcatttctgctgagccaaatggggctcttcatttcatcggccctttgaattcctcaataagatgtgcgagtgacatttcctatttttctagataataggggcaattagaatgaggtgtcaatgaatcagagtcaaaagttaaatagaaagtacttgaatttaatttcatgtctaggaaatctggtagtttttttttttttaacctggaaattaagaacagtctattttgaagagttctgcaaagcttttattccaaggagaggaaggtaaattactccaaggctggtggcatgaaacctttaaaaaacaaaacaaaacataaaacagcaggaatgcagatggaacaatcctttgatttttcaggttaagcttcttcttgatggaaaagaattctgtgcctggtggaggaaaggacttgttcttgatcgcactgtaaggattttgaagaacaaaactaaccaatgactttagctgagactcagattcttgattcccaaacaggtcaagatgccagactttcttgaacaggcacctatgacatgccacaaaggcaggcagagatgaaagggcacttcctctttcctcaaggagtttatggtcaggtaactgcatatagcagtcaaaatccaagtgggaaggaaagacggagagaggctttaaacaaatgtggcatgggctcacaggatcggcactctagttaacttacagtgaaatccactggagcttgagcttccgtttctagcacacatgtcttacttaggaacagaggaggaattttctgggcagctacaggataaggcttctaagccctgtgaccttgctgggttttcagtagagcacaggggcctagaaatgaacatcttggagaagtggaagagatttgccctttgctcaagagaagtgtacacacattggcatcctgctgagtaataaccagcaggaattgctggtcgcaggtcacccagttatctttcatttgcataggagtgaatcccagaaagctgcttctggggcagctcacctgtgctgcagaacccaccgggctctgcattgtccctgacagcttgaagtgttagcaacctgcttcctaactctctgtgctgctgggtctgtctgtgaatgtgtatttcctattttgggatgtaggccactgtggagaaggaggccaagtgtctgtctgtatctggtgtcatcagaatcataaacagacactcggttcacttgttgcctacacattgtagctcttcaatgtgtacaatgtgactgtcatcaccacaatcaactaatgattacatgaagcccttatgtggtaggtcacctgaacatccagtccctgtgcaaaatcataactaaaggaaaaacctgaaccaaagttgtgttctttgatcttgctttatttagctagtgatgggcaaagaggtcaatgacattgatattttctgagcatgcccttgtaccaggtactgtgatatgtgctttacatttattatcttgtttgacgtcaccaagactttggctgctatgcgcaggggtcatgattctttcatagatgaggatactgaggtttagagaagttaaagaacttgctgaggaccaccgatgagcgatgggtagagacagggtctccattcctaagcacagcactgtagtgcttcctattgataatgtctcttccaattcttttgtaccttgacttccagtcttaaccaagctgggatgggagggagttggagggcaattattattacagttattttggtatggcaatgtcctaaatctctacttgagtttttttattttttaataatagattcagggggtacatgtacatgcttattgtatgtgtattttgcataatggtgaggtttgggcttctagtacacccatcaccaaaataatgaacattatacccaataagtagtttttcaaccctcctcctccctttttggagtccccagtgtctattattgccatctttatatctatgtgtacccattgtttagttcccactcataactgaggatatgcagtatttgattttgtgtttgtgagttttttcacttaggataatagcctccagcttcatctatgttgttgcaaaagatatgatttcattctttttttatgactgtgtaatattctctgtggctgtgtagtatttcgtgatataccatacagccataaaaaagaacgttgtgtgtgtgtatatatatattctacatacatatgtgtgtatagagataatgtatgtgtgtatagatacacatatatacacacataaatatatatgtctatatctacatatacacacacatatatacatatgtatatatatgtagatatagacacgtatatatacacacactacattcttttttatgtgtatatatgtatatgtgcacatatatacacatatataccacattttacacacacatatatatgtatatacacacacacacacgccacattttctttatcctgtcattttttgatgggcactgaggttgattccatgactttgctattgtgaatagtgttgtaatagacacatgggtgcaggttccgttttgatataatgatttcttttcccttagataggtacccagtagtgggattgctgggctgaaaggtagccctattttcagttctttgagaaatctccacactgttttcacgaaggttgtgttaatttgaattcatactaacagtgtatacacattcctctttcttcacattctgctctccacttgagttttaaaggagacatagtgggttctggctaatgcagcgaggtgactgaatgtatccagtgagtgaggggcaaaaatggcaagaggagaaaagactctggatgtgtttactcatcagtcatcttgagaaccatccctatgttaggctttggactaggtgctggggatacaataataaatcatgtgtatcaatacaacaatggaaccgtactgttgcttccaaagaacccctcttcttgtgatggagccaggctggcaaacaaataaccatggtacagagttccttttagacagctccatggatctgtgagaacatagaggggctgacttctgctggaggaaatcaggcggagcttcagtgaggaggtgacctctgggtttagacttgatcatgagtagggatttatcaggagaaaccgggaaggattttccaggcaaagggaacagtacagaagttgttaagtcagtatttgtcattactaggtgggatgtcccatgaaatatttgtttttatttttatgtatccttagatagatacatttaaacagttaagatggttaaaatagataaagacggttaaaatttaaaaggtgagacctggcatggtggctcatgcctgtaatcccagcccttagggaggccaaggtgggcagatcacaaggtcaagagatcgagaccatcctggccaacatggtgaaatcccgtctctactaaaaatacaaaaatcagctgagcatggtggtgcgtgcctgtagtcccagctgctcgggaggctgaggcaggagaatcacttgaacccagcaggcggaggttgcagtgagctgagactgcaccaactgcactccaacctggtgacagagcaagactccatctaaaaaaaaaaaccaaaaacaaacaaaaaaaattaaaaggtgaaaaagagtctacagagaattaagtcttcttcaattcctatactctaggcgttcaatctcattccctggaagccactattgtcagttttctgtgtgacttccagacagtttctgggcagttgcaaacacacacatccatatagctacttcctccacatttgtatacatagatcacatccagctgtaaaccctgttttacaccttgatttattttttgaggcagagtctcactttgtcacccaggttggagggcagtggtgcagtcttggctcactgcaacttctgtctccgaggttcaagcgattttcatgcctcagcctcagtcccagagtaactgggactacaggcatatgccaccacggctggctaattttctgtatttttagtaaagatggggttttgctacatcggccaggctggtctcgagctcctggcctcaagtgatctgcccgcctcggcctcccaaagtgctggaattacaagcctgagtcaccgcgcccagccaccttaattttaaaaggaaaaatgtattaagtttttccctttgttttgcttgtattcatttgatttaaaacttttttaagttttaaaactatccaaacctacagaaaagttgcccaaataacacaataaattcttatgaacacttcatcaggagacactgaattttaaaaaatcattttgccatgttctatgcaacaattttatgaatttaatccctaatcaaggtacagcttggatgtcagttacctggagaccagagtgcagttcctctccccagcattgatttactgagataacataagatgttctcgaaatcaataatgtgttcctctcattgtcagtttccctgagatgcccataagcagcaaatccacccccaggatggggatccatccctaggatggagatggctggaggtgcccctctttgggccacttgatctttgggaaaggattttctctgcctcctcaagtgctcagcaagcgcttcttgggcaggtgagcatgctctccacacttgccttccgggccctgtggtccagggtggtaacaggcaatccaactgaaatctaatcacttcatttccgacaaccagccatatagacagcattatctcttctgttcagcttgtcagagtcaacacggcatctcaaaggctggtataggattctctcctttgaaagatcaaagcgcctgagcattgctcaggttacctgtgcatttcctccctgcgttacatggaaagggatagtttgtactcaaagtgagagggacttcgaacagcatgacaagcaggaagtaacttagtaaggcagtgtcttatgattttgtagtcatgtgctctgggcctaagaggattgttttctggtattcattcattcactaactcatcaaataattcctgaaagcctccttggtactattttatgctctgggccaagacatgtgcatgctccttgcagactgggtccctaggatctactgggtgacagacaaataagacagtctcagccaaagaaagtagctgaacctgagaggggtggagtggaatctccaaggaattacttcttggccattcattaattcattcatgcattaaacacgtatttactgactccgcctgtactctctgtccctacgtgattcttgagccacagaattaacatttcctttcctggctactaacccaaattatcctttgtgcagtgggggactcagagctcaaggcaattagataaatcagggaagtaaagggaacgagctatactaaaatctgccaccaattaattgtgtctgctgaggatctagaagactgtagccagacacctgacagatgccaccatttggaagctttagaaaatttgtggcagggctagtgagtttatcttttctaggggctcttttacagtttaagcaccattccaaaagctgttaggctgccatagcaacagttcatatatatatatatatatatatatatatatatatatatatatacttttgagggaaacaaatttttaaaaacttggtcacattcttgcaagggcttgtgagaagatacctctttaaatgaatgtctagcaagtttcctgaagtatcatatttctgtctataacatactattttggacctcttaacactcccaaacacttttcagaatttctgcttgaaagatggacctagggggatggtgattcattgccccaaaccatttacatcattctttgggaaaggaaagcaaaagcctttgtgtggttttatcttgctagtggtttcagccggagcacacgtccctgccgtgccagcccccacacagtgtgggatggaaccggtgcccacacaagcccccaccagggaggctggagctcaggctcatgaaagcatgtccagctctattctctcttccccagtccttctccactgagccgcagcattatttctctaaatccaaattgtatcaagttgcttcagtataaaacccaagcttcagaagcttgcagtccctctcaggataaattgctaagtcctttgcctggattctaagactgatttgatccaggcccaactcccagaagcctcccttcccctccctcccatttaactctgtccatattgtgctgctggtagcccctgaatgcattgtgatgcttgacacctcaattcccttgcacacatttttcttctcttcccccatttgtccgagtgagcagagaagcatcttctcctccagcaggggctcctagaccctgtgagatagtttgtccctttttccttctgtatagagagtgccttgattcctcagtgtctatcacttccacgggtcctgggtacatgtatcttcatgagcccccttttccattaaaaaaaaattacagtttatgaccattttggtttaaagaggaatatagtgttctaccctaaaaggtcatttttttcttctgattttaaaagaaaataaaacatttctgtgcatcctctaaatgtgttgtgggcactgtgcctactgttcctaatggagaagtcacactgatgttgctgggttaccacatcgccaattagttgtcttcaagtttgttaaatccttgagaatagagtttggctgtgtaataccatgccatctattggagtgtgtggaatgcatactcatgtgtggtgaacaggctttcgcaggaataagagcatggtctccattcacctgccttctgctgctgagagctttggcaggcactccctcttaggctaatgctgctcatccattttcaaaagggacaagatcctctcctccctttttctgcacagcactttaaactgcagagaccttccttgtgcattatccactttgatctcttgagatcaacattagctgccccattccatagaagaataaaacgaggcccaaagaggtgaagcagagcctagaaaacagagttgtcccctgcccagagtcacacgtaatatgtggcagagccaggattctactcctcccctccccccaagaccaatgccaatgttctatcaaaccacaggacaagaaacctaaattaaggcagagatcgcttcattccttttaacttttttggaagcatcaagaacagtaagaaacaggaaatcccaacatgggtagaattgcttctgcactgaacactgcaatgcaccacccagttccccagttcactgaagatctggtggtctcagctactgggaatgctcttggcaggtgacttcacttgcagctttcacctcagccaaagtcatgctcttttccagggcagctcacattggagggctgatcagtaaaagtctggccatctcagctttcttgggattattttgaaggatgatctttagcccagatgaccatgcagggtggtctgaggctgttgctgggctgcatcacacatcttctctttatgtttgtttctgattccccttccttttcttctccaggtgttattccaaagggtaccccctagtaaacatccccatgctaaactccatctcagagtcagcgtcccagataatccaacctgtgacaaactctattaaatattttgcaacaagccttcctatgtctgtgcatgaatacacaagattcatttgttcctccattgttttcactgaatgcttattcatgggatgctaaacactgtactaggtaccaagatactgtggtgaacaagacagaaaaggacctctggttacaaggaacttaaattacttctactctgaaggcagatattaatcctgtttctgcactaaaattatgcaactttcagagcattctggtcacctcagcatttacatggagtagcaagagaagcctcccatcaccagagccctgctgattgctttgcagagtaaacactgcttccaggaaatcagtagcagtgtctgaaaggttttcccaccctgttagagaaggacccagagtgaagttggggctacaaggaacttaggataggcaggagaacaggggctggaatgtctgtccacaatagatttggagagggaggattcaggtgcagatgaaaaagccagtggaaatcactgtcaggatcagaagttgaatgaaaaataccagatggagggaagacaggtcaagatttaatttgtagcaggatggaataaggtccaagggaggagtgaagtgggggttttcttgcaattctctacggtccttattttaaactatttattgacgtcctgttttaactggaataaaatccagatgcaaattttgctgccaatgctctccttgagacagtcattccctacctctctctttgcgcatctgctcagctgcatttgacaattgctgccccttgagcagacccagccctttctaaccccagggactttgcattttctattctctcagtcttggaagtctcctcacacacctttcaggattcagctgaaatgctcccttttgagaggcctttcctgacttcacaacctctgaagccatatcctccacccaccctgtagtcattggacacttcctcattgtgtctaattcttcacagcagcaatcacaattagcaaataccatgtctatttcatttcatggctgatttttatattgtctgttttccccatgggattctaagccctgtgaagtttagagacttgttcagccatgcccacccctacgtcctggatgtcaagggcagcgccatccatactagtagcactctaaatatttcttgaattaatgactaaaccaatgtgactacaccaatagccaattattaagcatttgcctaatgagttgacaggaatatgatggttggtatgtttggggcagaagcctggagcctgggctcctccacactgctgggatgagcagaatcttcagacatctctctctctctctctgagttcctcctggaccattactcagatttgaggggcatcattgcctggagcactccactctggggaagccaacagctgcataatggtttccctgcccgtgcattagcatgggccttttgggcctgctccggcttgcctgacccatctcccagcaggaaagtctgtgcatctgtaatactctggaaaattggggctgacatgtagttcagtacccaaagtggtttcactcaagcaaacgcggagaataaaagccatgcgcttaaaatgcttgagtaggtatcaatcagaagaacattccaataatccatgtttatgaagcctgttagtatgaatttttgaaatagcacttaatccactttattcttgacaaatggtgtttgtagccattgagatattttatttcaattatgtgcggatgttgtagggaaaaggtttctgacagtatcaaggcataagacattttttattgtgcttttatcactattcccattgctacactcgactggacagttcattaagatgaaaaattaacagcacatactatggagagaataatcatggaacatgattattcttcacagcttgtggaagcaccagaattcagagtagcagacagatgacaaatgtgctggtctttggaagaggtggcgattggtcaatcagttggtacccatgtgtgcacctacttgtgtgttcagctctgagctgaggtgctggaggagaaagaaaatacggaaaacatggttgttgctttccaagaacatactgtctatttgggaaggccaggaagatgtcaggtgtcaatccaggaactccaaagtgttacacaattgcccagcactttggcgctggctgtaagttcaggagaaagttcactgtggactttagagaagagttcttagaccttgaagaataccaggatgttggttagtaaaatatgttctaaaaatagtagctactgatggctatgaggttgcttctggggagtaatgaaagtgttctgaaattagatattggtgatatgtgcacaactttacaacataccagcaaacactgtaccctttaaaaggcttattacattttctatgcatgcaacaaaacatcatatgtggccaataaatatataacatattacatgtcaataaaaagcatggtctttatgatacatgaattatatattagtaagccattattttcaagcactctacaaactcaatgctgctaaattacagtaatttttttattatactttacgttttagggtacatgtgcacaacgtgcaggtttgttacatatgtatacatgtgccatgttggtgtgctgcacccattaactcatcatttaacattaggtatatctcctaatgccatccctccctcctccccccaccccacaacatgccccagggtgtgatgttccccttcctgtgtccatgtgttctcattgttcaattcccacctatgactgagaacacgcggtgtttggtttttttgtccttgcgatagtttgctgagaatgatggtttccagtttcatccacgtcgctacaaaggaaatgaactcatcattttttatggctgcatagtattccatggtgtatatgtgtcacattttcttaatcccgtctatcattgttggacatttgggttggttccaagtctttgctattgtgaatagtgccacaataaacatacatgtgcatgtgtctttatagaagcatgttttataatcctttgggtatatacccagtaatgggatggctgggttaaatggtatttctagttctagatccctgagaaattgccccactgacttcaacaatggttgaactagtttacagtcccaccaacagtgtaaaagtgttcctatttctccacatcctctccagcacctgtttcctgactttttaatgatcgccattctaactggtatgagatggtatctcattgtggttttgatttgcatttctctgatggccagtgatgatgagaactttttcacgtcttttggctgcataaatgtcttcttttgagaagtgtctgttcatatccttcgcccactttttgatggggttgtttgttttttcttgtaaatctgtctgagttcattgtagattctggatattagccctttgtcagatgagtagactgcaaaaattttcgcccattctgtaggttgcctgttcactctgatggtagtttcttttgctgtgcagaagctctttagtttaattagatcccatttgtcaattttggcttttgttgccattgcttttggtgttttagacatgaagtctttacccatgcctatgtcctgaatggtattgcctaggttttcttctagggtttttatggttttaggtctaatatttaagtctttaattcatttgaattaatttctgtagaaggtgtaaggaagggatccactttcagctttctacatatggctagccagttttcccagcaccatttattaaatagggaatccttcccccatttcttgtttttgtcaggtttgtcaaagatcagatagttgtagatatgcagcattatttctgagggctctgttctgttccattggtctatatctctgttttgataccagtaccatgctgttttggttactgtagccttgtagtatagtttgaagtcaggtagcgtgatacctcaagctttgttcttttggcttaggattgaagtaattttattacaggtgagaaaattaattcattagaatagacacatcgatgaggcagactaacattaattgaggacttgcttcatatggcaaggaaggaggcaagtgcgcattctacagaggcgaaaaccaagagttaaatcagttcatgctttgcctaagaagccacagaggtgggaaataatggggctggacttcatctctttcacatccagatgcttcccaccccattcttctggtgcccaaaaaagacagatcctaagatgttgtaagaatatgagtggcaacaatgataaagtgatgtgtctctgcagagagttttaaagttaaatgtcctcacttcttttctctcacctgttcttagagcatccctgtgaaataggatcagaggcaggtgtgcggtaggaaacaagggaatggagcgaaaggagaccaagtctgcttttacagactgcataaagaatgctgtatttgtttcccaagtgtccaaggtgttttgtttcccaagtgtccaaggtgttttctctgtgccttcatctctattttgggctccttctctacctagactttgatatgcatcctatttccccaaggcaagaggaatttccgagtgaaacgatagagatgtgggatccacggatatttagaagcaaggcttagaattagatgtcctgtctgttaaatatagaagtaagtgctgtttcttttctcctttgtggaaggagtagatacacatttctattgtaagttgcatgtttagattaaagacacttaaatcattatctcccctgcggagataatgagagagcttttgatgtcattctcagcttactggtgtaaataatgggtcaaattctcatcctgttgtacaggatggaaatccgactcaggatttgtaaatactgctgcatttgatttattttcacgagacattttcttccctagcagacagtgggatagcagcgtcccgcgaaacagcccgtggaggagtcatgatgcattaacctaagcagtgagatcaaaacaaaagctctgcttgtaatccccctgccagagccccaatctcagcagtccccactgtgtgactgcattcgggaagcctagataaaattagatcttcccggagtaaaaaggaactgggacttaggaaatggaagtctttctcaagcagcagatgtcttctttcctcatttctttggagttttgttagcgttaaagaaattaaaagaacaattctttttttattaaaaaagaaaaaaaaagaatgaacacttcttgaaatacatccctgccagttttggagtgcatttgctttctcccctcatcagaggggttggattcagcctgactcaggagtggggatgcctggcttctcatcttttatctacctcctactgggcaagtgactgctctgtgtttctctttgcttctttgtcacaagtggttggtgacttccagatccctccctagccccaggctcctcttgggtttcttctctcaggtcttggcactctcgtcttctcggggaagtggaacagcctgagtccctgttgctgggatgcggacggtcccaagggccaagtaaacagttcagaagcaggtgtctttgatgggggttactctagcagggttgttaggggagagaggagggtggttattacaatcatccaataatcagtgtctacaccagaaggatttttgtgttgatagaggaatgttttaattctaatgcacttaaaccaatgactgtcacaaaggaaggctccctaaacaggagtcggggtgatggggatggcaaggtgcaagtctacacagttccaaatatccaggtgtttccaaacttggggctgtgtagacagaggttcacagtgactgatggagtccaggtcacagctagaattttacaacatgtgctggagtgccatcttcctaacactctgtcctctgcaatgaggaaatcggggtggtggggaattttgtctccagttctcagtgcaaaaacagaggctgaaagtctgaatgattttcttgatgccacacagctggtaagtggcatcagaagatggaaattgaactgaaacttcaaatccaaggttagcttcttagatctctcagggagctcttcctctgcctgagctatcgggttttcccttcatgtgatgttgcccagagcaggctgcagtgatgtggtgtggtctgcccccttgaatgtctcctctctctcactgaatgacagaaaccttaggctagagtatatgtttagtttcagtgttccctttctcatcgaaagttcttgcatgaaacatctccatctgccctgccatcttctttctgccttttgtcttctcatctcaaaatttcttattttctgagttatttcaggcagagagtcaagtggcagatgtttgcaaacagtatgggacccaagtatccaaatgatttcttgccttcaaagtgtatcttccattgggagctggactctaattacctatgataccaccttggctaataatatctctggaactcttttgaggggggtctgcattttggatcattttagaaatggcaataggtctgtcttagtagaacatatgacgtttccaaaacgacatcctgcaggcaggatggctgcagaatggaagaagaacaggcccctttacatgggttgtggtaagcagtgatttatgaccctaatagggtagttgggtctgcatttcttttgtgacttcaaagctgtctccatcaggacattttaatgcctgagttctggcattttcacaaagtcaatctctttatttgcaaactacagtctctgtggaagaggaacatggcaggcaccttcctattaatataagcaggtagagtaccagatccattgcctctagagtcccaagcagaataaagccaagcctttgaataaagccatagggagagtcaagaggctctggggtaaagcaggaaataaaaatgaagatagttgaagaggctacactaatcatgcagtccaccttaaagtcaaattgttaaaatgaaacctctaagatcatcacagtagtcatatgaccttgagtgagctatttagcctcttagagcttcaatttcttcacctataagatggcaataacataattaaaaacacacagggctgtgtgcaaattaataaaagaaagtatgtagagtgcttagcatagtgttcagcatgaaataagcccctgctaattataagccactatcctcatcagctgctgttagtgagctgtgaccacctggacaagaagccctgagcagacagaaagccaaattggggctgactttggacctgtccactctcacgtggaaactatatttttcctgagggaacagattttctttcttgaggcagggttttccagcctcagtccaactctcagatagcagccttcatcttcactcggatctctgaatactaaagactaggtatgacttaatgctttcattcttcatcaataaaacaaggataataataacccttacctttgttggctgatgtgtaaaatgagctaatgttcatgaaagccctttgtaaattataaagtgctataaagtatgaattattattgtgattgctctactccaggtattccataaacattgtgggaaattaagaacgcacactcctggcattcaaaaagcatttatgcctttttaagtatatagctataaactatcagcagatgggtttgataatgcagtcttcaatcagatttaaatgttagcaagcgcccattaagagtgactttctagcaggggcactgctgtgggtgccagcaggcagccagtcacaatggttggctgtgacaggctatacttccactgcgcttgaataccagctgctcatgtgctttgcaacttactttgagctgaattaccaaaggtcttctgaacctcacttcgctcatttgtaagataaaggtaataatacctacctgactgagttgctgtgaagagtagataagataatgatcaccaagccctgggcacactccctgatgcaagggattaggaagccacctcagtgtggcaccctggatgctccgattgacaggtgttccttcttttgccttgagcctctcactgaaacaagtcagggttcctcctctcgctgggttcccagcagccttgcaacgtcactgcccgtgcagctccccagccccgcctcccagcacctcatgagccctgctgaccttcaggcctctcgggtcagttccaacataactaggtctttgcagatttcaaagcctcctcttgataactcgagggtcgagggggacttgaggaaatgaggagatgggatggagcagaaggctatttgtgaaagccagtgtgaacagcctgaattcctggccatgtccctcagaggctgaggggcctatctggaccccaaggaccctatattaccagccaattccacgtaggcagtccagatacagccacgtgcaccctgttatggtgactaaccagaggaatgtaaaagtgtttccaatgccattaagctttagggtgcggggctctaattctgggactctaatgctaatagtattttttgagcatttactacatgctatacatagtgttcggcacttcaacaagaattatctgatttaatccttccaacaacctaaggagaagtgtactctactattacccacagttttgaaatgagaccacaagattaggaagggcagaggtcggctttgaacctagtactcatggctgcagcattacttctcagggtacatgtggcctgtggccaggataacaggggtggctggcatcctggcagtgggttgttcttccatctatcttagtccactctatccgtattagttttcaggggtttccattgaaacaaagttccacaaattgatggcttaagcagcaggcatttattgtcttacaattctggaggctacaatttcaaaatcaaggtgttggcagagttggttctttttgagtgttctgagggacaatctgtttcatgccttcctcctagcttctggtaactcaggcattccttggcctcctccttttgtctacatttcctctttttgtagatatcagccacgtagaattagggcccattcaaatgactgcatcttaacttggccatctgcacagaccctaattccaaataatgtcagatttactgaaactagcggttagggcttcaacatctttttgggagacacaatttaacccgtaatactgttccataatactgcccataaacacatttctaggatttacccatttccttgaaggcatccaagtgtaagtgtctttctcacacaagtattctttgaatactgcttaagtgcttcataccatgccgccacctggagataagaaaatgagcaaaacacctatgatccccatcttcatgcattaatgacatactcttggaggatttcaagtccatagaccctcacagtactggtgctaaactattttattttattttattttattttattttagagatggagtctcactctgttgcccaggctggagtgctgtggcatgatctgggctcactgcaacctccacctcccggtttcaagcggttctcctgcctcagcctcccgagtagctgggactacaggcacacaacaccatgcctggctaattcttgtatttttagtagagatggggtttttccatattggccaggatggcctgtctcctgacctcgtgatccacccgtctcagcctcccaaagtgctgggattacaggcttgagccaccgcacccgaccactggtgctaaatttttatcattaattttaaatggctcatctaagggggaaaatgaatgtagcttcatcattctgaataaatctaaagagagaataaccaggagatgagtattaatatttgattaactttatttgcatatgcacaactccatttgcaaactggcttgtgatttctcaaaatctgtatgtgtgtgtgtgtgtgtgtgtgtgtgtgtgtgtgttttcctagtttacttgtggggtgtcatcgcaggccttctagaccaagccctgcaagcaggatgatgttaaccagggtgtatcacttattagatggaagaacgattaccctgtgctctgtttaattaagcttcacgtaatgggcagacgtttcctttaacaggcttgctgtcacctcatcagttatttaaggtagttcatttcacagcagggggcaaaaagagagaaaggaaaaatttatcatttgctcaaacttgattggtctgaggaaaagcgtggctgtctagaagatgcctaattgctgctgtgatcctgtactgattctctattttgtcccaggcttcttattgaaacgttaatcaggattaggtctcacctcttgatgaatgattttgtaaaaacttgatatttctcatctcagttaggaatgtctgtatgcaagtataacgccactgcaactgaatgggaagataactaatgcccttaatttcacagagggctgtgatttggtacatacagtacaaatcaggggaaatcagaatgaaattaattttctttttttgcaaaggcactacctctgttatataatgagtcacttttctttgactgtttttgctgcagacttagagaacgcttggcacatgtgtttgggtttatttcttatagctggggtcaaatttaggttacatcattttgtttgatgccagaacttgggcttaagttctctgattctctctctctctctctctgtctctttttcctcatcctgtcacctaggctggagtgtagtggcgcaatgttggctcactgcaacctttgcctcctgggctcaagtgatcctctcacctcagtctcctgagtagctgaactacaggcatgccacccccatgcctggatttttttttttttttttttgggagagacagagtttctccatgttgcccaggctggtctcgaactcctgagttcaagcaatctgcctgtcttggcctcccaaagtgctgagattacaggcatgaaccacggtgccactctgattcttttgtttgccagtttaggaattatccctgcctcacaagactgtaaagattcagtatcattcctgtttctaactcaaggtctagcattacaggtttgcaatatgatattttcctttgcctttattccatcacctcccccattgattcactctcgatgatgggacagaattatttttccttctcccacaacaatcgcacatccttgtaaatctgagtcttagacactctgcttcttccatgtcctaagggcttgacatatccagatggaaactgaataattaaagtagacattcatttattttgaccaagggacagacaccaaaattatggacttttggctattttttcatggttaattgactcccagctgattttccatctttgtatgcttcagcacaggcatgaatctcagcattttcttcatttgcagtggccaaagaataaaacttattataattatggttatcatttctttattattcatgtgtgtatgtgatccacctcctgcctgtattttctgcatcacccctttcctctttcttgagcaagccctgtgttttcacagttccaaaatcctgtggttacctgaacataggatcttatttcatgtcttaaatatttgctcctgctgttccctctgcctggattgctgttcctcaccttgagcatttgacttatgtatatactacaagactaaactcatacctactggcttatccactaagtctttcttgaccaactgcctcataccttggtttatgtgactctgctgaattatctcagccccctaagtcccccatcaaagaacttttcacattttctttacgttcatctattttctgtgctacctcccaccaagccaacaccaccattagcctatcagtgacctgaggaccataacaacatttgtttgctattgcctctgcttaatacaccaccgggcttctgcccatgttctaggtatgtttggtgaatgcatttctattattttttggtacatgtgaacaattatctgtgagtgctgcattctgaaaagagcttgaaagttacccactaatccagcgtggtacatgctcctaatataaattattctgactccaggccttgggtattagttgttttctgagaactgtatcaactcagaggatgaaagagaacattattcctaattcctcaatcaattagcaccatagttaatcctttcatccttaggccttttacattgtaggtcacctgtcaatactgaagggcctattctaccttctcctgggggaatgaaagatccttccttgagttttactgatctcagttacattgatgttaaaaattctcaaactagccaggcatagtggctcacacctctaattccagcattttgggaggctgaagcaggcagatcatctgagctcaggagtttgagacaagcctgtgcaacatggtgaaactactaaaaatacaaaaattagccaggctcagtggcatgctcctgtagccccagctactcaggaggctgagccaggagaatcacttgagccttggaggcagaggttgcagtgagccgaaacggccccactccactccagccttgaagacagaaggagaccctgtctaaaataaataaataaattctcaaactgtccacagttccccaagtgtgatctcttctgcccaacaacgttgcttttgtgaggactacgcatgggcactctgagttcataggaagatagttaaaaagaaaatgagtataggatttgaactaaaaataacatggtacttgaagattgacttgcaaagtccagttcattattttgacagatgcatttcaagtagagttgccagacaaaatataggattttgagttagattagaatttcagataaacagcaaataattgttttaatataagtatgtccgccaaactgtagatatactgaaagctattgctgtttatttgaatctaaatttaattgggggtcctgtaattcagtttgccaaatctggctcccctagttcccacacaagttaatttcttgcacattgtgatataggatgcttgataccatagatacggtagagtttgtaacattatccaggctgcctgagtcccaaaccagtatccattcctaaggtcttatgattaggataaaagattttctacttcagcacaaagtgccttttgaaaatttgtgatgattatttctggaaatctgtcccatcttagcattgctagagttggtttatcatgagacataactcaagagaaattagctatactgagatcattttatcaaaggtactcgtgacataggcaatttgatatgtcccaagtctgcctccaatgtcaggtgagttcccattgaggccaggttctctctaaaaaatgctgtaggtttgtgttgtgtaggacattggaaaggtaataaaagaaaatctacttcaaataaccaaagccgcccaatagaataaggacaagcgatttactctaacgctattcattcatccagtataaacaacgttcaatgttctcccataaaaactttcagttctgcatgctcattaaggaactgattcaacattctttagcaagttataaatgaaagaattgccaccattcttctgtaatctgaatttctcctcctcatcatgcttttcttgttccagagttgcttcactggggggaaaacatcacatctttgtatcaagacctttattattcttggcagaaaaaaatttcattttatctctctcatctgtctgctcaaagttcagtctcagagccaagtttttaatttgtaattatttgaaagagacttttcttcttaaaatatgttcgacaaaacgactatgtagtagtttctttttttaatggccctgcgaacatttcttctggcttttggtttggatactgctggtgtttcactttgagttttctctaagtgacatctccatcctctcctcatgtcaaaaagccaatattctgcttactttatggtaatagtactttttaattaggatcctgtgtaatgcttaaatcttttcttctcagaaggaagattttttaaaaagtgtttttcttcttaaaaaaaagtttattttattgtggttagaatatttaacatgagatcaaattcttgatatagtttaagtgtacagtgcagtattgtttactataggtacaacgttgtacagcagatctctagaacatatccatcttgtttaactgaaagtatgcctgctggttcataaataaagaactccctattttcccctgcccctaggtcctggcaaccacccttctacccttttgcttttatgaatttgactactttagatacctcatgtaaagggaatcatgcagtacttgtctgtctgtgactggttcatttcactcagcataatgtcctccaggttcatccatgtagtgggatattctgtaggaagatgttaatggctacccaagcatggagggttgggcatctgtggaagggggttgtgcaagctcatgaaatattgaaaagaaaggaattatgtatcagtagcaggttcagtttattctgtgtagtgtaaagtaggatttagctgcgtcttgtaagcactcagccgtaggacaggctgggatatctcagctgcagagtaagggaagagagggaagatgaggcatagacgtgtgtgtgtgtatctcttatgtgtgggtgttggaggggagagggcaagtatagatagaacaactctaagggtgtagatctgttaatgtcccaaggtccttgatctgtgtcagtccaaaaaatatccatctggggatgatgcagaggtgccaccagggatacatagagacaggcagtaggcagcaacatttactctctcctctgccccgacaggacccaagcaggaggtaaaaatgccagaggcaggggcagacaccaggaagaaaaacctgctgtgccttaggtggaacttcaaagccccgagcaatcaaactgggcatctcagcagagcagcggtcagtcatggtgaggcccagacagtgggtttcccaggaaacaaggcataaacgtgtgatatggaaagcatcgccacagaagagggatgaggctcttctttccgtttcttcctttcaaaaatcttcacatattcttcatgatgtaggtcttttcttccttcttagtgaagtgcccttgcaatcctgaatatatcctgacctcttttaatttttaattatgttattcattttagtgagctgacttgctgtggagctgttattttctctatgtgtatatttgttaaaacaactatccttcaaatgcaagtcccttccctgtgggtgctgtgtgagctagattagattgctgaggtttaaaacctaaaggcatacaaaaatctctaggcatggaagagatggaggatgaaaacttagaccttggggttgctgagagtccaagccaatgtcatggttgtattcagaagcaggagcagcctctgaaccagatcaaactatatttctgtggtttcatgggcagccatcctggagatacaagggcaagcctttctgtcgtggacatcttatcaggaaggcactaagtccttgttgcccaagttcatggtttacagtaactctgctgtattgttacgtcttcatctgctccttagttcatcagggcagctgtggttcaaagggactttcctttacaaagtaatgctggaaagcacttactttctgcccaaccaatggtgtatgagttgtacatttagcctgctggtaaatctctttggaacaagatgcaactggtcaatggtatgtaagatccctgagcgcaaaggccaatcccatctccagctgcataggcttctcctacggagatgttatttgggcctggggagacatccagctgggctttgttacaatggtgctctaaaaatggagcaaagttttgtatcatttggtttgtttatgtgctttcataaaaaacaaggttagtgtcacttttttaacatttgctgtccagaacagaattgtccctcctttatggtgtgagtactaaagtggctggtgttgtgagcggtagccaagtaatggctgctctttctatcagggaatgactctgggcctggacttaattgtcttgggtgaaatactgatagaaacatggcacttgcctctacaaccacgtaactccttttccatgggcaccaaagcaatccctttgacaatgattagcttataagatcttacagagctatctcctgttgagctgggtccatttattagaagatatttatcgtctggctgccttcctacagttccctgcagggcttgcattttattattcattagcaccttctttggagacttaggcaaggaaggatgtagaacaaaattttgttctaatgtggaaaatgttatgggagagaggtttgaaaatcatgattcattcattcagggactatttggcagaggtgggcagactggagaacatctggggaaaaatgggagatgttcccctaaggaagtatgaaaggaacccctggtgtttgaggtggaaattggaagacccttagggagatgcctactctaaaaattccaggaaccttggaattccttgagggcaaaaaacatgttttactaaattcttatcacttaactattgaagaaatccttgtctccaaaaatatttcttgagtggtggctatgtggaagaagagctagctgaattctgagcatctccagaaagcaaaatttgaaagaattatagtaaagtagatcttggttcaatgtcaaatggtagaagggcaatagcttccaaatgggtcatatatagcttcaaattccattttgggcattagctaggcatatgaactaaatacagaccaaagggctccaaacccttattttcttatctgggcagtggaggcaatacccacctcatcaagatgctgcagaaaatttttttctgaaaatgtatgcaaagcatgtagcacagtgtctgtcagatagtagacactcaattaaaaaagctaattagtagatggtaactcagtaaaaggcatgcccacccatgtgctgggctgttgcaagcaggggtttaatggaacaaatgatttgacatgctgaactcctgggactcatctgaccagaagaacccatgccatccaccctggagctttgttcaccccatgattgctccattttcaccccatatcatggataattgagaggcccaggagtttctgtggacagacttctggcctgtatccccattcatttcctttcagggatcagctatccctcctctccccactacctgcaccatcccctagccaaggagctacagctgaggtcagcatactcacaggtcaacactacagaatcccatttgggttctgggataaacaaggatgcctatgtacctgaaatgaacctgctgcaggatctggcagattttatatccatattagagaaaaggagtgaaatcacatctcctttctgtaataataatgtaatttaaatttatctgcaacccacacttctaaaggttaaaagccagaactttaaaaatcacccagccaggtgtggtagctcatgcctatcatcccagcactttgggaggccaaggtgggtagatcacaagatcaggagttcaagaccagtctggccaatatggtgaaacatcgtctctattaaaaatacaaaaattagctgggtgtggtgatgggtgcctttagtcccagctactcaggaggctgaggcaggagaatcgtttgaacccgggaggcggagcagaggttgcagtgaagccaagatcgcgccactgcactccagcctgggcagcagagcgagactctgtctcataaagagggggaaaaaaacctacccaaataaatgtaagttgccactgctgttagcatttgatcatccttctgcccacctgtgtaacccaaattatgcttttacaaagggtttccccatttgttatctcattcgaccttcaaattaacttaggaatgagggaggtcaggcatcatttgttgtttttttcataaaaggaaacagagactcagagaggggaagtgagttgttagttgtcagtgacctcacagcctcctgagcagggccctcctccctgtaccatgagattatgagcactgaagcaggaattcactaacctgctgctggactgagacagggagtctgttggttatcaagatatcagacatggtttcattttttctttttttgtaatgcagcagagctgcttttcaaagaaaaattgtgtggaattcagctatctgttctatttactatggagtgtggagccagttggttcagctcttcctggcattgtgttccctgatcccttggttttctagtatattccaaagatcttgtctggagagccactcatgttacccagcttttcatttcacagacaggaaaactagattactggacattacacaatgagttagtggcaggtctttgaatgcccagcgctatattctttgcacaccgtcattcattgaacagatgttttatgcttcagatgagggtttttagtacctgagaccaacattgactaatagaactttttgtaatgattgaaatggccctggagaatttgaaatgggattagtactttgaagaactgctttttaaatttaatttaaattttaaaagccacatgtgcctagttgctaccctattggatagtgtagctctaaaccagtggttatttactttggatgtacaatggaatcacacagagaacttcaaaaatactgattcctgggtttaaattggtttagagtaaggcctgggtaatggaatttttaaggtttcccggttaattctaatgtgcagctgagtttgagagaaaattaatctaaatcttgagactccctgagggcagaaaccatgtcaactttatattctattgactcctgtgacaaggaattcagtgaggagttagctgttgtccagaatctcagggaacttaatatatcctgaggaagcagaagacataaccaggggtaaagtactgagaaagtgcccttatcaaatttcacaaaagtacagtgtcatccaaaggaaaggcaatattcacttctacctgagagaggaaagagcagcgtggtcttcttgctgtaatgattctgtcagaggcattccaaccagagtgactccaccttgaatgggattgggtaacctgagtctgaaacctgctgggctgcatccccaggagttcaggcatccttagtcccaggatgaaacaggagattgggtaggactcgtttcacaagatacagttcacaaagaccctgctgatgaagggatatggaataaagaagctggccaaaacccatcaaaaccaagacggcaatgaaagcgaactctggtcatcctcactgctcattatttgctaattgtaatgcattccaatgctaaaagacattcccaccagtgccatgacagtttacaaatggcatagcaatgtcccaaagctaccatatatggtctaaaaaggggtggaaccctcagttttaggaactccccacccctttcctagaaaacctttgtctagcataaaatgaagaaataacatacacatactcagtcaagtagcccatgccactgctctgcctatggagtagccactcttttatttctttactttcttaataaacttgctttcactttactctgtggacttgctcttaaacttcttcctacaagaagccaagaacccaggtggcttcccgggctgaacctcaattttgggattcaccctgtgacatcttttctggccaccaatgaagaggcaatgtagactcccatcgggacaccaaatcaagactcatgggcaccatttagacctgaatggtgggtgggtgagtctccctttgtccagattcaactcgctacttttatttccctttgatttgggcacatctgtcctttcctatgttctttattttggacagatgggtaagtggctttgaggcctttggcttggtagcctgatgcagtctcccattttctgggagtcctggacaggcagaagcacacctggctggccaagtcctttataacccctgttgttgccccttctctcaggccttttttgctttagtttccaatgactgaccattttacttttttctctcaatgcccaaatgcatgcttatccttatttctttgtcacatttgtagtctttgctttggctctttgggccattgtttaaggaaggtcatttggctgtatgaggtcctctgttgtgttgaccctgggacaccagagtcatgttgttctgtggccccaattgcgttaggtcttgtgcctttggggttcactgttggctgccccccgatgctctgggattttcagcgtttgctgtggggaccctcactggccagtacttgggtactctgtttttttcagcatttgatattgttggctgattcctagcaccacctgggatactcagaggagtttggaattggcattccctctaggattatgggttagaggtccacccaaggtgaaacttggccttaccttttcttgttatgtcctaaagttatcattttctgtaacaccattttctttacttattgtaactttaacactttgctacagaaggtgggaattttcaggggaagaaaactgggctttcgctagactcagaaaaacttctatttagtggagatccttgttaaacgtgaggacaatggtgaatactgaaggactcactgctatggtgtattttaagcaattggagcaaattcagattagcaaagtttagccacatggacaagtcccagttttgtcagagagataatttggatccacctatcttttataaaatagtgaattgtgttactatttcatggttagagttccaagtaaaagctattggactaagttttggttccctatcttaaaacaagttttttttttttaaattggttttctttcagtaagattgcaagaaatattggctatcaattctaaaatatgtttccttttaaggtttctcagatttatatctgtcccttttccttggaaaagatatatcctttgcaagctcaaaaatgtctgctctatactccttctgggaaaagcattatggtgcttgcctcatactgtagcttagtgagtaaaagtttgctcttacttgatggaggcctgcattcaatttttgtcttagagaatgagttttttcctgtttgactcttatgggacttttgccatttacttaaactttacccctccatggacagcttttgatttcctgccttgaattttctttctttttttttttttttttctgagttactttaggggtgattctagatcttgtaaaaactgcttgccatctatttggagacatctcatgggtccatggttaagccataaccttagttaaggcttattggttttacttgggaaaatacttttgcagaaaaacaaactaacaaaaaaaagtagcttaaaagccagaggtgttggctatttgtcctgcctagagtctggtattaagagatctaaaaggattttttttttttttaaagagctctattgttgagagttagcttaattaaacatggataactaatatatatatatatatatatgtgtgtgtgtgtgtatttaaatggcttttatgtttgtttttctcttcttgaatcttgtttctctgaaataagaaaagcttttttcttctcagatgactgaattgtttttctcccttttgtcttcttaacactcttgagactcatatgagaggatgtaaggtaatttctaacattctagaagtccttgggaaaaacagaggaagtgccagagaccccattctgggaaaaacctctattttccttatggaatcccaggaattgaaaacggatagatcctcccaaaatctaagcctctgttctgttttgcattcagttacctggtgttttttacttttgcaggtatcagaaattactttggattatgagagagctttggtgtgtaataactatgtagggaatatactttcagtgatggctaatggcagttatggggaagcactctgctctttgcacttttggatcagagaagcatgctcttggtcatctagaaggtataaaaatgtccccacctcccaatgaggggtaagacttcaatgggggatgggctgattccctttttggggatccaggatttggtaaaaaaaaaaaatggaattcttgattttttggtgttttgccttccaactgtgcctgcttattaagccctagaaattgcatgctttcctgtccatgttcctgaaagggttccatcttgaagccagtagtccaagtaagaaaaacctaaaaactgacaaatgaaaaattttacagctactagatcttcttctgtctatttgtatttgttgtgtgtgttatttatagaaaagagatctaactgacttaaagaaaaataagcagttaaatcaaatactttattggaaaaaatggaaattataatacctttcagttcatatgactttagtaattttgaggaaataaagacagttttaaagattattggggctcggcatcatggctcacacctgtaatcccaacactttgagagccaaggcaggtggatcacttgaggtcgggagttcaagaccagcctggccaacatggtgaaaccccatatctattaaaaatacaaaaaattagctgggtgtggttgtgtgctcttgtaattccagctacttgggaggctgaggcaggacaattgcttgagcccagaaggcggaggttgcagtgagctgagatcatgccactgcacttcagcctgggcaacagagtgagactatgtttaataaaaaaagtttctggtaaaataaaaatgtcttcaaaatttatacatttatacatttggtctaaattaggcaagtcagatactatgtttactaaactacattaactgcttcattgtcttttgataatttctcaacttacctgctttggagcaattagattctatgtaaggcctactgatggacataggttgttagccatgtccccggctttgctggaaagagtcataccttatttgtacttctatctgatgttctaggctctgcacctggtacataattaacataacttaccaggttttttaccaaaaataaaagttgctaatagttaacattgtaacatatataattgaaactactgaaggaagagttttacatgcaaggtgtgtaaagaaagtagaatgtgtttttggtaaaagattataataaggcatgggaaacttttttttttttggcctagtttagagggttaaagaattgttttaagtgagataggctaaagctgaaggcttgagcaagttgtggaaggttcataaaaaattaaccttgtaaataattctgtgtgtgagcaaattgactaaaattaaaaggatattattcaatatttctataaattaaatattgaaataaaagcacactgatacaaaatctgggcccatatgtcagaataatgaggctttttggaacactaatatgctccttaatagaaattaataagtgttataaaaggtttgtggaaatcttacctatggtcaaacgaattaaacttgaataaatgtgtttataatattatatttaaaattagctttagtgttaacgatgcactaatgcaaaagtgaaatttggctttctgtcttgaacaagattttcatgtaatattaaaagataataagagacttatgtttgtcttttgaataaacaatgggaaaagaaaggagagaaaggagacagattgtttggaaaattaagtctccactttatcaatgaataagttattgcatttttgaaattttgagttattgttttagataaataaatgatttatggcaacctggagttctgtcttaaattctcaaatgtttcacacctttgatatttgacaaacttgccaaaatcaaattgtaaattgttttcttatcctattaatctttttaaatactaagtctcctaaagtccaaaaatgacatatttgggttcttggtatattaaaatcatagaggaaacattgtcaaatataaaatggtgtttggctttctttgggttttatttgtataaatgtgttatctgtatgtgtttccaaattatgtgaaactcctataattttgacatgaattagtgaatgtgaacaataatacccataactgttatgttaaattgctgtgtaccacagaggtaactggatttccttgtcaattgcatctttgactgcggctgctgtaagactttttgtcctccacagacaatggtgtgttgctttcatcctcttcaaaagatggtttatagtcagatacaggattttgatgagtagttttaaatgcacgtctctgataatttgggaaagtgtaccattaaaatagagaggaaacatactgccaaagcactcttggaaaactgtgttcataaatattgagcaaaacaggaattaattgcatagactgaactaataaaaggctgaagtaatctctttatgactttttgcttaaaacattgctgatcctttctgttttttatttcagagtcaataaaatgtttttcttttgagttatttacagcttctagcaattgagaaaagtatactactgtgagcaaaatttggagcacgtttctttctctctcccctatttcttcagaatttggaaactatgtgagtattcttaccttatggcaatatagttatttccataagtgcagtgagagtctgttttttttaaaatttttttgtaaccagacaaaattgaagaaactctttatttttccaaggctttgactaaaatgatgtgctttcagattcaaacagactgctttaaggaatcaaagttgacttatagagccaataaaagccacttgggaaaattggcctcataccttctctatggagtccctgcacagggttcctaacctgtggaaagtaaagattgtcactttctgacaggaccagaagccccaagttatcttgggttcttgagtggagaaggagtcaccaaactcattcaagtacttgcaggcacagataaattcatgactgagcttaaggctttaaaaagtctaatctaagattccttactgaacaaagttccatcaaagccaattttaaaaatgggcctatatggcaaataattattctttctgcactttatatagaaaatcaggccaagtatagtaaggctaaaacttattttgcaagcaaatcagttctaccatgatttgtttttaataaaaatggggaccagagagaaaaattgtttcaaaaactatagtacatctgtaattagcttctggtctggtctattgttttggagattttttctgcaatttagattgactgcttatttttgtgaaccaactagtgatctctggctgctgatcagaagaaacaagaagaataggtaacatacagatctagttgagtattctaattctgggcacatattggaatcaactgactactccatattaacttagttctaacaagtgtccagttcatggaaagccttcttatttagtttacttgggataattttattttgctttactgttgtggaaaatactgctgtcgtcctcattgtgtaggaatacagggtacacttactcaacattttcttatattgagcacttgttaatctttcagatttccattttttacaagattcagttatgagtggccctcaccatactgacactgactgagctactctctactctgaataaaagagaccctaatagttaggcaggaatatcattgcttctattcagcctgaagaagttatgaaagatggatcttcatccctctacaaaccctaggttgcaagcgttcccttgcaaaaaggatggaggaaatatgtcagaggcattcaaaccagagtgactccatcttgagtaggggctaggtaaaatgagaatgagatatggtaggctgcattgccaggaggttaggcattcttcactacaggatgagataggaggttagcaggactgatttcacaagatacagatcacaaagaccctactgataaagggagaggcagtaaagaagctggccaaagtccaccaaaaccaagatggcaatgaaagagacctctgatcatcctcattgctcattatttgctaattataatgcattcctctgcttaaagacactcccagcagtgccacaacagtttacaaatgccatgggaacatctggaagctaccctatatggtctataaaggggaataaccctcagttctgggaactccttagccctttcctggaaaacttatgaatgataccccctttgtttagcatataatcaagaaataaccatttgtgtacttagtcaagcagcccatgctgctactctgtctatggagtagccactgtttgattcatttacttcttaataagcttactttcactttactgtctgggattgctcttgaattccttcctgtgtgaagccaagaacccatgtggcctcccaggctgaaccccatttttgggttttgccctgtgaaaattctggtaatgatttaaaaataaagaattctttttccagaaatgcatttggagcaatagatatttctgtcaggcaagtcaaaattcacatctgtaatttcacaataggattacctggaattatggaaaatctaattaagtgagctatattatctgagacccacaaaagacacttaatattgcctttgaaagtcctgcctgtctaagaagtgttccacatatgcttcagaaaatgctctgcgtttgtactaagcacttgactagtttgctgtatcccattacttttcttttacccttaacttaaaaaaaaatcccattacttttgataaacgacactaatacatctgaaaagaaagaaataggtttcaaagattggattatttgaaacaacaatgagatcattatgaggctattgttgatgtctgctttcttaaaatgaagaggggtgggaacactctgtggtatatatagatatacgaaaaagccatttaaaaatgtggcagagtttagtctaatcttagtgtgatggagtggtttggtgaggtacattagaaagaagtccttcagaacagcccacccacatgctggtgaaagtcaagtttctgatcattggaagcagcttgactttctgcatgttcagtggcttccatccacatactctgattaagctggatggatacatggggaccctggtggattatgggcacaggatggatttctcagaattctaaaggctcttggcagtggtgatttaaggcactcttccctggctttagcaattatttcaaaagaccacatcaagcccttgtctgttattaaggccacctagggacaattcctcctctcattgtttataccttacaaaacagactatggggagtggttctctgcaggacattagattccagggagaatatgcagattgttattcttagttcagttctccactgcaaatctttaaagagctctctcaggtcattacttatgagtgctttatttttcccccttatagaacctggactggttgtttccatagaaatagtttaaaggggggactgtttttaaatcagggaagagagggcaaggtagatgctacaaaaattatctttttcctcttgatgcttcccctgccctctctgctttttctctataaaatgaagagtttaggttctgggttttgttttttttttcactctttattttattttgaataagttagttatcatctctgtatctcagttttcccattggtctattgaattaaaggactaatagctcaatgtctctagagtgtcattcaactctgagattctagaatttaataatacagcaaaatctccaaacttgaaaagaaatggtagaattgatattacttactcttgcaagaacattggtagctaattctactctgaacttttcccctgtacatctttccactgtttctgaaagcttaaaatgttttaggccaggcgcagtggctcacagttgtaatccaagcactctgggaggccgaggcgggtggatgacctgaggctaagagttcgagagcagcctgaccaacatggagaaacccagtctctcaataataataataataataataataataataataataaattagccaggcatggtggcctatgcctgtaatctcaggaggctgaggcaggagaatcacttgaacccaggaggtggaggttgctgtgagctgagatcgtgccattgcactccagcctggccaaaaagagcgaaactccatctcaaaaaaaaaaattgttttaaaccaaatgctctttattcctcaaacagcctcttctcctgttaaggccaggaatagcaccactgtcttcaaactctcccctcactgctgcttcattctctaacctaatcttttcagttcctaaaaccgtctacatctgcgtcgtttcaagaatggcccctttttctcaactcaagccttattttttctggtttggaaccatattacctctcacctgaactattgcaatgcctccagaaagtcttccttgactacacaccctcctctctcaagaaactttaagaatcccctatgcctgtgctgcctagatggtggccactagccccacgtggccagtaagctcttgcaatgtggctagtcccaacagagaggtcctttaaatataaaatgtacattcggttttgaaggcttaggacaaaaaaatataaaatatcttgagaatgtatatattgattccatgttaaaatgatacgattttggggcatgctgggttaaataaaatacattgtaaaaattaagttcactgattttttgaacttttaaatatatggcttctagaaaatttaaaattacacgtgactgacattatgtttctattgaacgaccctggtctactttatctcatctcctcacatatacctattattgcatttagcaatctctattgtattattggtttcttgtttctccttaatagacagtggactcctagagccccttcgtgaggcttattctttattggattagagcatggtatccaggggttaaaatatgtatttacgcattcttgttgaataaacaaaactcttaactcatcttcttaattacctgctgtggaccaggccatgttctgtgttacagcagtgagcagcaaagaaaaggtccccgccttcatagactttatattttgtgaatgattaccatatgacaggtactgtacaaagtacacacattgtctctttttctcttggcactctccctttgagactggtcctagggtttttccctttttctttctttttttttttgagatggagtcttgctctgttgcccaggctgaagtgcagtggtgcgatcttagctcactgcaacctccacctcctgggttcaagcaattcttctgcctcagcctcccgagtagctgggattacaggcacacgccaccatgccaggctaatttttgtatatttttttagtagaaactgggtttcaccatgttggccagtctggtctcaaactcctgaccctgtgatcttcccacctcagccttccaaagtgctggattacaggtgtgagccactgcgcccggctgggtttttcccatttttaacagggcagtgtggagacttgcagaggctgatttccacctctagtgtagtgagttgtaactcttgagctctaaccttccaactccttctgattcctgagcccatcctcttaactgttttgtaagagctgacactccttacctccatttctcctgcacacctctgacagctcggctcctgtcaaccccgactagaaattccgagtggattcccattgtccatccagtaaagtcctgattcctaatactggaatctaaagacctgtcacagtagcagggcctctgcattgtctagccccagaaggcacgattcccatgatgctgtaggtcactggggcctcaagttgtatacagagcatccctgccagctaggacctagaccttcaaaatgagatgaaaacatccgtctaggcaaagtcacttattctcagcacagactcacaagcccctgcagatatgcatgggagaccatttataggctatttccaacctcctattttatagaaggagatacttagtcaacacacagggaaaagtattttttctaagtttgcactatggttcaatagcagaacctaagctagatcactagaatcttgacttttggtctagagttatttttcttgtctcagtcttcttagaaattcagagaagaaggcattgtctatatctgaacaagtgattcatacagctacattattttagctttgactagaagaatcaccaaacttttttcctcttgatactaggtttgctgttttgataacaaaagaaatcactcaagtgagtttacatacaggaagcttgctgtcattcaagagcattgcaagtgatctcacagaaattcaggaacagatcagtagggtgggctccatgaagacagctgctgagagagtccttaattgccaagatcttcagatgccttgtgttctgctatttaaatgactcagagacagaggtcacatttgtttctctttaatttgtgactggtttgctctaagccttgatttcattgaaacattagtcatgagatgtcacttggtagctactccatttctcaagtgccttgtaaccttcctattttagttccctcactcactgcagaaggttcttgttttctttcattgaagttcccaaagaaatctgattcacccacctcctcgttttgaactaggctgaaacaatcaatggttggtttatgatttagttgtcactgaactgggtgttgtttaatgagccatggcccaaagtgggaatggaagctccaggcattggaagttgtggatatggaagtttatttacaagaggtttgactaggcaagtattgaaatacaggaccgatactttacaaatttgtctgtagaagtgtagtcattgattcctttgtgctcttgtacatagtcctatctgtactgaacacatcataccatcactcatctgcttagacaacagtctcagtattgtttgagaacagtctacatattggaggtatattgatgcctgtgtatcctcagagttcaacctaggcctagagccattgaaaagttattaccaagtgaaggaacagacaaataaaaaaagcttgatgcatatttactgcttggagacaaagggaggtttacatacaggcctttgataccacaaatgacattacattatgttaagcatcagtttatcatcaccactttgctctaatcttccctcaggtatcttagctcatacaaaagaacaaatgaaaataaaatctatttctctttccacacattcatatagagtatttattcatagtcagagatgacactgcagatagcgttatttcctttatgtgttgatatatgttattcatcttaatgatcaacatttaaaaatattacaccaataaaaaggctgtcttaaggacagaatagagtacaaataataagttcttcattgcacacattgtacttaatcatgttatcatttgaagatgatttagttacttaaagagataaataatcactgaatgactatacaagttttaggtctggggccttacattggattcctgtaatattttgtggccatgagaccctaagaatgtaaagtctgattgtatttacttaaaaaataagtggaagtcacatctaacaaagattattttgtataacaaatacaatttttgaagctgagatgatccttggagttggtcatgcaatcttcttgtattcaagattggggacctggactttcagacattgatagccagttaaaatagtccaaagtcaagcctggcttctgcagtcctgtaaacttgcattagaattacaacattgtcaatgattcagggtgtacttgggtgggttacataaggacactaagcctcactttcctcctagataaagtctgagtgatatatgtgtgtgtgtgtgtgtatgtatatatatatatataaaaaatatgtgtgtgtatatatacatatatacacatgatatatatacatatatacatatacatatgtgtgtatatatatacacatatatatacatatacatatgtgtgtgtatatatatatatataaacacatatatatatatatgtcacacatatatatgcagttgtggtgaaaatgcaataaaataatatgtaccaagccctgagcatactgtccagcactagaaaaatcaagcacctgaccaaggatagtatctacttttatgacaatttaatgtaaatcatgagtgatggaaccaggatttgaacctgacacataggtagtgaatgatctttccactttcaaagcagaacttctgtcattctctatttctccagaagcagagactcagatctccactgaagcagttttaaaatttccactcacctttgcagagcgctggggtctttgataaggggccttatttgctgcctactttaacatttgaatttggtattagaaattggagcagcatataccataacctttttgcagtctctgctgtgtactttgcacctgagaagaagtgattaccccaagcttatgccttgctccaagtctagaaatcaggggagaagaattattgagaagtgtgactcaataattcttgtaatacttcttctcccctattctctgtgatttccacagacatggcataattcctgtgatttgatgtgaaatgagagaccagctcagtgctgagtgatgagatctgaacggggaataaaatatgcttgaattaatttgcataatagaattggattggttacaaagctgtgtttgttgaaagggataccagagccccttagctcaccaacaaggggactttgcagatacagaatggggttttgagctctggtgtgggccgtggtaatattcttaatgtaataataacctgtctctaactataaattagctacctggaaatgaaaaaacaggtcagcctgtctgatccttccagctctgtggggaggggacagctgaaaaaccaaatctgcttgctttctgctaagcgctttcgtctttcattctccacccaataacaatttccagcaggagtccaaatatacttaaacacccgtatatgtcattttctttaacggagacaaaagcaggcacagcaagagagttttatgctcaaggcacggtggcttctgacgggctatctgctctcaagatagaggggtgatccttccctttcgagctggtggctttgcacatctattttcctgtcatgttattactgctgtgactttcaacaacatttatttttccctccaagcaatatgctcccatcataaaataaagtcctcctatatgttttagtagaatcccaatgcttaggcatcctggcatactgctaaaaagtgttttaatggattgttcaagaactaccttgggggtctttattaaaaccaattagaacattgatatatttccctaattattaccaacatcaaggtctccttaggagggcagcctcctattaattttcatgggagattcctactaagtccctaccactgaatacatcaatcagttctctcaattctagaaatatttcataaaacaaaacaaaacaaaacaaaaaactgaaacaactctgaatacacttttgtaacctacacatttagaaattctgaaacaggtatttaaaataaaaaccaaagatcaaattttgtgtcatatgttgtttaaagacctggttatactatgttattgatggttattgatggactgatgtaattacctcttgttcatcttcactttggtcattgatataaaatgctttttctttctttttggtttggataatttttttttattatagtctacttctccatgctaccaaaatttaaattatcatcatgttaaggctattgtgtgtatttgtattagtgtgcctaaatttgacctgcagccttctcttaggtaaaattgtagagggtaggaatacaagtcctcaaaccaaacattcagagttcaatcccaggtcctttacttgctggctctgtaaccttggacaaattacttaattttgatgtgcctcagactacttgcctgtaaaatgggaatagcaataatgctacgttttagggtttttgtgaagatttgatgactcaactcatggaaaacatgtccaagaatgttaggcggataacacccggtaaattttaactatattagtattttcattctagtcctgttattagtatacactgagttccaatagtaatttacttcccacatttagctggcttctaggtaactgctttttatcacaacgtccgtataatttccttatgaacttcaaactcaaacaaatggcaagagttgtgattgtttactggttaagaacatggattctagggcctgaagccatgggttcaaatctcaggtctggtatttactagaagcgtaagtctgcataagttgtttaatgtgtctggaactcagtttcctcatcctttaagagaagaatattcatggctcctattcataaggttgttatagaaattaatagatgagttactatttgtaaagcttttagaacagtagctaaggaaaagaacttgctacataaattttcattctgaaagtgaatcttttttttaaattatgtcttaaaatcagtcttatacatacctaagattaaccattaaaataactttctgtatcacatatagtcatataagcatttaaaatggtggaccattgctcttaaaagcaaattgattcagtattctttccaaaagaagaaaagagataatttcacctttttaacagattgaatgttattgtttattgatcatgtggaaactcttaaattcattagtattaagctagacattttttataaaagaaaaaagttgtcatcttgtttcaacacttctagtgttagaaataattgtgctttgcagcaaaatggcagccagaagaaaaaggtgaagaaatatcaactttaattaaaccctttctttctaatacacttcatggcttatatgcaagaataatttatcactctgtgaatgagcatttaatacttggcatggtgcaagatgggcaaggatcttgcctcaccatatgctgttttctttttctttctttcttcttcttgagtttccacagagacaatgtcaagtttagagttgaaatgtgagattcaaatcatatattaaaattgtattgacggcctgctttgtgttcaggtgtcagacatataaatgtgaataagatataatcccatccattcagaagtttccagtctagtaaggagacaaggtatgaatcagaagaaatgcccctcactagctcactgaaactctaatcatgaatatgaagccacttgaagaaaattttacacaggcttcagtttacagagtgagacagaacctctgcgagtagaatcaatgaagttccatggcaaattagtgccagattctccaccaaatcttgagtttcatgacttctgctcagaaatctttctgttgtttcatacagcctcattttagcatctaacccgtcctctggggccttctttgtgctctttccaaacagtcggtttggctttctagaaacagcatctgatgtattattaaagtgcctgaatgtaaggatgaagttgttaaatgatgacgctgccttttccatctttctctctctcccacgtagccttttacatatcccaaagtgtctgtttacaaccaatattaagagtttcaagtcccctattccttgaataaagactaacataataccatcccaaagtgttattgagaaaagtgacagtcaccaggctttaactgcacatctgtggcctcccagataccactttgccagattacaaaggaaacagaaagacttgggatggcaaagtcaaagttcatcaaaatggaatggatctgtatctacaaattataatttcaccaattcttttattttctaggttgctgaggtcagatggctatggtatcccaagtaacttatttgttctcaattcgcatcttggagaaagcacctcatcaccctcttgggggcatctccatgttcaaggcatgggtacccttagagttccacatggctggggaagcctcacaattatagttgaaggcgaggaggagcaagtcatatcttacgtggatggcagcaggaaaagagagagagcttgtgcagggaaactcccctttataaacctgtcagatctcctgagacttatttactatcatgagaacagcatggcaaagacctgcaaccatgattcaattgcctcccgctgggtccctcccacaacacatgttgaattcaagatgagatttgggtggggacacagctaaaccatatcagaccttgacccattatttttcctgtaaatatttcagtaaccatcagtggtttcttgagatcttcccctatgttgtgacactctgggaaaagaagaaggaacctattgcatgtccagttcccaactctgtgttcaggcctgtatgggtgcaacaattcttgtcatcctcattattcacatgaaaacatggaggttcagagtgattgattggcatgcccagagtaacccagattgtaaaatatggaagtggtattctgatccagatgcatctgatctccaagtctatgtaccttccactatgccaagattcatgctgtttccttcttgctcccttcttccctgaaccatttcacccaaagaagacaacaaaaaattaggtgatgacagtgattcctacaatgctcagtaagttttccagtttcatttagacccaggtgctgaaacagaatgttatcctcaatatcaatgtatcatcctcctgcacaagaactttctcagattccctcacattggtggtgaactcatctgattctctctctggagtctgggtggcactccagagagagaaggtgattctccagaaaacaaatgtatggttctaagagaggagaacaagcaaggggaattccttagagaagaataagttttcagcatgagaaagtccaatgaagaagtccagaacccaaggcagaagttaaggactggcaataagaaccagagtgctggagagaggacaagagtgactgtggctcagaaacctgtgaggagtgtagaaaggtgaaaggcattactggcttatcctcactggtgttgagtagctgagtcatggctgggtgctgggaacatgaccttgggctggttggttggatatactgttttgttttattttccttctcctagttagtgaaagcttgtaaaatatcctttctgagacttccaggctaagcaaggtaggatctttggcttcgtggatggatctttgccagacaaaagcaaatcttcctccttgaattgacactatacccttaactgatttaccaaagagaccttaatccattatttctcctgtaaatatttcagtaaccatcaatggtttcttgggatcttcccctacatcccttccctaacaggatccattgcctgcccgccttcttcgttactacctccaggcatgctgaacatcttggagcacactgtgcttttggatgtgatgttccttctgcatggaatcccacactctcctttcttattacagcaacctcactaaaggattgagtccagccatctgtcctctccctaaactgaaccccagtgtggattatatgttcctcatctggactcctttaattccccgttttcttattacaaaatcatatctaagcacaattttgatcaattataacagataaatatggagtgcttactatgtaccaggcattgtgctaagagacttatatgcattactcagtgaatcccagtgacagctttgtactgggtacactcttatccccacttcataaatgagcaagctgagctcaaagcagtcagtgagcttccccaaagcccgtagctcccacgtgataaactcatgcccagtcctgaaggcttactgaaaggaatggaaatgaagtggggatttggcctgcagttaatccaacctctctctgcttgcagaagctaactggggacgtgggcagccctgacgtgatgagctcaaccagcagagacattccatcccaagagaggtctgcgtgacgcgtccgggaggccaccctcagcaagaccaccgtacagttggtggaaggggtgacagctgcattctcctgtgcctaccacgtaaccaaaaatgaaggagaactactgtttacaagccgccctggtgtgcctgggcatgctgtgccacagccatgcctttgccccagagcggcgggggcacctgcggccctccttccatgggcaccatgagaagggcaaggaggggcaggtgctacagcgctccaagcgtggctgggtctggaaccagttcttcgtgatagaggagtacaccgggcctgaccccgtgcttgtgggcagggtaaggctgccttccctcaatcctgagctttccaacccaccattggaatagtcgtctgtggccagaaagaagcaaaaggcccacaggcatctaagagagaaaacaccaatggcttgaagagccagtaaaaccacccaaatattgtacataatatgttattccagacttttaaaaaaaataatagacttatccatgttgagaatacttcttaggtttttccatttagttttagggagttatatcataaaactcatttaccatattatttagatatggggtctctctctgttgcccagactggcatgcagtagtgtgatcatagctcactgtaatctcaaactcctgggctcaagggatcctcctgctttagcctcctgagtagctgggactacaggttcatgccaccatgcctggctaatctgtattttatttcatttttttagagaaaaggtcttgctgtgttgcccaggttggcttcaaacctctgacctaagtgatcctccctcatcagcctcccaaagtgctgggactgcaggcctgagccactacgccaggctcaaactccattttgaatggctgcataatagcccattaaatgcacatagccataatttatttaaccattttccagctggaggcatttccctgaccacaccctaatcccaacttgaatgctcctcctttggaccctttatcatagctttgctttttgtattcagtgtatctacttattaatctgtctacttcactagacttcaagctactttgtgtcaagggcagtgtcatccttgtgtacttatgtcctgatgctagacccagctttgaagagctgaatgaatatgtaccagaagcttgggtgtggttttatccctgtttccacaggcatggtaaaacccagtgagatgacttcccattccaggctctgtggtctctgtgtatcccttccagaaaagtgcaagtgtagaaagagggtccaaaatacaaattcaagagagtttggaaaattacctacccactagcatttgagtaaaatgtacagttatctttcagatgatagtgacattaaaactgcaaaaagatatgtgcggccagcacagtggctcacacctgtaatcctagttctctgggaggctgaggcaggtgaatcacgggatgtcaggagttcaagaccagcctgcccagtatggtgaaaccccgtctctactaacaacacaaatattagccaggcgtggtggtgagtgcctgtaatcccaactactccagaggctgaggcaggggaatcgcttgaacatgggaaggagttgttgcagtaagccaagatgtgccactgtactccagcctgggagacagagtgagactctgtctcaaaaaatgaatgaataaataaataaataaataataaaaaagatgattattaacaatgccagttaatattaacaatattaatagtattatttattactaatgccattttctcatttttgttaaagtatttttattatttaagtttaaattattattatgagacaaaggcctccatctcaaaaaaaaaaaaaacaaagatagatccttagatacataagaactgaaatcctatcatgtggagcagctgccgtgctaggcaaaatgtaaactagattaagatagctcctaacctcaaagaggtctagtggaaaagagacagttacctaagcaattaaaaaaaaaaaaagaaaaaaagaaaatgaataatagaataatgaggacattcaatgtaaatgattatgaatttacatggtaatatttgggagggatgtcaaaggaaggtttcaaggacaacatgggaataacctgtaacctaaaagatgaacaggaattatccagtggaaggtaaaggggaaagagaataggtttgaggggtttctgaaccctactgatttctacgaagttatcttaattgttcttttacatgagaacagcacttcatgttcacataattgacatacttgaaggagattaatgttagaatctcaatgacattgtgtaagtttggaaaaatttcttcttgaagagatgtaccaaaggaatttcattcatttatatcccaaatggaaatatgtggaagttgacgtgagaaatggaaatggaaataattggcatatggaattccctaagtagaggagatgggctgtgtgccagagaggaaaaagagatttcagccatgacaagggatgtggagcttaaatgttgtgaagggctgtgcatgaatcattctgagatatgaatagaaccttctgctttggggactttctcaatgggaagcagtgtgtgtgttcagattgggggttgcagaagaaacaggatctggagagtcatttcagcatctctggagtaagcaattgtcatgcctactagaagaaaatatagaaaaaaaagaggggaaaggaaaactagtattattcatggtgtgtgaccttcaaaagctaggtacatgagaatgaatctgatgtccggttggataggggaaaaataaataaagtggttggtcctgtgaatctttcttttgaaatgtgctgagacagttccctggaaataggagggatggaatagatggtttatttcctaacaacctttgatttgatgacattcaaggttgagtgcttaagatgccctgaaaaagtgaaatttggtaaaccatggactttcagatttcttgtggaaatacagcctgtgtcatgctgtgctatgcagagagggaagccattcatctttggagttaggaattggctgcgtatgcctcagcaactggatcccttgatagcactgaatggtttctgaaactgggtttttgtttttttttttaatgtgtgtgtgtgtctgtgtgtgtgtggagcctagtaagtatccatgtcagttgtataaatcatctttgttagacacaaaaaagggaagttatgtcctactttccaacctgaaaacaaagtagaaaaataataggaaatgttttgttaaatttttagttatttggctgatcatgaaatagatccatttaattttcaagaaacttgccaaattcacatgtaatatatgaaggcctctagaaagattcaatgtctgggcattcccattaaagtcagcattttatttatactttcttgttcctcattcgtatgtccttgcccttaacttctgccaggtgtgcagcagggtaaatagaagaacaaaggtaagcctcccctaagatggcggtgtggggcagaaattttgccttcattaaggaaacttggctgaatgaagattggggcaattctgttcatccgtcataggccatcaaacagctttgtattttactgtcaaatggacttattcatcagaaatgtgttagccataatttcacgacaacacattgttatgaataacaaatgctgaagaaaagtctgtttattttttccccctagaaacaaagaggactgaaaacaaaatggtctttgtaattcatacctacaggtaacccccgagctgaaataattggggtttcactgaagcgctgcaaatcaattagatatctttggggatattgaaacaatacaaaattttttaaaatctatgtattcaaccttgctttataagcaaggtctctaggccttagtctcataataataatcatgagttaaggtctctaggccttagtctcataataataatttaaatcaaaataataaataccaattttaacaaaaatatgaaaatggcattagtaataaataatactattaatattgttaatattaaatggcattgataataatcatagtttttattattttatttaattaattaatttatttatttttgagacaaagtctcactctgtctgccaggctggagtacagtggtaagatctcagctcgctgcaacctccacctcctggtttcaagcgattctcctgcctcggcctcccaagtagctgggattacaggtgcaagctatcatgcctggttaatttttgtatttcttctagagatgaggtttcagcatcttggccagcatgttggccaggctggtctcgaacccccgacctcaagtgatctgcctgcctcagcgtcccaaagtgctgagattacaggcatgagccaatgtgcctggcctctttttattattttaaatgtcatttgaataaagctctctagtttacaaagggttttcttatttagtaggtagaaccaaggtctttttctctacttgactgctcttgaagcccactagaacagtaaaaataatgcttactttttcccacaaagggcagaatgaggaccaaggaactcggattaaaagacagctgcagaaattgagattgaacaacaaggcggggtgaggagttttttgctacaggaaaaccagatgtgatttttgggagactttcatgtttgaaaacacagagcagagtgagggcagaacagaagatgattggtagttaagagacctagttgatttcttggacctgacaagtgtgaatttaggcaaatatcatcttatctctaagctctgtcaaagaagaaaaacttggggatgtttaagattctttctgacacctaagaaattgtatacatatcaacccatgccactagtcctacctacctttagcattagaatggacacttcttccaggcaggccacatccccagatcctcataccctgtgtaccgcaaagcaggtcttctggaaaggtctgataagttgaattgtttgtagtaacaaaagccaggaaacaagctaagtgttctttagaaaggactgctaaaacgaacaacaaacaaacaaaaacattggccaggcatggtggctcatgtgtgtaatcccagcactttgggaggccaaggcaggcagatcacttgaggtcaggggttcgagaccagcctgggaaacatggtaaaaccctgtctctactaaaaatacaaaaatgagctgggtatggtagcatgtgcctgtaatcccagctacttgggaggctgatttaggagaaatcgcttgaacatgggaggcagaggctgcagtgagccgagatcatgccattgcgctccagcctgggcaacagagtgagactccacctcaaaaaaaaagaaaaacccaaaacaaaaaattttttaaaaaataataacctccatacagtagatgaggaagatctatagttataaatgtggaatagtcacctgaatttattgttagaggaaaaggatgaagtgaagaatgatgtgtgtactctggaactttattgtataacaataaactagggtacatatgtatctgtgtagatttccttgcatatgcatagaatagaatatctcttataggattcacaagaaactggttacagtgattgtctctgaacagaggagaaaatgaaggaatgggagtcagagctgagaggaagacttacttattgcatgaatgtttgcttatatatttttaaaaataaacatacatttatttcaaactattgacagatacgtttaggtttttatattttgcatatgcgcatatatatggagagaggtgaaaggagagcatgaatcttagaattaaaaatatatatatttgaactctggcttcactgttctgcagtgtgaccttggccaaggctatgatattctctaagattgcctttctcctgttgtaaaatggagatgagaacatctccctttcatgacgtgtgtgtgtgcgcagcagattgttgcaatcacttgtaagtgagtttccccactgctttcctcatggaattaaaaatctcaatttctctttcttccagcttcattcagatattgactctggtgatgggaacattaaatacattctctcaggggaaggagctggaaccatttttgtgattgatgacaaatcagggaacattcatgccaccaagacgttggatcgagaagagagagcccagtacacgttgatggctcaggcggtggacagggacaccaatcggccactggagccaccgtcggaattcattgtcaaggtccaggacattaatgacaaccctccggagttcctgcacgagacctatcatgccaacgtgcctgagaggtccaatgtgggtgcgtacggtgtgggaggcctgctctgcttccaggcctggtgtctctgtggtgggtgggctgaagcccgttctcccaaatcaggaagtagagcttcttctttatcttttatggcaaaataacaaaaggaacaaaaattcttttgttcctctgtaaaatgggaataacaatttctagtcttgtaggaatagagataatatacatccagtcgctagtgcgtattgatgtctaataggtaatgacactggtaatatctgttgcctgtagacattgtgctaattaatgacttacatgcactattttatttagcttttgcaatgattaatctttacaatgaggtaattccaactcaccgtatttcacagataggaaacccatgccagaaacaagctaactaatttctgtagggacatttgagctattaaatggatctaaaatgcacatttaaccacagcactatgtcactatgttcagaagtacgtatatcttttcaacatgcttgaagacacattaagttgctaaaggataattttttaaaggatttattcaaagaattagccaccttctggcaatagccttctttataacatgcacataatgaaacatttgcataatgtttcttttgagaaacattcctcatattaagaaaggtttgtctttcaaacagtgagtagaactgttctaatcagggagtgagtctgcttaaaagagttttagagctcaaatgaattcaggaacattttacagatgagaaaatccagcaagtataggaatcaacctacttaagaaagataggtttgactctagaacgctaagatccttccactgtgcatacagagctttttatgccagaaaatggtatattccttctccaccaggaaaagtcaagtacttatcaaaagccagcctgaaccatttcccacctttgtctcttccattttccctgcccagtccttcagcctcttggtgtttagcctgtgtattataatgagaaacaacaaatatcaaataaatccatacagaggaaacagcagtgtcagcaactgagtgtcaagggtggggatggggtggaaaggcaaatcatcaaaatatataatccaggaaaattttcattattctcacctttgcgggctcattgatgtttagggataaaattcaggctttttttttttttttagtttcaacttttattttagattcagggggtacatgtgcaggtttgtttatttatttatttatttatttatttatttatttattttgagacagagtctccctctgttactcaggctggagtgccgtaatgccatcttggctcactacaacctctgtctcccggcttcaagcaattctcctgcctcagccttctgagtaactgggattacaggagcgcgccaccacgcccggctaatttctttgtatttttattacggacggggtttcacatgttgttcaggctggtcttgaactcctgacctcaagtgatccacccacctcagcctcccaaagtgctgagattacagacgtgagccaccgtgcccggcccatgtgcaggtttattgagtgaatatacatgaatatactgtgtaacactgaggtttgtggtatgaatgaccccatcactcaggtagtgaacagagtaaccaacagatttcggcacttgtcctctggctccactctagtaatcctgtgtttattattcccactgggtaaacattgggttcatttatacctccagttataaatgaaagcatgtggtatttggttttctgttcctgtgtcaatttgctcaggataatggcctccagctgcatccgtgttgatgcaaaggcatgatattattcatgccaccatgcatagtattccatggtacatatacaccacatattctttatccaatccactgttgatgggcaccttggttgactccatgtcttcgctattgtgaatagtgctgcaataaatatacaagtgcaggcgtttttcttgtagaacgatttattttcctttgggtctataaagagtaatgggattgctgggttgaattgtaatacttttttttttttttttctgagacagagtctcgctctgttgcccaggctgcagtgcagtggcacgatctcggctcactgcaatctctgcctcctgggttcaaacgattctcctgcctcagcctcctgagtagctgggattacaggcgcctgccaccacactggctaatttttttgtatttttagtacacaggggttttgccatgttggccaggctgatctggaactccagacctcaggtgatctgctcacctcgtcctcccaaagtgctaggattacaggcataagccaccgtgcccagccttgaattgtaattctgttttttttgagacttctccaaattgcttttcagagtgacctaatgtacattccaaccagcagtgtatatgtgttcccttttctccacatcctcaccagcatgttattttttgactttttaatcatagctattctaactagtgggagatggtttctcattatgggtttcatttacatttctctgatgtttaatgacgaccaatttttttatatttgtaagccatttgcatatcttcttttgctaagtgtccatccatgtcttttgcccacttttgcccacattgtttttttacttgttgaattgtttaaattccttatagattctggatactagacctttgttgggtgtgtagtttgtgaatattttctcccattctgtaggttgtctctttactctgtttatagtttccctttgttgtgcagaagctctttagtgtaattaggtcctgcttgtcaatttttatttttgttgcaatttcttttgaggacctagtcataaattctctcccaaggccaatgtccagaatggtgtttcctgggtttttttctctagggcatttatagtttgaggtcttacatttaaatctttaattcatcctgagttaatttttgtatatggggaaaggtaggggtccagtttcactcttctgcatgaggctagccagctatcccagcattatttattgattaaggagtactttcctcattgcttaattttgtcaactttgttgatgatcagatggctgtaggtgtgtggctttatttctgggttctctattctgttccactggtctatgtgtctgtttttgcaccagcaacatgctattttggttactgtagccttgtagtatagcttgaagttgggtaaggtgactcctccaacttttttctttttgcttaggattgctttgactattcgggctcttttttggttccatatgagtcttagaacagtttttttttctaattctgtgaaaaaatgatgttgctagtttgatagaaatagcattgaatcagtagattgctttgggcagtgtagccattttaatgatatcaaatgggaaaacattctatgctcatgggttgaaagaatcaatatcattgaaaggatcaatattccatttgtttgtgtcatctatgatttctttcagcagtgtttcgaaattctccttgtacagatcatttacctccttggttagatgtattcctaggattttattgttttgtggcccttgtgaatcgcactgtattcttgatttggtcctcagcttgagtgttattgatgtatagaaatgccgttgacttttgtaccttgattttgtattctgaagcttcactgaagttgttgatcagttctaagagccttttggcagagtctttagagttttctaggtatagaatcatatcattagtgaagagaaataatttgacttcttcttttcctatttcgatgtcttttatttcttgctcttgcctcattgctctgattaggacttccagtactatgttgaataggactggtgagagtgggcatccttgtcttattcctgctctgaaggagaatgcttccagcttttgctcattcagtgtgatgctggatgtggctttgtcatggattgctcttattattttgagaactcagacattgtattatggcatatgacagtacagtcgttgttgtcagacagtactatgaatcatggctgtactcctaatcagccttacgaacccaggcaacctattatacctttctaagtttttattttgccatctataaaatgaggataatataaactatgttgaaggttaaatgaaatagatgtgaaatacaaaaccattgtaaaggatgtagcagagttctagaaggaaattaagcatttaaaattaataatttccctagccacaccatgatggtattttcctttataaatctatcctgcctagaatagtgactgacaaatgggaagagctccaaagagattgtttctatgaaataatgaattatagaagagtaactagaaaaaagtgagatgtacaccacacaaaaatcactgacaatcctataaattaaaggtagtgataggctgtgtaaactggctcccttgcctcccacatagaaccttgcccctctgctgaaaatgttacagaaataacttgagttttgttgtgtgctggattggggttagactttggcaattaccaactttgtgaaatagattacaaagcttcatatatctcaagttcaatttctcactaatacagtagatgtaaaaaatgcccagcagaggaatgctggcaaaatacatggaatgtgcccccagatcatgctggcacagagaaattcgataattactggttttcttcttccagctcctctctccccactctgaagcccaacatgccatgccccagatacttgctatttgtgaccagccaggaacaaaggttgtttttaggaaaagcagaaccccatctttcttcaatttcctggtttcccttcgttctgacccatgaatgcttcccttacctctcaccagatgtttactggtgatttctgttatatggctaccagaccagctacaggtgggaagatgcaattttcatgccagtagggaacagcattctgctcagtatttatggccataaattaattaaattgtagaattagcagcaattttattacatgcaaagcaacaataaaatgatgtatttattgttctgctacagatggaagattgcactctgtcctttcctgaaagcaatttatcgttaattatcatttattatactctgggaagattttaatgtaattatttgatatactgaacatttcaagtgcatgagttgtaagatatttttgcaataatatttataatattattttaatcaccaaccaatgtaggatgtactataaatacagaaagttcatttttaaactgtggccatttttatagagcaggaaggaaggaaggaaggaaggaaggaaggaaggaaggttggttggctggttattttgcatctcaactccaggaaaatgagagaatgttgaataattgtggtgccttcttcagggttaattttagaataaaactttgtaaacaagaacataatttgaaaatctgaggagatgttgctaattaatttatttcacttttaaggaacgtcagtaatccaggtgacagcttcagatgcagatgaccccacttatggaaatagcgccaagttagtgtacagtatcctcgaaggacaaccctatttttcggtggaagcacagacaggtactgtggaatgtcactgtgatttgtgacacatggtgaataagaagtcccaggcctgaccagaacttatttaatactctgttttctcaaatatgaaaaaggaatacagagggctaccctatagggttagtgtgaggattagatacttggcctgtgcctatcacacagttagtacaccatgaaacatttattgttggttttcccatatttcacgatgacccaataacaactataatctaaaaactcaactttaatatcagaagtaagagagcaataaggactaagtcttccacagtgctctctatattcctcacataactgttgccatatctacagagagaaaaagcttccaaaggtctcctaaagatttaagtgagcatggcactcatgtgccaatatccagcaatcatgcagaattcagttattaatttatcattgttttccgtgacaggtgataatagacagtatgtgcttatatgagcattgtatatattttaaccgatttggttcactcttttaaaaattaatatttacactttaatgtattgcatgaaatatgcacctcctgctttaaacttaatatgcaccatcaaaacatttccatgaattgtatgtagcaatagacttacagaagattgtgctggaagtcaaaaagtatgagtttagtcatggatattcatgcaatgaccactcaagtatttcagtctttagggtgtttatatctgagaagaatagggttattacttgaatgtacaacaaaacataaatacaaatgctgtatagtaatttttatgatttgcttgaaaagacataatgatgcttcagtatggctgcctttggttgtaattaccatgttgaaatgattcttgctgagggcatgggatattttattcagcattgcttcctcagtgctcagaactttcttgttgtcataatgttataaacgaatatctgtgatgttgcctgcttacctgtccaggtatcatcagaacagccctacccaacatggacagggaggccaaggaggagtaccacgtggtgatccaggccaaggacatgggtggacatatgggcggactctcagggacaaccaaagtgacgatcacactgaccgatgtcaatgacaacccaccaaagtttccgcagagtaagtaggtggacttggctttcacttttccatggtgacacagccagctctctccctcctctaacctattcctgctttactgaggtatcaaaaagaaaatctagaaaactaagggcaattcatatcattcttacaaaaacaaaacacaaaaacaagacaacaacaacaacaacaatgtcggggagtagaggtagtaggagaatgaaaagatgtaaaaagttctacaaccctggaaacaaaatatcgtttttgctaagtattttgcttggtagtagtgatgcaatctagtaattaattaacccttttctgcctcagtgtcctcatttctaacctggatataacagtccctgaatcagttatcaattactgtgtaacaaattgctggaaaacttagtggtttaaaacaataaaaataataacaataatttgtttttatcatgtgtctggaatttgggcaaggcttggaggagacagcatgcctctgttctccatagcaacaactggggatagctccactggggttggaggatccacttccaaaccagcttacttgcatggctggcaagtttgtgttgattgctgcttcctttctgcgtgggctggttttggaaagtgtgatccccaagggcaccaggcagaaattgtcttgccttttgttaactagcttcagaagtttccactggaaactggagtcataagccaccaaatgtttccactggagtcataaggctcacaaatctaaggggagttcatgtagaccccacctttcaatggaagacctgtcaaagtcatgttgaaggaaaagcatgtgggatgggagatattgttttggccatgttttggaaaatacagtcttccacagtacctaattaataggattactgtttgaactaaaggagctagtgtaaaatcttataatgacaactgtctataagtcgtcaacaaattctagccattgttatctgggggattatggctgttctacaaaatttataaaattgcagagggaattaaatgaaaaacaatgattttgaaaggttattattaataattgtaattatagcaactaccatcatttaatgaatagtcactactattgtaaatctctgcaggagcctacattttacagataaaactggtttccgtaaaaagtgcataagttgccctagaaatgtggcaaagtcagagtttgaacacaagtctgtctatgtatgtacagatgtgtatgaatggacagtatgactgtggtgctgctggtgctgctaatgcatgggggggttcatcatgaaagtgtctttttcagttagagcctgtgagcttactatcagagaaatggaacattttgcaaatgagataacaaggaaggctactaaatgtggccccaggaaggcactgtggttactcaaaggaattcaaaagcaagaatctacacaagactcttttgcctggccgggcacaagttcagcatcctcaataagcctgaggctcatataacattcaaagagctgcatgctccattatccacactgtacgattgtctggtgagctggaaaagaaaggtcaagcagaattattagcaggcagcctttactgcccttggtcatagacaatcatatagtaaagttacattgctactgtactggttttactggtttcactgccgtgaacttgaatgagatttggacaaaatccacataggacatttttttttaaaccttcacattaattggtaattatctacaagggactcccacttcccactcatcctttaatatagagggcatggtgagattaaatagattatgaatccaaaagaaagttgcaaagcaaaatactattgataaatatagacaaagtattagaactgatgaaatctctgtaaggggaaattaaaacataatgagctgaagtaacttgcccaagaccactttgcttggaaatgatagaggaaagattttcaaccctggcttccctatattgtgtgttgcacagagtattaaatgtgaaaagcaaataagataatgttgaatcttagctacttagtgcaaaccttccagtgatttccccaagtttaaacaaaacctgaagtcttttccattccccacaatggtctattttacgcaatttggcctccacttccttacagcccttctctctcaccagaaggctgtagtcactctcctcctcttgctcctctgcaagtattcaggatcttctcaccttagggtttttgccatttgctaatcacctggctggtagtttttatcctgcagatatgcacgtcattgtcttcctcagtcattttagattcctttttctaaagaatgtcttctcctaccacactacgcaaaaccaatctctccctctttctgcttatcacccacacattattaacacaagcatgcgtgttcaatcacactcatacacatacacaaactcactcacaaatagctcacattcatacacacactcacactcttacacaacagattcatgcccacacaatcactcatggccactcacacatttaccccctcaccctcacacacaatcatgcacttacacacccacaaccacacacccactctcagaaccctcacccttttaccctactttattttcctttttcattgcagtgacatcagagtgtgtttacatttgtttttattttttctctttagtcggcctcattaagagaggaatcttgactgttttgtttagtagtaaacaaaacaagcaaacaaaacagtgtcctggcactaggacagtacctccatgtacagtattaggctcccaataaacattaaataaatatataggagggtcacactgcaggaaagccttctggagaaggtaacgcatgaccaacttgtgaagcaggcaagttgcgaaggaggtgaaataaggggagtgtcgaatatagagttagacagggagggatgttaaagtttgcatttttaaagtaactatggagctgttgaaggaaggcttttaaacagagaattttttttttctgggctcttcgcaataccataagtgagccttggagttaactcatggaccatcctgaagacatgaaaagaagcttcagctattttgctaaatgaagacatgcatggttctccatcattacctgatgggaaatgtaacagagcattgtttttctcccttacatgtggcaggtgaccccagcatttcacctggacccagatattgttttatcacccttcgtagaacacattcttttgacaagcaggccatgtgggatcctcctccccacatccactcacttctttcatgttttcagtcaatagaaagttcaatttcaaatcctttgagaaatttattgggattcaatgaaatctatagtcttacagctgccaaataaaagagaaaataaaaatagatgtcttcttcttctaggcgtataccagatgtctgtgtcagaagcagccgtccctggggaggaagtaggaagagtgaaagctaaagatccagacattggagaaaatggcttagtcacatacaatattgttgatggagatggtatggaatcgtttgaaatcacaacggactatgaaacacaggagggggtgataaagctgaaaaaggtgagttagggtaaggaatcagacgtgtcagtggtatggcctgctctgccaaggcaacactgcaagaaacagggaggcgacggttaagaaatgagaatttgcgaaaccaggggctgacctgactttgtagttgagctctgagctctggaagatcacagaattgtattcctttctgttactgcagagaagctgacaaaggggctggtgatacctgcctgagattgctagttagttcttaaatgttttccgatggagggaagcacagttctcccatggagggaaggacaatgagataaatctagattttgaagaagcagccctgagcatgcatggaattccccccttagctctgccacactgaatctgttagataagctgttcagaactcttactgtttcaacattcaagattcactgcattgctggaccctctgtgaaactgaagccttctctacttgtttttatctcaagtgaacctggagaagcaacaataatggaccttctcccctagtcaaagagcctgtggacctcccctcatagtcagtctccaaaaacatgtatctggaattaatttattacaaagagaagtttagtgtttcttcttttttacatgcgctcaatactgactactggccagacacagcaccatcctcttacaaacatcatttcatttacttttcacaaaaacaaacaaaagtatgaagtaggtagtgttatcccaatgggcaaagagacctcaacttaattttgaggagattggggctcagacagatgaaatcatttgacccagtcactgtcatatagctcaggcatgccgacctggaattcacaccttagttattctagaacaacttccctctcaagacattttgaaaacagctggcctggaaagcgtttgtaaagaagagccagataagattcacttccaagtgaagaaataattcccgtacattctaaaaaggtttccccccgtgatttaccacttgagaaatcaacacctctccatcatgaaagtgtatggagcattaaatcggaattggaagatgggattaccttggttttaatcaagcgttcattttcaacttagttttatagcatgaatattaaactccttggtgcgatggaaaagactggactctaacactgatagaaaattaatttgaagcatcaataaagaggccagtagctaaagaggagggaaggaccagtgggggaagacaggtcctgaaaggaatctttcaggtgggggagcaaggagtgacctgtgctaagaaactgacctttcacagacttttaaagtatgttggggttggggaaaatattatagagcacaaaacaaagaaaaggtagggggtgattgttataaaaaaagaaagaaaatgaaggatatggaaattggggtgaaatttggatacttggaaaagtctacattaatggatgaatggtaggaccgaggaagcctaattatcaaccacagggagctagggcagtcactaattctggtttctcctctggaaaagtagctgtgtgaattgtgtgttgcctagagctgtcaacttacttcgttaattaatattactatctcttctgcttgacactgacatatgaacattgacatcagcaattcctgcctcccatcctttgctgttcatgtaattgggtagttggttatgctaaggttgtcacctgtttttagtgtattcagggcataaacacacactgtatctctgaaatcctgaaacatttaaatcacccccatggaactcacacgtcgcaaatgagctctctgcatatgattaatttgcacatttgcctccaattcagtgtgtttattctaggcaaaggaataatcttctataaagcactgatgcttaggttttaaatagtgtaagatgttattgcatttgtaaaagaacatttgctcaaacttctagcacaaagttccaaatgtccaccgggggaaaaaaaagaaaaattatagatgaatttaacagagtaaaaatatgactccttgtgaaagtcattccatgcaatttaatactgtaaaagtctatagagacattatggcaatatttctgcattttaaagtattttttaacttagtgtttttatttatttcctaatttattcacccatttttccaccaagagttattgagttcttactatttgtcaggcaggccctttgccagaggctggaaatctaaagttgaagaggcagagtcttgaccacagggagttcacaatttaacaggacagtgaagtgatacaataattaaaaccgagagggttttctcagccttagcagtgttgatgtctagggctggataattctttgttgtaggaggctgttctgcgcattgtaggatatttggtagtatctagtatcccaggcttcccctcactaaaggtcattaagcacgtgctctaccccacccaacagtcctgataataataataaaaataattactctagacattgcctaatagccctggagtaactgggagcaaaatcactccccagttgaaaattgactgcaatagtgtgataaggcctatgcacatgggacatgaatgacttcttgtgggggcagttctcaagctgagtcttgatagatgaggagaaatttgctggatagttaaggacagaaaaggcagaaaaaataactcatgatgggctagtatcaatggaaacaggacacatttaagaaactgcaataccttcaatcttgagaatcttaagatatatacggtaaaaccaacaaacaaacttgttaaaattcaagggagatgttacaaagaattgaagaaggtagaagaggtagtgagatagtagtgaaggagaagaattcaagaaataattactagatagaatcattcatttattgaatattttagaaaacaataaatacctcttgagttctgactgtgtcttagtttaatagtgcacaggaaagagagaaactacccttggggtatttggacaatctctgtgtggttagctgaggaagaaccagggtcaaataaagatgaggttttaggtggcttcgtggacttagaggggaaaatccaatctgttcacgcagcacctttgactaaatgggaatcccatctatctcagagaaatcaccgcacagtgtctgagctatttattttcaaccagataaactccttgaaaagcagtgtcagagcagaattataaggcatttttaatattccctgttttaataaaactctttttatgtttgatttttctttatattctttgtccgcacgtatatagatgtggatacataacatttaacacggttgcaatcagagggtgatctgatttgttaacttaatgtcacatcataaacattttacatgctgttatataatgtacataatcatttttaatgactacataacatcccatcctattgacgaatcattatgtccttaataaaatctcacagttggatttggtgttttgtgtgtacatttccacagattagatataaccttctattatatctaacaaatatcatgcatttttgaatattgtttgttttggttttctgttgaattaatccctcagggaagattttcagaggtgggattagtaaactacggggtattaagaattttatggcttatgcaatgtgttgcctcatttagctttatttcaactactcataacatggatataaatgttcacatgggaaactacctcacatcttgttttggagggaggaagggaataaattgtaggcaaatgtctaaatgttaagcatctatcagccccactcttcattcagtcaaaatgatggatgcatatgatcacttggtacagtcattcttgcctactgtgggacaaagatcagcaaagagcagtaagactcagtagacttctaagggatgctcccctccattccactccaacccccacctcgctggggagggaaatgaagggctgccaaagggccactagggggccacacaaatctatctggggctgttgaggaggacttcacaaggcaatgaggcttgaactgactaccagacttggaatctcgccaaactgggaaagtacatcccacataaacctctgcaaaggcctggagagcctagcttgggatgtgaaactgcagcatgaggatattatcctcaacacccacagggcttcccagtgggaaaatagctccaggttctcaggcatatgcctaaaccaagtacaaaagtttctgctctagcaagatcaacagactatgtgatattagaaaatttccacttttctgattataaattacccagtctcagaactatcatattccagtgtttaatgctatctaatatttgaaaggattttttagaagttgcagcaatcttgtatgttcagcctataaatatcattcctttctgctgctcagtaacctagccaaggataaaggaactgctgggtcccaggatgatggaaaggctgggggcagatttagatttaggaaaaggtagtgtttcctgactctgggaagatggaggtgggaagatgatagaaaaagtatcaaggatattgaacttgcttaaccctgttgaaactgggatcatcagctttagtgtagagtactgcaaaattagatcaggaataagccccatgactatatgcccattcagaataagcgtttgccaggcaaatgacaacagcatggcaggcagatgctcgccttaaaagatgaaactctttccaaacatttggtagttcagcaacatccagagcactaattagaaagttgtttcccaggcagccgggcttgtttctctgctacaatgttactttccatcctttgctgactgattcactgtaactcctctcattcaaaattaggcagtgtttactatcaatttccctataactacagccattcaaatgctactactcattttttttctttcatatttgtgtaaaattttactgctttcatttgtttttctttaaatagaccatctttaatatatatgcattctttttttttttaaaaaaagaagcattttaaaaaaggaaacatttcccttattatcttgtcacttgccaaaaatagaaggtaacttaaaaataaatgcaatcaaaccaaaacgatgccattacattctagctagagttgtatcataatatctcacaaaagagattgtgaagcagagcagatgtgttaaaacggagatgttctacttggtgtgtcaaggatttaaagacttggaaaagaaagaattatctcactatgtgagttaatatcatttgacaacctcacctatcaaattacctataaaccaccctatgtcatcttatgggccactgctggtaagagtcccagacattgggaaacaacgtggtcagaaactttcaacatgaagctttcaatatgatcaagctggatggttgcgggtgggagaggtatgaagcagtcatcaaacaagacatgctttttggctgaaattcagtggtatttttgttaccaggattcttagttttcagaatgaggtaccaaatgtatttttgcaatgttttaattcccttccttaggtaattcttagtgacttatttgggcaacattagtgttgctatatagaataagtttcattttagatgacgtggtctttctgtgtctgttgtgctcttcgaatgacccattaagcacattctaggtttcagcaattgatttgtgtgattttctgaccaaatggctcaggtaattggaaattgagtagactctgattttctctctttgaggaatattcactcgtccctataaaacaatcgggtctttctcttccattattctttcaaggaattggttgtcaatcttctcttcattcttgccagcctgtagattttgaaaccaaaagagcctatagcttgaaggtagaggcagccaacgtgcacatcgacccgaagtttatcagcaatggccctttcaaggacactgtgaccgtcaagatctcagtagaagatgctgatgagccccctatgttcttggccccaagttacatccacgaagtccaagaaaatgcagctgctggcaccgtggttgggagagtgcatgccaaagaccctgatgctgccaacagcccgataaggtacagacggatttattttaagagcttggatggggaattttagagtcaagaggttctgggaaagccctgtaggaaccacgtttttcaatttcaaaaagggttcaagtttatcaggttcaatagaatgtaaacaagattaagatttagaagacatgagcttcccttcacctctgttcctgactttttggataggattgttcaagctacatgactttgctctggagcagattcccccaggcatactaggtgacggagccctgagctgggcctgtctgcctcaggggactgtggggaaatataaataattattgtgaaataattatagtaattgcaatttattaaataccttcccattctctggttactctatgaggaggttaggtatgtgatctaatcaatcccctcaacttaatcgatgtataaattgctagtccttaaaatgagaggaaattggaggcaatgcaagacaaagtgacttgcctggaatgatacagccaccgagcaggaggcaaggaaagccagctctgtctaactgctgctgagtactttgtaaaagtagtaaagtgtccaaataaatttcaggtgattttattattatgaatacctttttttgtgacaaaaaaaatgtgatccagaactgtggctgggcaccgtggctcacatctgtaatctcatcactttgggaaggctaaggcgggtggatcacctaaggtaaggagttcgaacccagcctttacaatgtaatgaaaccctgcctctactaaaaatacaaaatttagctgggcatggtggcatgcacctgtaattccagctcctcaggaggctgaggcaggacaatcgcttgaacccgagaggcagaggttgcagtaagccgagatcaagccactgcattctagcctgggtggcagagtgagaccctgtctcaaaaaaaaaaaaaaaaaaaaaaaaaagaaagaaagaaagaaaaagtgatccaaaactctgcttctccactttcctcttcatcctgagctaatgactgatgaagctaatgacaaaaatgagagggtgataagaaggaggtggagaaggggcttgaatcacacgtttacagagtggaagttgatagtgccctggaatttcccctggaccggattctagcaggggtttcttttcccacagccactcctctcatttccttcttgcttggatttctttatatgcctccacagggtctcccaaccctcagtctttcatttacctctctgcatgaatcctgactctgcagccagagtgaccctcatacaatgcacatccaaacatcacatcttaccttagttaaaacacaagaaaaaattaatgattaaatggttccctgttgtctccctcttcaaaataatctaacctcattcacttagtttaaaaaacttctttgcacccctctacctccatctcattctttgaagctctcctgctgtctcctaatccctggacttcacatgttcctccttctagctggtagcccttgcctttccaagttaccacattggactcattttctccatctccacttaggtgttatctcctataggaattcttccagggctccctagagatgtatcggatgtccttcctcttgctcctccctacctcaccccccaggctacatcacagggacacttaggttatgtgaggtcctcactagaggatagtctcaaagagctggatgtctgtctagtttaggccttggcaaactatagcccataggccaaatctggctgccatttgcttttctgtctcactctcttttttttttctgttgtgaaaaaaatttacatatcatgaagcatgaactttacctgttcaacttgtacaatttattggtttttagtatatttcatgaagatgttcaaccattaccactgtctaattccagaatatttttattgatcccccccacaaaagaaatcctatgtccattagcagtcactccccgtttctcctgcttcccagcctcctgtaacaattaacttattttgtgtctgtatgtttgcctattctggacatttcatataaatggaataatacaacatgtggtcttatgtaactgaatttttgcatgtagcataatgattttgaggttcatacatgttgcagagtgcatcactaattcatttctttttatctctgaagtaatttttcattgtatgggtgcaccacattttatttgctcatttatcatttggatacatgtttgagttgtttccaaacttggctatgacagataatgctgaacattcctggacatgtcttagcctaaacatgttttcctctttcctgggcatatacctaggagtggaattgctggattacatggtaactctatgtttaactttctgaggagctgccaaagtgttttccacagtggctgtaccattttactttcttatcaacaatatatgagagttccagtttctccacattctcaccaacacttttttgcctcttttcattatagctatcatagtgggtatgaaatgatatatcattatagttttgatttgtattttcataatgactagtgacaccaagcatcttttatttatttatttatttgctactgagacatagtttcactctgtcgcccaggctggagtgcagtggcacgatctcagctcactccaacctatgcttcccaggctcgggcgagtcttgtgcttcagtcccccaagtagctgggactacaggtgcacaccaccaggcccagctattttttaaaaaaatagagacagggttttgccatgttggccacgctggtctcaaattcctggcctcaaatgatccacctgtttctgccttccaaagtgctggaattacacgcatgagccactgcacctggcctgagcatctttttatgtgcttattagccatttgtatgtcttcttgggagaaatatctattcaagaattttgcccatttcataagtggattatttgtctttttactgttgttgtaagagctctttatgtattctgaatggtagggccttatcaggtatatgatttgcatttttttctcattccatgggatatcttttcagtttcttaatagtgtcctttgaggcataaaagttttaattttgaggaattctagtgggtctattctttttttttaatgtctatgatgaaataattgtctaatctaaagtcatgaatgatttacacattttttaaaaataaactttatgcttttagctttcacatttagatttttatcagttttgagtataattttatgtatgttgtcaggaaggggtccaactttattattttgcatgtgcatatccaattattccagcactatttgttgaaaatactattttgtcttaattgaatgatcttggcattcaggttgaaaattgaccattcatagtcatagaaaccaggattgttttgtactgttgattacattgcattaattatatgtctatccatacagcagtaccacatagccttcataaccataactttgtactatgttttgaaatcaggaactgtgagttcttcatcttttttctcaccacctatttttgtagataatgttatatgggaagatagtcacatcatttgtttgcatattatctatgtcttctttcctgctgcaagggcagagttgagtagttgaaacagagattctaatttctgcacaagctaaacatttgctggctggcccttgcagaacaagtttgctggcccctgttatagatcatcactgcgccttccactaaacagagtacatggcccaaattcgatgtctaacaaatatttattgaataaataaataaaataactcctgatttggcttggaaggtcaagctcacagtttttgagtgtaaaacaggaggcgtgatagaagtgatgacatcttattcacacatttatttgacaaaccttcattgagcacacactgggggttcccaatatacctagggaggcactaatgaatttacttatgaaaaagtaaatggatctaaatatgaaaggaaattacacggacaatggaatttgtccatttatatcaaagaaaatagtggcaggaaagaaggaattcccaactataagtggtgttgggttgcttttggatctttgaacactgattcttctgaggaaaagagagataattaacatttactgagcatcttttcagcctcatacaacaggttttacaaagttatttcagtcagttctcactgacatcctttgtggctatgactgctctagaattgaacaggtgggaagagtgaggctcagagcaatgatgagacttctttaaagtcacgtggacagtcagtattgaacactggatttcagcccagatctgtcttgagttcattttgagctttttactttaacccagcagccactaatggaaagatttcccaagaaggtttgattactatattctctttgtgcagaaagatatgttacataatgactatggacccttctaacacctttaaatgacttaaaaatcttcacagtgtgaagtttaaatgagttatctctggcctagaatatcgaggtgcattagaaactttttagaagagcagtgactgtgacgtaaaaacactcactcatttcctctgcacctcattgtctccaaggattcacatctgcaattgattatttgggtcatgttttcaaatggtagctgttctgtgcatgtaggcaatttccatgtctataattatccaaggatgctcaataccacacttgaaccaaccgcccactcccacctacttgggtctttgttatttagaaataccagacaaattttaagagaatattcaaagcttttatatttgtttttgagacagggtctcactctgtcacccagcctggagtgcagtggtgtcatcatggttcactgaagacttgagctccctgcgctcaggtgaacctcccacatcagcctcccaagtaactgggactgcaggtgcatgccactgtgcctgcctaattttttttgttttgtttttgtagagagggggttctcactatgttgcccatgctggtctcaaactcctgggcttaagtgatcctcctggctcagctccccaaaatgctgggatttcaggcatgaaccactgcacctagtctattcaaagcttttttgttggttggttggttggttggttggttggttggttggttggtttttggagaccgagtctcactctgttgcccaggctggagtgcagtggcgtgatcccagctcactgcaacctccgcctcctgggttcaagcaattctctcccaagtagctgggattataggtgtgtgccaccatgcccagctaattttgtatatttagtataaatagagacaggtttcaccatgttaaccaggctaatcttgaactcctgacctctggtgatccgcccaccttggcctcccaaagtgctgggattacaggcttgagccatcaggcaaggcctccaaactttttatctaatgggtcttttatcttcccttcctaatttcctggttgtttctcttcaactttgaggacatttgagtctttggacatataatggaggccttgcaatatcaccataactcttaacttcttggacattctgcagttttttgtttttgtttttttttgtctcagactgtagcattagacacatttttgttcagaatttcctttctgaaatattatctccctttagttttcttggcactaacctgttatgcctcagataacactgtacctgatgtcttcactagtctttgatccctgtccaggcattgacttggtccttctctctgtgtccactcacctatagggcttttacccaagccgtaattgacctaagtggatgcttcagatttcctgctcctaggctgatctttctccccaactctaactctgcatttatgatactgtctgttgtgcatttttacccatttgctttttctttcactggctcactcatttatccaagacatatttttgatcttgtaattattgtgacatactttaaaacaaaaacagctgtttccacccctgacttcctgaagcctgcaatagagttgagtcttttctttctgagcattttgacatatccttaattaaatgtcaacctttccttcctggtaattgatttttcctctttttctttttaattttttaaataatttcaacagttatttttgattcagggggtacatgtgtaggttagttaatggttatattgtgtagtgctgaggttgggggtatgattgatcctgtctcattacagggcatatatccaaaggaaaatcaactttataaaaatttatttaaaaatatatatccagaggaaaataaaaacacacaagcactcaactgttcatcacagcactattcacaatagcaagcatgttctttttcaatgtctttaaatctccctctctcagacactcaggtgagaagctacctgggactctctcagcctcccctagatgcccaaatatccactaaatcctacttgggctttcatcatcatctaggattccatttcctctgttacccctgtacttcactctcatcacctcatgtatttaaaaacaaaatcaaatccttaagtttcctctgctccttcttctactctcacttcctcagaccatcttgcccatcatgcgttattgatctccttgagagcttgcgttcttttatttgctcctctgctcaaagccttccatgatttctcactggctctaggatgaaggtcacactcttacatatgagagcttccacagtttgttctcagtgtgtaacagcagcatcaacaacaaaaataatagcagttactgttggttgcaatgtgtgagtcactaaattatgtatcttaaacatttattattttattgaattctcacagataacataaaagttaggtactattaatattccagttcagccaggttcctacaatcccagctacccaggagcctgaggcagaaggatgacttgagcccagctgttcaagacaagctggggccacatagtgagattctgtttgggaaaaaaaatacgcattccattttagaagataaatatgctaaggctcaaagaacttaagtggcttttccaatatcatctagcttatatgtagcagattatgaagttgtacttaggacttccaaaacccaaaactcatgcccttcatttctgtggaataataccttgaattattaatgatctttcttcccacatgtgtgttgtcatgtcaactaaatagtgagctccttcatggaaggaaaaaaagtctttgattatttttttgactcctttccacatagtgttatctgctgagggctcagttgctgagcctctcctgacattgaggaggtgtatgaatatctttggttttgtcactgtgcaaggggactcattattctattcctatggggagctgtgaagttaagtgacatcatgaatgagctcatgtttgtatactgtgaagtgccgctcagtggggggtccctctttcctgaaaagaacatgatctgggattagaagatctggcttccaatattgtctcttccagaaactagacataggccaagtttcatcttttgtaaatccaggcaattaaaccttccgatattcatggcctctgctatctctaatattctttgatttttgaccatcactgaatgccttctgacatactcattttgtaaattttgggaaatcatagcttagacctctaagagcagaaaaccacacacttatgaagctcagcgtactacctgaattaacataacccatttttgttcttttctattttggagttagtataagggagtggaaagggaaggggtttggagttcaacagacccattaaaacaagactgtatcctgggcaagttattttaccttactacaactcagtaaatgccattcttccgccatctcccacctcactttgccacaaatacagcccaataatattatgtggtttttttatccgttattagtaaaaagttaacttagtgggtgggagtaactaaaatcttcaagctgtgctgttttgcacagcctggagtcattaaaatatgggaaaatgccctacaagtaaatggccaagcttactttgtacattacacgctggaactcagagccaagctaactgagaacccctgaaactaaatgaactaaacagatttactaaaatgtagtgaacatttttcttttgtcttttttttttcctgagacagagtctttctctgtcacccacgctggagtgcagtggcatgatcttggctaactgcagcctccgcttcccggattcaatgattctcatgcctcagcctcccgagtaactgggattataggtgtgtgccaccatccccagctagtttttgtattttttagtagagatgcgatttcaccatgttggtcaggctggtcctgaactcctggcctcaaatgatccatccgccttggcctcccaaagtgctgggattacaggagtgagacactgcaccaggctgcatttttctttaaataagacaaactgatttttaggtctatacatgatcttgataaatttaaatacacttgaacggatttaaaatttcatatgcaaaaatctggcaaaggtttgatacatttgtgactttctgagtagtttgggagcaaggcaaactcactttccaaatgcagtttcataaatattcagaggatgggtgattgtagtaaatatggagaaatatgcaccacattattgtacttctcaatcaaatatgctaaacaactctttcattcattgtactgaataaggaattccaatgtggcaaagttatttctataaaagaatcgtgtacaaagtttcaaaagtaaatttgattagaaagaaaatctagcttaagtaattcattgagaagcttgatttaaatatagcatggagaaaatattcaaatattaagctgctctgaatgtcttggtctaattgcctcatttgcattctgcttaggtattccatcgatcgtcacactgacctcgacagatttttcactattaatccagaggatggttttattaaaactacaaaacctctggatagagaggaaacagcctggctcaacatcactgtctttgcagcagaaatccgtaagtattctcctcatggttttgattctactttaccaagtattatcgcttcagactctatattctggaaagtaaaatagctgagatagactaacttttttggtcttaaacagatttttcagtctttaaaatgtgttttcggttatctttctaggagtacatataggcaaagggaaatgttcttgttttctctgacagaactgggtatagacttggcaagagagccagtagccctcaggagtttgaaactcataaccatcactgaaagatttcccactccatccagtcactagtcttcactgaacccagaaaagcaaagtccttaggcccaaggtttgtgggttcttgtttatctatagacaacaactcaaacttgatcatgcatcaggttgatcagtcatcaagcttgatttctggaccctgccccagagactctgattcagtaggtctgggatagggcctgagaatttttgcttccaacaagttcccagatggttttaatgcttctctctagactcccacatttaagaaccactttgatagacatctctctggggatcaggctccatgataggcctttagaattaaagctcagcatcaaagtcagcagatgtggaaaagtgttttagttcttactggtcttaatattgacatttattctaggatatgcctctcccactaacagcacccttcagctcttaaatcgattctgtgacaagaacatctttccctgcactgcccagataggtggctggagcttactctttcccaagaatatgcctggaccaatgtgtatttctccttgacctttcttgactgtctgcattctgtcttcccagacaatcggcatcaggaagccaaagtcccagtggccattagggtccttgatgtcaacgataatgctcccaagtttgctgccccttatgaaggtttcatctgtgagagtgatcagaccaagccactttccaaccaggtaatcctgctttccctattcttggctaggaacaatgcacttggaaatagagtgtgttttttaaaccatcacttggagataccaaccactgcccaaaaaggtttcagagccatagttttgttctgaagttatgttctctaattaaaatcaggctttctagccagccagaaatttttgaataaatgatgtgccaatgtcagcatgatttatttatgggccacctttctctttcagccaattgttacaattagtgcagatgacaaggatgacacggccaatggaccaagatttatcttcagcctaccccctgaaatcattcacaatccaaatttcacagtcagagacaaccgaggtttgtactaaggttcctacgcattcagagaagtagaactggaaaacaaatggcgtttacattgcatagcacaagtattttcactaatctttataatgtcttcctgttgaagaagaaaccggaaataataatgccacctctgttctgaaacatgggctcatttgatgcatgcgaataagtgagtctaattttatttacattttttggctttgatattcatgaagcagtgggaaaactaagtggggaagcttacagggtcaatatgcaaacaactccatttatcttttttttcaagaggttgataaacccttgggggaaggatagctttatgaatattgatatcaagtaaagcattaaaagagattagttcaactttgtaaggcaatttaatctttcagctggccttcctttccaagtacagttttaatgcagtgtggctgggtacagagctcaatatctaaaagtagttgcagaattgttgcctgaagggcatgaaacaaagcattgtttgtccattataaaaacggcaaaatttaatactatttctgcttcccctttcattagttaaggaggttctagacttgcagattattagaaatagatgtttttgtttttgtagtcccagacctgatgcagtccctagataaagttggtagcagagccaggaaagatgaatatatgtatatattttttactctcatccacactgtttttctctgtccattacttggtagtgaaattgcccatttaagtttgtgaaggtgcaggcctgtgaaaacagggagacaaatgccaccatttaacatgggagcaaaaggaggaatacagattgctatattcatgcaatccatgctaaccaggtactaggccataggttgattgctttccctgcgactgagaacaggcttagaggatcttaaactttctagtaagtattatcactttccccattactgttatcactatcatcagtaccataaataccagttgctgtgttccacgacccatgccaagatcctttccacactctgtccacttaattttcttaacaccaccataggtaggcattattgtcacccctattccacagatgagaaaaatgaggcacagaatcattaaataactcgtctcaaatcaatcaaccaaataaaagttacggctgggtttaaacccaggctctcagaggccagatgctatagccttaaccactgaatcctttcgtgctgatgattaaagcagacaggcgctccccatgctgcttggattttgagggtctatgatttgatttaccttattatttcttgaacttatgtgagtatttaattatgggccttataaatcaagcacatgccaaatgagacaatgaggcaaaatgccctaggtgttatgacagccttttctctcccaatgccttgctttctataatgaacttgctcttaagaactgaagtgtgaaggaagttatatgtagaaaaacgtgtttttaaagaagcctacgaaacaacccctgtttcaatttgtaaatgattcccatcattttaaaacaaaacgttacttaacactctttaagtttgtatttacactaggatttttcttttaccttttgtctttggtgaatgtgcacttgtaagtctctgaaagagataattctgcaaagcactaatgtaaatggatagttctcaaccagaaacacacaaccctcatgggacacacatatgtaatacaggaattcattttgtaatgatagttttctccaaaacaaggaaactcaggcacatagtgaacatttaaaaatgtgtactgagctgaattgaacagggtggcacaaatagtgtttgcataatgctttctaagatacgtatacatctgtatttgaatttatgaaaagccctgtgttcactcttagaattttctgcattctcaaatttgtttccagtttcaccttgaattgacagactgctatattttttcagcttaggcttatatcagttttctgacaaagaaatgcttgtaacaatatattgcataatggatttagttttaacaatagtgaagagattgattcggttgcccagaaaactcagatgttctcatatgactattagccaccatcttttgtctagcttctcaaatatttgtggtcaatcttctatctgtgttgatgcaattctcaacttacactggaggtctaactcctggggctgtattcctagcaatattactgtttatcatgggacacctacaaacaggacctttactaagctttccctgctgtgataactttgcctccatcacctgccctgtacattttctttttatatgtgcaatcatatttagttgctgttaacctctgaaaacattatactaagacacattgttctctagggagttataagtattttactttgtcacaatactttgcggataccatctatatttttcaaggagattatataaccctagatgagccaatttactgaacaattcatctcccctgccctctcctataagagactaataccactgttgagctactatttttgcaggaaattgctactttttaagaaaaattactttattaactatggcaaacagttaatgaaaactcccatgtttaaagctattacagaaacttaaagcaaatacagtcctataattatcatttaatagactttctttctactagctcctaaaagtaattacatattgaagtaatccaaaaggagtaatcacattccatatcctattaatagcctactgagttaccaaatttctcggctgagactgctttccatagaaaacatgagataatggtttatatcatgctgagtaaaagcatcaagtctctttctccttgagtgtttacttccattatgccatgtaaataatcagtattgtgtttgcctaaactccggcataagcattcagcgtttttagaaatataagaggaaaagccatcttaatacacacaagctttttatttcattttatcttattccgttctgcagcccgagcttcaaagccgactcagcaggcagcaggaaaatagaacactggatgattcttcaacatttaagtccatcttgggctgttaatatcaggaatggtgctatttgggcagatgaagagcatgtctgcccaggttttgagatgcatttactttgaaaataccaggcatgtggcatctcttaaatcacaagaaatatgtaatggatgagaaaagtgcaaagaaaaaaaaaagactgagataatatctctcctctatgtagctcttaactggtttataaaaccttctcatgtcattgtttcacctaattcttcaaacagtcgcatagggcaggcaggtggtatatttttatccaattttcagataaagaaagaatatgagacatcagaagggtcagtgatttgcccaaggtcacacagcaataagtgcaaaaactaaatttaaatatttggagggccctgttggttgtacatggcacactgtaaaatgaatataaagctcgtgtctcttctagttaattcatttcaaaagtctttgtttatcctattgtcaataataacaatcctcagaagaggcaaattctgaaatttaatttatggattaatctagggttccagggaatgtgtgaacagaacaggacaaggttcttcaattttcactttaatcacagccataataattgtagtaaaatatatttgcaaagaagtttataatttgcttctattacaaaattaatgcctatttcttgaaggaaaattggaaaatacaaaccaacaaaaatggtattaaaacattaaaataacttgataataggctacccagaaatagtcactgctatttgtgtatcctttctttgcatacatttcttttcttaaaaaaaaaagaaaagcaactgtgaaatatatgtccactaattttcccacttaatagtatgtaatacaaatcaatatatgtatgtcaatattttcaagttgtctttctaccttcaactatgaggatatataatatcagttgactgtaagtacgtacattgttttccacaccttcgccaaatatctaattattcttttaggataaattcctatagtgttttggaaggctgaggcagatggattgcctgagctcaggagttcaagaccagcctgggcaatacggtgaaaccccttctctactaaaacacaaaaaaattagctgggcttggccggtgtgcacctgcagccccagctactcgggaggctgaggcaagagaattgcttgaacccgggaggtggaggttgcagtgagctgagatcacgccactgcactccagcctgggcaacagtctggagtgcaacaaacaaacaaacaaacaaaactcctagagtggaattactggatcaaaagctattgctacttaattaataaactgatcatcagaaatgttataccatttttaataccattggtaaaacaggtgaggttttattttctcacatccaggtcaattctagttagtattactctttttaatcattggcaatttggtaagttaaatgtaacattttaagttccagttactttcatcatttaaagccaggtgtttttaataattattaatcagttcttcttttgttcttataagttggctatttatgtcctttgcccacctcttaaattatatatttgtcagtttgcaattgatttgtaaagtctgttcatctattaatgctattcacctttgacctaccatacctactgcatagattttcctaatgttttaatgttcttttaattctgactctgctgtagtcttaagtagagatgttacactttttgtatcagtttttgtctatttactattatccttagcaagatgttcctcacccaaaattgatatcaacattaacttatcttttcttctttcttatatatctttttcccccacctgttgggcattttaaaaatattatttatgaaatatttagtcatgtctcactgctttgtaagggtatctttattgtcttctacattttttatgattagatttttttaactttctattcttcccattctgtctatttactggtatcatatttttctttaataattttatacatatatatgttgaaacctgacagatgctttctccgcattatttttattttattactattttacaaatcttgctttttttattctttctgatataatttagaattatttttcaggtgccctacaagtacttttgtgaatcttattgagcttatcttaaatttatggatcaatttaagaagaactaaaattttaaaaatacttttcctgtccaaaaccatggtctgactttccattgaatcaattctccttttattaccctcaggaagtcattgtagttttcttcatttttgtatcatgcatttcttattaagtttatggttagctactttacattttggaagatattataaagtaatttttaaataatattttctatcatttttctggcttttgaggtttcaactcagtattttatgtgattctattttctgtcctttttaagcataccactgccactgtacttctttttttttctttttactttttaatgggttgacctagagtttgagctatacatttacaattaatccaagtctgctatcaaataacactataccacttcacaggtagtacaagtaccttataataagaaattaatcctaatttctccctcttgttccttatatcattgctgtcacttatttcacttataaataagcttgtgtgtgtgtgtgtgtgtgtgtgtgtgtgtgtgtgtgtgtgtgtgtttcatgcaccgcataacaatgtcttggacagcagcagaccacatataaaaagatgatccagtaagattataatggacctgaaaaatgcctatcacctaggatttaccataactacacttttaaacattattttagagtgtactcattctatttatcaaaaataaagttcactttaaaacagcttcaggtaggtcctttgggaggtattccagaagaaggcattgttaccatagaagacaacagctccatgtgtgttactacccctgaaaaaccctacagtgagacaagatgtggaggtggaagactgtgatactgataatcctgatcctgtgtaggcacaggctaatgtgtgggtttacatcttagtttttagcaaaaaggttttttttcgagatggagtcttgctctgttgcccaggctggagtgcagtggtgcaatctcggctcactgtagcctccacctcgcgtattttagcaattctcctgcctcagactcccaggtagctgggattacaggcgcccgccagcacacccggctaatttttttttttttttttttttttttttggtatttttagtagagatggggtttcaccatgttggccaggctggtctggaactcctgacctcaggtaatccacctgcctcagcctcccaaagtgctaggatttcagacgtgagccaccatgcctggccaacaaaaatatttaaaaggttaaaaaataataataataaaaattaaggttgatttatgcctaacgtaaatgatgagttaatgggtgcagcacaccaacatgacacatgtatacatatgtaacaaacctgcacgttgtgcacatgtaccctagaacttaaagtataataaaaaaataaatttttataagtttagtgtagcctaaatgtacagtgtttataaagtctacagggctgggcgcagtggctcaagcctgtaatcccagcactctgggaggccgaggcgggtggatcacgaggtcaggaaatcgagaccatcctggctaacatgatgaaaccccgtctctactaaaaatacaaaaaattatccgggtgtggtggcgggtgcctgtagtcccagctactcgggaggctgaggcaggagaatgacgtgaacccgggaggcggagcttgcagtgagccgagatggggccactgcactccagcctgggtgacagagcaagactccgtctcaaaataataaataaataaataaataaataaataagtctacagtagtgtaaggtaacgtcctaggccttcacattcactcactcagtgactcacccacttcctgtcctgaacactccattcatgctaagtaccctatacaggcataacattttttatcttttatgccatatttttactgtactttttctatgtttcaacacacaaatatttgctcctgtgttataattgcctacagtattcaacagagtaacatactgtataggattgtagcctaggagcaataggctgtgccatatagggtagatgtaataagctaaaccatctgtgtttgtttaaatacactacgtttacaggaggaaatctcctaacaatgcatttctcaggatgcttccctgtcactaagcaactcatgacggtatatatgaataaccatacctaatcaaatacattgttgcaattattactgtgaacaaattattgtgttaggtcaattaaaatataagaaaaataaaagtgtctgtttcttcatcacttattccttcttccacgctcttcttttctctctgtatatccagatttctgacccatgttcttccctctaaagaacttattctaacatttcttacaaggcaggcctactggcaacaatttttttttccatttttgctagtctgaaaaactatttctccttcacttttaaaggataattctggtagttagagaattctaggttggtatgtttttttctctcaatactttaattatttcactttattctctttttgctggcatgatttctgagaaggtggatgtaattcttatctttattcctctacgggtaaggtgggtttttttctcctgacctctttcagcatttttaaaaaatctttgatttttctgtagtttgaatatgatatgactaggtgtagggacttcctttttggcattgatacagcttgatgttctctgagctttctgcatctgtggtttggtatctgacattaatttggagaaattctgtcataactgtttcaaatagttcttctgtttctttctctcttctgtttctggtattatcatcacatatatattacaccttttatagtttcacagttcttggatattctggggtattattttttcagtcttttgtctctttgctttatagttttagaggtttttgctgatctattctcaagctcagagattctttcctcagctgtgtccagtctactaaggagccctttgaaggcattctctatttctgttgatgttttttatctctagtgtttcttttggttctttcttagaatttccatctctctgcttacattgcccatctgttcttgaatgttgtccactttatccattaaagaccttagcatattaatcacagttgttctaaatttccagctggataattccaacatctctgtcatatgcgtgcctggttttgatattttctctgtctcttcaaattgtaggattttttgttctgcctttagtatgccttgtaatttttttcttcataacggaaatggtgttgtgggtaacaggaactgctataaataagcctttaacaatgtggatagtaagttaaagaagggctagcattccatagtcctatgactgggcctcagtttttagtaagcttgtgcctctgaactgtaaacttcacaagtgctccttagttgtttttttctccctcctttgctgggacaggatacctgggatggcctagagttggaagtttcttttccccaggtcagttagtctctgataaaatcccagaagattaggcttcctttaaaagttttttctaagatcaggccttgttaagaacagaatgctctggcgtatttcaaaatggttcctttttccctcctcctactgatagcatgagggaatttttctctaatattcactgtgagaaccaggtagagttcctggaggtaaaaatcacacaagtgtgtatgtgcatgtgtgtggtagggggtcacgggagaggtcctgtgactgggttcccctagagattttaacttctccacactgggcctccatcaatttgtcaattacagttcaggtttttctaccccagcactggttcctgaggaagtttttgcttgttggttcctaatctagtaagttcgattctctgtatctacttgtctgtctccaatctggggacggctctttgccctgtaaactcaattctcttatgaatctaggaaaagttgttaatattctagtttgtttgtttttttatttggatggagaggtgacttccaagcttcttatgtatcagactggactgaatctgttctaattttattttcttagtcactatttttagtataagttataactgttttaatttatttactattgggcattgcaaagtgatataacttacctgattttcctgggttttctagagcaataactacataaaaattaatggcaatttgtttcaccttttaaaatacttgtttttcatctaattgcatagatttacacttttcaaatatgtgctatatcataacaacagtaatggccattcttggtttacttattactttaatagggaaattagttcttgagtttcatcattaaacatcatactgggtattagattaaaattaagatttgtgttttggggggtgtgtgtgtgagagagacagaacttcctttacattgttgtgttactaaaaaataaatgtttaattttattacaattttttgattctaacaagaagataatatagttttgtctgctggcctagtgacctggtaattataaatacaatattctaatattaacttcataattttaattttcaaccctcttattccaaacaacaatcatttgataaggtacagaggaaaaggcaaggcctagagattaaaggcttggctttgctcttcatctctaaagggagaacaattttaatattaatatctgaatatttgatatataatcctaataataatttataaaacagttgtaaattattacactatatgaattgagctgccaatttgagagataaaggcactgacatactaaaaactggtatcaaaattggaatgcatcccgggatctcagaaccccagggctacaagctttacaatgggccatctcaattagaattgaaggtttatcagatcatggggttacatggctatcagaaggtttttctgtcacttgagcagccaaggaaaattttaggagttttcaatgagtttctattataacgacaacaaaaatactcgagattttcaagtaaatcaattttaagagtagccttttgtaaaccatgaagcctcttccctgtttgatttggccttctccgtccttgatgcttcttctctagttagtgtcagtgtggctttcatcaaattctagatatttcttagattccctatgatagcctcttctttccatccttctgtaatcatgaaaagatgaaaaaatgagtgccaggaagcgtcctaaaagaaggctttcacagtgaatataaatctgatgtcagggaatccccaaaagcacatccagcaaaattagttatattgtgaaagcacaactaattttgatagttatcatgaatagagttacccacagagaagctgtaactacatggtgacctacaaacaggtctgtctgactccatccttgcccccacttcactcagccctcaataaacaaactggacaatgcctctctctctctcttttttaaattctttcctgcctctccatttcctatgtatttaactgaaactccatagcttagtgagcaagacattccatgctttactccttgtacactttacctctaccatgtcctttctcttgctaccttaaatcttaagattcagaaacttgaaaccatgtcaagtttctgaaatatgccatgctctcacatgtccatgtgcagggaatttactccccctgtctatccctcctcctttaagtctcactgtacataaagacatctcccaggtgacatctggcctaacatctcagaacatttgggctgccttgtcctagtgctccaggaatactgccctaacctcaatttttcttatcactctgaattctaaccgtataacacatttccttgtctcccactagaatctgagctctgtgaggccagtatcccaacacttaagaaaagtgggttgactaaatgcataaattaaaagtgaaggagtggttgagaaaacacttcataacatataatcttcttcaaaaattttaagaattagttattattatggaaagaatgaatctgtcatgaaataagctccaggatgaaaaagagaacaaatcatttgatgccagaatattctaaagaagtcagtaccccatcacccagcccttgcattctttcatccattcagtcatttacttttccacaaaattatattggagacctagggttagggggaagaatgagatgaccctctaatgtattagttttgcaaatgtaatatccaagttgtgccatgtggcagatcaatgagcactgaaacattcagagttgagtttgcactgcttaaacaaaaataaaaataagaaagcaggcaagcaaagacataaataaacaacaaaatgtttgcgtggaaagcaatgttggtttagtaaggatagccaagacagattcactcagattaaatcaattggcaaataaatgcctttctttctgttttccccccgaactaaggacattttttatgagcagcacaaactagcatgcaaatatgcttctgatttttcactttcataatttaaagatagccaaacagatttctgtaggatgtatttttcgcccttaattgctccaatatggaagatgctctgttgggagatcaaaatggcagatgtcttttaatgccctgccattttcacttgtgtaaataatcatgtttcttttctgcctaaaattcattgctgcagtttgtctcacacagaacagagtttatctttgaacccgctctctcctcaatccaacaacaacaaaaaaataaatagatcttcttggtagatcagacatcactctttcaaggttgcacgtggtcactgacttaactagttagcttaaagaccctaaatgtcaatatccccctgaatctcttggtagttttctttgtcttaaactaagaagtacgtgggcagtatgttcttttctctccatttaccctaccaacaaggagaaaattactatcaaacataagtgaaagcagagttgattttaagaaatgtgattaaatgtgacaatgaaaagtctcttaatgctaacaaactgcatacttcgatatctcatacacacatgcttgaatttcacatgcacacaggcaagtatttctatcatgttactctttattgtacttcttgttttgcagattcctcagtacaaaaggcaataattggaagaacagtggtgtgtagctccctaattcagttaggagacattatagccatcagagtcttggtaaattattttcattagtacgttaaggctcatcatttatagaatttgcatcattgtagcatatcttttattccaaaatattgggaaagtaataggtttcttcttgcctccttcacattggtttgtttgtgaagggtgtatgtttgcgtgtgtatgtctgtgtctggaaatgctatgggaacagctgttgaatgagtacccctgattgtttgtgggtctctttgccacaaaaaatcttaggtttctaagaactgttcttttatctagaaactgagtctagaaactgagtttttcttttttttgtctaattataggctatgatggaattcaactaattaaccaacctattgtggatattaaaataaactagtttaattagaatgcaataatgtcagtgttccagggtcagttatgtgcttataaaattcaatgaaacctagaggacttcaaattctagttctgttattttccatgtgcttgtgagaaattgcttccctcttagtttctcagttttgtttcttataagatatgggatattataatctttgcacagtttgaaaaattgtctgggataatgtatgtaaaagtaacaaacaacagcgtttgcccatattagcagttcaatcaatgttgcttagttaaatttgcttcaatttaaataataataacagaataataagatagcaagatgaagatatttagcaaaagcaaaatctgcaatataaatataagcaacattagaaggagttggagaatatggaaactagaaatggaccatgagataatgaatcagtaaactctgactgtgtggaaaagtcagactgatatgagattcattggaaagcacagcattcagccatttattctgtcaacacacacaacagtgctaaatgcctaaatgcacaaagacgactgaaaagctaaataagacaaggccccttccctcaaggaggttattgtctggtgaagaggtcagacattcagtcacgatgggctgtgaaatgtacaaactatgcagtaatgtgtacaggtaggtagagagctcacagggtattcagaaaggcaagaaaatagaggtgtacacacagactagtaagttcatcattgatcagtagtaacatcaggagtgtattgtcacaaacttctaaaaatgttctatgaaatttccattatttcagtcccttggattgaagatggtaaacattgactgacatcaaaacttaaaattaatttttcaaaattcacaaatgtaaatgagtgtaaagaaatcgaaataactaaatgctcaaatgatgccttttgtagttgtgtgtcatctatacttctgaaattattgaagcttataactctactaagaaattttagtcacacactatatataaattttatgtatgtgcttatttatgcgtatatatatgtatatatatatatatggatgggtgtgtgtgtgtgtgtgtgtgtgtgtgtgtgtgcacgggcatgtgtgggcacagaaatattttttccattatcttggcagagctattgccacatttctaaggaaagcagtgtaggccagagcaaagtaatcaaataatgtttattctgctagtgactgaatacctgtcttcaagtgtgtgggagcttttcatgtggtagatagatctacttcctctctgaggtttgggaagaaacgtagagtaggcagatttgggtcagcagtgaacaaaatacctccctgggagcaagtcttggcctacattctcggttttccaacagtctgcagagaggatcctcagactgaagtgccctgtggcctttttcataagatagaatgtctctgatcaggtcaagctgtgaggattgtttagcttcagagaagagatggacagaggaaaaggattggtaaggaagagcatctgcagagccttagggaagctgctgagtgactgatgccgttgccctgggataagcctctctcctgacaccatgatgagggcagagggtcctggtcctttgctttggtgcttcctgttttcaagttttcaatatgcaggagctggtccatatattgcccactttgatctgcttttaattttttccttttttatttttatttttttggctaatgcagggttgtcaccaagtgcagtctatctatcaaggtcttctttctctctccatcttaatgttccccttgattgccagtctcatatatttcctcattgggctacatcatcatctaacccctatattggtattccccaactggtaccatggagatcatcattattaggaacttttatattgtattagtataatgaaaaagtgtacaagtaaaagcagcatgcaattaggagtccaggttggactaaaacttagaagcctgaatttgtttttccattaatagaaacactacactttgtgcatgacatattctggtaattaatggccctatttgcaagttttggcctaagtgggggaaaacatgcaactggttacatatctgtggccaaggatgagaacactggtgtcaagatcaaaaaccaagatgcttgaaaaacattttcttgtcatgggaaatatattgtccaggactgaagaatatgaaatattttcttacctttgaatgaagagtccttctgcataggcaattacattcagagctacaatgacatttccaagaattcactttcctcctttgccaatgagtttctcttcctcattagtctactgctcaaagagaagaacttccagaaaagaattaatatttactgagcatcgccaacaggctggcaactgtgctaagtagctttatgaatggaatcaaatttaacctaaaattattagtttcacagatgacaatatggaaaatcaagacacctagataatatgtttaaagtcaggcaattaatatgtacaagattcaagattcaaacccaggtctgtttgaccccaaagattgagttttttgcttcttagaatctttatataagaaaaagatctaggaagtctctatggaaattttaaaattgatggaatatttgtcttttctgtttcatcttagtaacctggagccaatctgacactttcctggaaatatgtcctcactgaacctctttttttcttgggttatccataaaccttggtaatgcatatgtccaatgcaaggggacccactcaaagatggattgaaagctaatatgtagtcaaatatagggtgaaaaattggtgtctagtaaaggggtttcgttattgtttttagtttgtttatatttctatttgtgtgtccagatttgtttttcatgaagttcctgaccatagtagctattttttttccttctttttagagacagggtctcattctgtcagccatggtgtagtgcagtggtactattatagctcactgtagccttgaactcctgggctcaagcaatcctctggtgtcagtctcctaaggagatgggactatagttgctggtcaccccacctggataattgtttaactttttatttttttagagacaaggtctcgctatgttgcccaggctggtctagaactcctggctttaaacaattctcccacctcagcctcccaaagtgtcgagattacaggtgtgaaccaccataccaacccctagtggattttttttttctttttgattcagagtctcattctgtctcccaggttggagtgcagtggcacaatctcggctcactgcaacttccacctcccaggttcttttgtctcagcctcctgaataactggaattataggcatgcgccaccacacccagctaatttgttttgtttctttttgttgttgttgtttttatttttgtttttttgagacagagtcttgctctgtcacccaggctggagtacagtagcgtgatctcggctcactgcaagctctgcctcccgggttcatgccattctcctgcctcagcctcccgagtagctgggattacaggcacccaccaccaagcccagctaattttttgtatttttagtagagacggtgtttcaccgcattagccagtatggtcttgatctcctgacctcgtgatccgcctgcctcggcctcccaaagtgctgggattacaggcgtaagccactgtgcctggccttttttttttttttttattttttagtagagagagggttttactattttggccaggctggtcttgaactcctggcctcaagtcatctgcccacctggttctcccaagtgctgggattacaggcatgagccaccatgccaggccatagtgacttatttttgatcagtgatcagagtggatcacaagaaggacaggccgtgatactgaaatgccactcagaaatgccacttctgagagaaggctcgcactcccattggtcctggaacaacctggatctaaagggcgaatattttattgactcaagcaacacagaccacctaaatgccaaaccaggctgctagacacgtctcctacccactgtgttcacctttaccagctcaccagccctggaggatctcagtaatgtgtgttaagttttctggtagaaggatcccctgagccttctggaagcacagcacagaggataaacactgatttctatcatgttatttagttgcttaacaaccccatgaggcatgcttgctatcaatcagtctcctaattttaaagatgaacaaatggggctctagatgggaaaagttacccaattgaaagcagataattagtattcacccaggaagaaagccttagtccatttctttcccacttcttgaactgcttaaaatctatatgtgaagcatgttttaatagcagaggtttgaaaagttcttgcgatcctactgatctatcactcagagattttaaatggtttggtcagctgggtgctttgatgagcttttacgtagtggtttctgtgtgtcggagaggactcacttgttcagaatatgaaacatcttgaattcatgtgccaatgtcatgcccagatccatgttttccattggtgtttgagtttcaattaccttcctccataacccaacctgctgtgatctggaagtgcaggtctgcctggatggcacattgaagaatagattttaaattatgacttccacaagtttataaaaataaaaatattctgttcccataccctccagccataacactatgggtaacagagtaggaccaaatgtgtaaaccaagcaagtcatctgctgggcatgtcacccatatcaaagagttttctttgacctagaaattcaattaaatttttaacattcatttttatccatgatgacatggacatttcagatcattaaaatggagtagatattgtaactttcaatttgtgagagtctaatttaactatgaaaacatatacaagaagagaaaatatattttgaattaatttattatagatatgtaatttttattgtaattgctaagtatggaacaatggtgtgtaaagcctagtcaggtgactgcattttcagttactattttacttgactagcttacttttatttttttcatcctatttcatagtatatgcaatgtttttataattttccccagtgataagagaaatgtatgccaatcatacaaaattcagaaaatacagaattgagggctggctgttctgtgttgttttggatgaaatgttggcagtgaaggacagagaattggtcatatcaggtctactagagccagaaagtacaaaacctcaccatctgcaatattcagaatttctgcccatccctaaataagactgaatctgccatatatatatatatgtgtgtgtatatacatacatatatatatatctatatatagatatagatatctaacggaaaataaattgtagtaggccttccatattcatgggttccacatttgtgaattcagccaaccaaacatcaaatatatttggggagaaaaacagaaaacaacaaaaaattgtaatacaacaatgcaaaataatacaaaatttgaaactacagtatcataactatttacatggctgttacatggtattgggtattataagtaatttagagatcatttaacacatatgggagaatgtgtgtaggttatatgcaaagactgtgccattgtatataaggactttgaacatccttggattttggtattcaggggagggtcctataaccaattcccggcagataccaagggaagattatacattttctttaacctaaaatatattaaataattttgaaattctgagattttttttccctactacaggagctaattcaaaatcctgtcaacctatttaaagcctaccagctattgggccatgatgctagtcataatattcatattgctataaactctgattcttaacccacaaacagaggcagaccataccagaagttcagtgtgagtgtgtgtgtgtatgtgtgtgtgtatgtgtgtatgcatgtatgtgtaatttgatggaacatattaaaaatttctactgttttataataccaatgctttcccactagaaaataaatcttagaaaattagttgaggctggtagagaaaacatgatgaggaaatattttgggggcagaggctacaaaagattgggaaatacagaaaagccaacatctggaattttggttaaatccttcccagaacacagttatgccatttgttcaacaaatatttattgaatgtctgctgtgtttctggccttggagagactgagatgaatcagacaaaaatcccctattctcaagaagttcacagtcccacagaggtcaaagtggttatgtcaacaaatcatgacagaagagtaggttatgtatttctatacaaatatacagtgtggtgggtcacacaagagatgatgggagaggtcttggatggtctccctgaagagatgacttttgaattatattttgaggcctgagaagtacaactgttatgataaaaggaacagttattttgagcaagacagtagtggataaaaagaccaggcacacagaagagtgtggcattcttgggggacagaactgaattcttgatgtcaggctgaactggtccatgtggaaaaagtaggaggtgagcctgggaagcaaggtgaaatctaggttagggaaataatatctgatcctccaccatgctggcagaggtgcgctgtgttttgttatgtgagcaacaaacttcaaatcattctaagcaggaggagtgacatgtttaattgggtggctgatggtgttggggttttaaagaaaccataaatctcctgcaagggttataaaatagttcctctctttaaagcatgtatatttacatgactaatgagtggattcatagtttgcataaggtttgaaggtggacttggaatttcttttttaaaaatatatacaaacaaaaattggctaaacccttgtcataaagtaggaagtctgcacataggaaaaaactttttctcacacacacttgaatatttaattattaatatttcgtgtgctaacatagagtagattgctgaagctaatagcccagcagaaaatggtgtgacaggcttgcctttaaagggaatttccttcagtggcaagcctgccgcaccattttcggtgagaaaacgtagggtgtgagcctggaaagcaaagtgaagtctaggttagggaaataatatctgatcgtccactatgcaggcagaagtgcgctgggtcatgtgagcaacaaacttcaaatcattctaagcaggaggaatgacatgtttaaccgggtggctgagggtgttgggggaaatcccttcactggcaagccggccacatcattttctgctttgctcttgcccattcttcaatggaaattccctaccaaatccaaagagcctgtttctgagatttattccaaaatgcagatagcttgtttcgtgatcatgccaaacggctgtggcttccgcagatacttagatgaaagaacaagtaagaacgattctggcggttaacctttatgataagagagtgccctcaaatctgccgagcagagagccgctgtgattccaatggtcttgactgggcgcacggcctgtctcccctctttctgcagataacacagcaggcgtgtacgcccggcgtggagggttcagtcggcagaagcaggacttgtaccttctgcccatagtgatcagcgatggcggcatcccgcccatgagtagcaccaacaccctcaccatcaaagtctgcgggtgcgacgtgaacggggcactgctctcctgcaacgcagaggcctacattctgaacgccggcctgagcacaggcgccctgatcgccatcctcgcctgcatcgtcattctcctgggtaagggcgcttcctggtcccctgcaggaagggccaggcaaccggatgcccctccttgaaacacatgcttctcaaatacaggctggtaaccaggaccctgttatgactgtcgacacagttcaagaaaagaagtggggtacgggggcggggtgggcgttgtgggggcgaggtgggggatgtctgcctcttgcatttgatggaatattgcagggagcagacaactgagttccagcagagaacagggaaggtcatgatgagcattttgccgggccatcacagggctgtatagcaggagccactagggggcttcagggacatcagagaaggtttggcataagaggaatttgggcagaaacatggtgtattagcaatggttttgtcccacaagagaaagaataaggcttagggacattaggcccataagaaggagcaaaacacagcataggaaggactcgggaactggaagaaggaagaagcaggactctaacccctccactaattatcatatataacatctgttctaacacctcagctcatgggtaccccttggaagcttttcctgcacctacccctgcttaggtgctcttcttctgcacttctgtcttacctgtggtttattctgtagaaaagccatgtgctggtactcagaacatatgccattgctgggcctcaggaagatcattttatcccaaagtctcagaactagtgactgaccaaatcaggattcaaacctatgcatgtctgacaccaaacctacacttttgccatgatgcttggtcctacctcgaatgaattcatggagctttactccataggaaaaagccagtgaattcaattcagcaaatagttactgggtattctctgggcaacgggccctatgttaggtcctgggggataaagagaagaagtctatgagatctctgtgctcgacaggttcacagaatgtcaaggaaagtatgcatgaagaggcacacggtgggtgctgtaatagggacatgaacacaagatggttggaggacagagtagaaagcacctgacatgggccaggcgcagtagctcacgcctgtaatcccagcactttgggaggcggaggcaggctgatcacctgaagttgggagttcaagaccagcctgaacaacatggagaaaccccgtctctactaaaaatacaaaattattcaggtgtgttggtgcatgcctgtaatcccagctacttgggaggctgaggcaggagaatcgcttgaacccaggaggcaaaggttgcggtgagccaagatggcgccgttgcacttcagcctgggcaacaagagcaaaactctgtctcaaaaaaaaaaaaaaaaaagaaaaaaaaaaggcacctaacattgcctgggaaggtcaaagaaatcttcctggaggatgtgacatacaggttggctgctgagagttgtccagctgaggacagaggcttggataaatgaatatttcaaacagaggaagtaaaatacaaaagccctaaaaagttaatagaagtggaaacagatgtgtaaaccatgtgataaatattataataaggataagaacggggccaggctggtgcatgaaaaaggtgccagtagtcctgtctggtgtcaggatggcaggccaggaagtgtatccatgatgaaagaaaaaaagagtccgctaagcagagaaagtgaaaaggagtggtctgtgtgagtgaaagtgcccacaagaaaaaagcacagagctttgggagccacacgaagtccagggcaagtacaatctctcattccttcttctcagagcagtagtggagccagaggggcgctcagctggagtgcaagattcagccacaaacattttcttcagccttgctgggtgtatgggagagccttctaatggaatattgtagaagcctcttggggaaaagagggaatcaatgaagaattaaactgtgcctgaactttccttataaatgactctgatcacccctcctaggttgcccaagcttaatggaacccccctctcccagggaagacatgagattgctttatctgggcttccagctgatgctattttcctatgttaaagtaaacagaagattttgtcttctgggggtctttataaaacttcctttcctctatgtggtggctacagagagtccaaccacacttacggtaagacttcccattaagttagtataggaccaatactctttctcagacattggcagaagctagccatcaccccctataagatggtaggccctaagggctctgcatgtcctcatttttaaaccttggaaaaacagctaccttcctttgcaaagagaaattggcattagccacttctaagagactacagaccaacatatttagaatcttcctagttcttaggaagatgactcctaaatggtgtctggattcatttgttaaaagttcaaaattgtcccaacctgccaagttgttgggtgtaatgttttcatggcagcatttgtagaggaagagccaggcaggggtcaattttacacatccttagggattccaggcaaagctctcatttcctatactgtttcctgttctgagcatttatacctcatggtttatggtaatcagagttcctctggcagaagaacccaggaatactggacttaacgaatgcttaccttctttttctttccctccagtcattgtagtattgtttgtgaccctgagaaggcaaaagaaagaaccactcattgtctttgaggaagaagatgtccgtgagaacatcattacttatgatgatgaagggggtggggaagaagacacagaagcctttgatattgccaccctccagaatcctgatggtatcaatggatttatcccccgcaaagacatcaaacctgagtatcagtacatgcctagacctgggctccggccagcgcccaacagcgtggatgtcgatgacttcatcaacacgagaatacaggaggcagacaatgaccccacggctcctccttatgactccattcaaatctacggttatgaaggcaggggctcagtggccgggtccctgagctccctagagtcggccaccacagattcagacttggactatgattatctacagaactggggacctcgttttaagaaactagcagatttgtatggttccaaagacacttttgatgacgattcttaacaataacgatacaaatttggccttaagaactgtgtctggcgttctcaagaatctagaagatgtgtaaacaggtatttttttaaatcaaggaaaggctcatttaaaacaggcaaagttttacagagaggatacatttaataaaactgcgaggacatcaaagtggtaaatactgtgaaataccttttctcacaaaaaggcaaatattgaagttgtttatcaacttcgctagaaaaaaaaaacacttggcatacaaaatatttaagtgaaggagaagtctaacgctgaactgacaatgaagggaaattgtttatgtgttatgaacatccaagtctttcttcttttttaagttgtcaaagaagcttccacaaaattagaaaggacaacagttctgagctgtaatttcgccttaaactctggacactctatatgtagtgcatttttaaacttgaaatatataatattcagccagcttaaacccatacaatgtatgtacaatacaatgtacaattatgtctcttgagcatcaatcttgttactgctgattcttgtaaatctttttgcttctactttcatcttaaactaatacgtgccagatataactgtcttgtttcagtgagagacgccctatttctatgtcatttttaatgtatctatttgtacaattttaaagttcttattttagtatacgtataaatatcagtattctgacatgtaagaaaatgttacggcatcacacttatattttatgaacattgtactgttgctttaatatgagcttcaatataagaagcaatctttgaaataaaaaaagatttttttttaattctgggtttgattcttaacattgaaacaaacgttaagtatttctaatgatccatttatatttctaatttaattgtgatcttttaataaccctatttatgatctgttgttgtctgtctgctgcttttattgtttatttaaaatcaaatatgttttacaaatgttttttcagacaagattctgtaacatcatgtaaagcttttttgtacattcttggtgttaacctcctggcttctcttcacacacatcttctaaaaaagaaggatgtgaaagaactaggtcagtctatgactttgcaatatgtgttatatagtatgcatttatcttgtatatcagtaatttgatggttatgagagatgaatccatgagggaatggagctatcagaactctaatgttccaggtatacattctatgccccacactgagcactggggaactgggggactagagtcaaaaatataaatttgcccagactctaatgttattctattttttcttctgttgaacttaccaggctattgtaagactcttgatagttgaaactgcttatttttcctcctgtaattttaactaattgtaaaatgatgtggcattttatgttttaatgagaatgggcgattcatttaaaaaagctttgtttagaatatgcttggggccgtaagctcagaatgagggcagggaccattttggattctgagagtcgatgccatttggtccaggagtgtgtctacagtcccctgcattccagctagtttcttggggattgaaacttatgtgaagggcatttcacctgttcagttgggccaaaggtcaaaacgtagcaatacttggggaaagaccacataaagtcacactgcaagtgctttccctctttccccctacacacagggcacgtgctttttcttggattgcagacaatttttacagtttttttctgactttattgtgaaagtttgtttcaagcatttcttgatatcatgttatgtactatttttatgatttagtcaacatgcatacaaagaaatgttttttatgaagtgctcacttccattttactttgcattgaaatcaaattgggctgaacacttcaatggaatacattttgtggacaatgtcactttagaatctttcatctcagtgaaggattacacattctcaatacttccataattgcaggttgtgttcatttttttatatagtttttgtaatccaaagaatattttgctagatttgcacagatctccaattgaatttgcaatgaagaaataactcaaaaggaatatgaatagcatttaaataagtatacagctgtaagtaaccctgtcaccatggatgatccttttctctaggaatgtatttggattagagatgacaactacattttcgcatttttatgttgaagtcttttttaaaaaggctgtttacttttcagtagttaagaatacttgtttttctttttcttttttttttttttttttaccttttattttttcgttaagcctctattgtttgtagaacactcttagaaacttggaaataaaatgtctttcccaactagtggagtcctttttcatttggagcacattgccttaaaagaagtcttaatttaaacggtccttccttattctaaagtaatcactgttttataccatctatgcagctaaaagaaggaacatgcttctgttcttttcctcaagtaatggttattgtttctagtcatcattcattcattgattcattcattaattcatcaaaatcttattttataaaccctgttccacttactggaggattcagaatgaatcttactaccttttctgacatcttttgataattcagccctgtaccaaagtatccaccttgttgtcttataatcacctatttacctatttgccctcctagaaaatgcaagaagatattttctctccttccaaattgaaggaagaacataaaagatataacaggaaggagatggtgagatatagagtgtgagcggaaattaggccagctgtggcaattctggacagatcttgggtttagctaagttatttcttttaggcctgggtttctgggggtgacagggaagataaaagagtagtttatttgcacctcttggagaattgcttaaaaatatagagatcatggctctgtatgtcaggtggaaccaggtcaggagtatttgaaactgctcctgggtcattgtgacatatccttcacatctttttgagaaactttataagacaatgggggtgaatgggggctgggcagttggagtctctgagcagaagaggggcaaaatttatttggcaggcagtgtggaggacagattaggagcatataaacccagaggtgtgccccaggagggcttttgcaaaggtcaatatgagatagaatgagggcctgaaataattcagtaatttggagatggagaagaggaaagacttctctgctcttgcactgccatcagcctggtctgggccatggtcatctctgacccggaagactgaccccacctcttggctcaccctctgcctcccaacctcctcttcacaaagaagccagagggatacttttaacacacaacccagatcacatgacttcgtaacttaaacctcttcactggcttcccaaagacttaaaatgaattctgatgcctttattttattgctttacatgaacagggccctgcgaacctctccagtgtcattccactccatcctcctttcagtgcacgatgctccagccacactggccatctttcggttcctgatacaaaaaaaaacacgttccttttccatggaaagcaggtcacccttgttattttgtatcgatgacaactctttaaacttattttgctttttggctttatgtatgtgtgtgggtgggtgggactgactgccccactagaatgtaagctccatgagggcagggaatcttgctttcttgtttaccattgtatactcagttctttacacagtgcctgaaacataacaggtacacaataaatatctattgaatgaaagcaaa

SEQ ID NO: 32 - DNA, 172407 bp, Homo sapiens
gagcccattagccgcacaaattcgcagcaggcggctggggcggcggctggggcagcggctgcagcagcggcggacgctctgcattacccagtcttgcgtcctcggcaggcgcccgaagctgagtgcgcatcctctaccgcacccaagcttcgtctgtctcgtcaagctcttcatgctgcccaactaaaaggaaaacatgggcacaggggattttatctgcatttccatgactggaggggcgccctgggggttcagattgcaaggtggcaaggagcagaagcagcccttacaagttgcaaaggtaggacctgaacgaagtgtcacggctctgtgctaggaaggaaggaatgaaagcaacctgctgatggtgttttcaggttctgatgcagaagtctaagtattatttgattttgctgcggatattaagatttttctaggaagtgagttattttctaagaaactttggagagtaatgggccacatcctatgtaattaacttgcaatcgatgaggggtgggtgggaagaatgccatatttatcagctgaggaaaaggcctagttaaccatgttcttctgacaacaagcaagacactggggagcgtttcttccaggcaattttagaatgttcagttgagttattgtttgatgtcacttcacttggctctggcagaggagaaacgctcagttcagcataacgactttgcttggctattttggggactcatatagagtgttggtagtgacatttattatgcagcattcatgaaaaggccaatgttgggcaataattttaaaagtatgatgaagtgtcataaaatctatttaaaagaatacccttttaaggatttgacaaataaatgcaaaaatccaataaatgctgtattccttcttatgtactcttttggtcaagatctcaaaaataaacttagaagataatctaaatatattatgagtaactaagaggtaactttgtaacacattaataactatttaaaatgctttaagtttttattgccattagattgcctgcattactggttagcccaaggggatctggtattctctaattggcattcagctaaaataaaacttaaaatgcacaaaactaagcaaacttttacctaaccttatcatcaaattgcaaattatagtattgtattgaagaacatgcaagagcatgggattaatttcctattttatgcttatattaaaaatgggtacagatctttatgaaatacatgggccattgcctttgtagttattgtttgtttccctctggcttttactcttttttttttgtagttattgtttccctctgccttttacgtttttttttttttagtgtcctttgcgaagaaagaagtttctttgaaactcctttttgcttccaggcatcatatgtaaatcctttcgtaatgtgatggtggaatcctgccacctagtgaaaattgcaaacatcaagaatgaaccataaaacagtagatgaaaagcagagtttttattactggaaagttcctccgaggtctgcagttcaacccatgaattttagatgaggaaagagcccagagatgttaagtaacttgccttaagttttcagcttggaactggcagagtgattaaaggctcagaaaggtggttttgttgggttcctttaggagtcaatagcaggcaacctcagataaaatatgaatgcccaatttagcatatgtagaattcatgacactgaagcagatttgtcctgagtctagaatagcagttggctggctctaggtatgagatttgggttctaattccagctctgatctaacttgcagcctggccttaggaaaatctctcacccttcctgtctcatcggtttctctctctctctctctctctctctctctctctctctgtgtgtgtgtgtgtgtgtgtgtagggagagagagacaaatattttaacttaggtggtaaagaagtaagaaagaaattggactgtgcagtctacgaagctctgtcttgcccaagtattctacgatcctgatagtgtacagttttagaatcgcttgcctactaattgaaatatggggacagagtggctgagtgctgttgttctctggtggctctttggcagccaggcctcaagaatagagtgggtagtgggtttcttctgagttctgcatgtgacgatttcaatgtgggacctctttgcggcgattcactgaagagctgaagcagattgctaggaaagggtgctgtggagattctctgctaatggcatctctattttcaggattcagtaaggttgttaggctatgtcagaatccagtcctacactccccctaaatcatccttcctaaaatacccagcaatacatttgtggttttcaaaagatcattattaaggcatctagatgtttgctttgcttttgtagtttgtgatactatacttagagctatagattttaaaatatcattataaaagtatctggaagtttgccttaatttttgtgtgtttgtgtgtgcaagagagagagagagacagactgtagtctacagtctaccttttgtccatacgttaaaaagactaaagagctatctatagaagatgtaagttctaaattactgtggcaatgcacaatttttgttggtctttttctttttttagttcaaatgattatgtttgatttcttatactagcattatttgtgggagaaatcccttggaacaaagcgcttatcactttctctgttatcaaggccattgcctcattaggatcactgtattttatttaaaatattaagtcaattcaattctattcatggtatctcaatgtgttcaaggcaaagtgaatgttgcttgggcataaactttctcttcttgtaaggactggtgatagcttattagggctggatgcaaggaaagagacagaaaggctagagagatggttgctgtcaaatcaaatgttcacagttttgaataacatgcacaaaattaatttgggagttgaaggaaaacttaaattttcaaagaaaagaaaatttcggcgagtgcttgaaccatgctccttaaaatgggaatgctacaaagcagttctgtagacaataacacattttggctttttgtgaaatatctacatatttaggtttttcataattctatatagagtaaaaatctaacaggcagaaatagtgcaaaaaaacagtctaatgttattaagaacaataaaaaattgaataactttataattcccgataaatatccttatattgacatatttagtcacttctgagatatgttcaaacatgtttagtatttggttagctggttgaactatacgcaaaccccaaattttaaagataaataacaggaatattcattatcaaaacttgtcattgacggttaagctcaatggcacgaaaatctgttttgttttaaaaaataaaccaaatttttaaaagcccaagtaatcagtaacataagcttgtttttaaaatgtttgtatatcttttaatttatattctaaatatatgtgatgggaggcaaacatttctaacactgagttatagcataacactctgcaaagtatattttcaagagattataaacagaaacaaatttatccaaacagaaaaccccactgtgtgtgcagatagctttacaaaaagaatgtgagcacttcttctttatgaaactctctcttttgggacatgtacttatctggccctgtctcaggacatacttttggcaaatcactttgaaaaatcctcatataaaggagtggggagaaatttttgttttacaaaaaatcttacctgcaattgaaaaattactcacattttgaaaataattaagaaaaaaatgttcagactgtttatcctttatatgttttaatatagttagaaatttattttttcttcaaatcttatgcaccactatagtatgtgttctactgaatttagttcaaagtttcaaataattgttcattaaaattgaggtgacattgtataatccttcatttcataaggccaaaatgaatttaataattcttatctattattggatatgtgttctttaagattttgaataaaaatgtattatttacacaaagcacatttcagataatataattcttatcccttagtgccatcagtaaggtttttaaaatgtttcaaatagaagaattccagaaacataggtatttctaaagggggaaaaagattttaatgtgtttgaatatgtatacttgagaataaatgctccttcctatatatgaaaactggtaatatctttattaaaatatgcttaatcacttaatctttaaattgattttaagccctttctaggaattttaaacacagacatgcttatagaagttagtgtgctctagataaatctattaagtaggcgatattaaaaaatccttattttggaattgtatattttaagggaggtttctgaaagatgacaatgagataaaatattcattatgcatgaactttgccattagctggacgtagcacatatgtagcttacatgtgtcaagcccttgctatgtgccaggaaaatttgcaagtgctttgctagtattatctcttcaaatgttcctcaaaacctaaacagtaggtatgaaaaaatcctcattttagagatgaggaaattgtggcacagaaaggctacattgcttgccaatggttaagctacaaaaaatgatgagatttgatttttcttcttccttattggtggaaacaggtgcccgagaggataaaagtaggttaaagtggtcccaaaaggaaagattatttaaaataaataccatagtttgtacccaaccttgatttcattattggtctggggttcaccctggacatcaggatttataaacattccaaagggaattctgatgtgtggtcaagattcacaaccactgctatagaaagttaaggccaaaaaattctgatgttctactgcacagcagggtactatagttgataataacgtattgtatatttcaaaatagctaaaaaaaaaaggagtttaaatgttctcgtcacaaagaaatgataaatatttgaggtgatggatatgctaattagcctgatttgatcattccacaatgtatacatgtatcactacatcacgttgtaccccataatacatgcaactattatttgtcaattaaaaataaaataaaacttaaaaaagaagatatatatatatatgaatatatattatatatattttgctggttcatgaaatcatcatcatcaatcatctaagattctttactgctctgatgttctataattgtcatgaaaattcaagaagaggttaaaaaaaaaagtgaggccagataggtccccatagggcttgacgggtggtggcacattatgtcccttccgcccttccccactgcctctctcctagtcaagttaagaggaagatcagagagaggctaaaaattatctgagtttttggcactgtgagcaggtcataatagtggtgggagggttttccctttctgaagccagaatggatgggctgcctgggtcagcgggagtggggaagaggaggtattgggaagctccaaaatgattactgtaaagatcaggggaactggcaagaggggagactagcagtttatttcctggtagcttgtcttctccatccgtggacttgctagcctgcctagtgccttcataagtgggagtgggtggacgtgttgggggaacgtcgggggaacgtcgggggaacatcaggggaacaaaactggagaaagatgcagggggaaggagagtaggagaaaagggaggaagaagagagagagagataatatgatttgctttaaaaacaattgcctttgtttaatactcagtaaaagttcagagttcttattctaagttgagaattctatattctgacagtaatattcaagaaacacttctctaggctaactgaaactatacatctacctaatagcaaaaagcatcccaggttactaaagtctgattcacattttaaaaaaaaaaaaagaagaaaaagaaagaggaagaatatacacttcttgttatgcccagtcaaattttcattcattttgcctagaaatattagtttcaacatgatcatcaatggaagtcacatgagttggtgataagttttcatgactaacatacataaagaacacgtgattgatatgaacctgtgtgatgtaaatgattttttttaaggagtgtcaactcattccattataaacatatatttcttccagtaactgctttcaacatgataaagatgaatccctttgttagtaacattttgggcagatctcatcttttctggtggcttttggttattaaaacagtcaactttaattaaagcttcagtcaactatctgactctaaactctttccctagtcactgtggccaggcttgtggctccagggtgtggcatggaaaggagggtacctgctctttacccatatccctctagcccctccatggttgagggaaggaggaaagatgtgaagaggaaaggggcagatagatatatttattcataactgaatgaggtggcgtttctctcttctttgggtgttgtgcttctttggttaatgtgaggacccattaatgtcctctctgaggctggtgtccaaattctggagcatgtgtatggtttcttccgggagagctagagggcctcattagtgcacagtcccctaacacaggaaatcaggcttctgataatctcttctgtaccccctacaagcccattggttcatcaagataccagctttctcctgctagactctggttgagtttggcctttctgggtagggccttggcaagatggttcaaatctagccaccttttaagatagtcactcatccacaggaaatgcaaggatccttgccttgccaaatggggacatcagtatgcagtgtcattgtgacatacacattatacctaactggatattttgcatatttttcatagcaatcttcttaatgtagcttccaaaataacttctctctgtcagttaattagtgtttaagaatataaacgaatttatatatttggctaaaaatacttcacatgtgtatatcttataatttccaaagtgtgtcttaatatatgttatctcttttaatattaattcggttgataaagttttataattctcagtttatagattaaaaaaactgatcctgaaaaataaattaattgcaaaagcattatataaagaagcccaaagttaaatataattctttccctctgttaggggcatcaagctactcccctgcgtcagcctggataaaaagaacaggctgtcacttagtattgttgaaaattgcaatgactttaatacagagtttgtatgaaatagaatctcactaaatctaaccttaatccttgaaaacattgataacaaactattcttttttttaatgggcctaaggaaaatgattacaggaacacatctgtaagataatgtgcaatgggagaaagactgaaaatggaaccagtctgcttatcaataaacctgaagaatatatggactccaagtttattgtgtcttttctaacagattcgtgatgaaactgaatgcagtgaggttcttataaaagcaaatggagaatttctgaaacagattcattaaagaattctgaagagtaaacaccttcatgaagttaaaagactcatctcagaaagaaaataatgtctgctcttttgagggatatttcattatttgacaacctcaatgagaacatgtttatggttttggattactttaggcacctagtgtttctaaatcgtctatcattcttttctgtttttcaaaagcagagatggccagagtctcaacaaactgtatcttcaagtctttgtgaaattctttgcatgtggcagattattggatgtagtttcctttaactagcatataaatctggtgtgtttcagataaatgaacagcaaattgtggtggaattaccatttggaacattgtgaatgaaaaattgtgtctctagattatgtaacaaataactatttcctaaccattgatctttggatttttataatcctactcacaaatgactagcttctcctcttgtattttgaagcagtgtgggtgctggattgataaaaaaaaaaaatgaaggatgacctttcctgaacagaattatggatttatgtctgtattagttcattttcacactgctacaaagaactgtttgagactgggtaatttataaaggaaagaggtttaattgactcacagtttcacatggctggggaggcctcaggaaacttagaatcatgggagaaagtgaaggggaagcaaggcacatcctacatggcatcaggagagagaaagagtgagtcggggactgccaaacactttcaaaccatcagatcttgtgagagctcactcactatcatgagaacagcatgggggaaaccacccccatgatccaatcccctcccaccagttccctccctcaacatgtgaggattgcaatttgagatgagatttcagtggggacacagagcaaaccatatcaatattttatgtgattctacctatagatactcccccttccttcacccctcttccttcatcctgtttaacagaatttaccttcttgaatttcaccttttcaggacatgttatttttatcctaggaaatctgtaatcatgaccaatgagtgtcatttaaccccaaatatcttgtcgcctttaatagtatcttctggagaaaattttatttaagaaactcatatatgatgtttactaggtgccaggcacttcttgaatcaccttttaaatataatgacagaactctgaggttacccttagttaagatccccattacaggggcacaaagaggttaagtgacttctccaggtcacatgggtatgtatgatcagagctggggttcacatctaaagagcctggaaccagggcttgtgttctaagctcctagacatgtcacttttgggtctagtgtagtttgaacagccagttaggacgggaagacagcatctcaacaagagcatgctggagagatttttgtgaccccttaaaccaaacctgcttttcttgttctgacattaagtataatctcaattacttaatgtcaaatcattttatttgaaacttttatttccagaacgaataatttaggaaataaaatagaagtaggctagaaacatttataattctgctttctgaaggatgataattttctattttcttagcaagattttccatgtcttcttgaaaactatggcatgataccttgtttttgaagcaaaaaccttcaagcagctgaccatttttgagaattttgtcatgcagttcaagacatatcagaggtgaaattattaagaggttataaatccaatgtgttttgctggcagtctagatactgattttctacctcctcagtagcccctattccatttcctgctctgtgttcctgctcccaccacctcggctcaggtccttatttttgtctcttagataattatattggccctgtaactggtctccttgtttctggtttcacattccttgagttcatgctacagagagctgccagagagatttttctaaatcacctgttatatcactgcttaaaatacttcaaaggctccccatcactgtcatcgagataaccataacattggttttatcttatgtgcagacatgggttaagcactttaggaattattttgttactaatattcctacaatcattttttttaacagtggaggaaactgaggcttagagaagttaagtaaaaaattgaagatcatatagttagtaaatggcaaaaccaggacagaagccagtttgatgacaaagcccatgcccttagctgccaccctgcagtgaggcttgttcacaggccgacggccccgctgtggcacatgaagctctctgtgatctggatgctgacaaactgtccagccccatcacctgtcaccctcccagaagtgcatttagctatttgaaaataccacagttctctcaaacactgttcctccctggttgcttcatccctgctgtgtccttggctggaatgcttgtccaccccatctcctggcaccttccctaaaatgcttggagaaattgtacttaccctggaaatctctgttaaagtcagttctctgagaggtttgactcaattgtctagtcggaggggagcacttgctcttccatgttgctgtgatcacacacagctttcaccttgagctcccacgtgcagcctgacgctgaagcttttgttcacaagtctgtttcctccattagaccagtgatagccaaaaggtttgactgtgcctcttaaattaaaacaattttgagcatatcccatatacagggtgtatgtacatatatataaaatatagtatatatgtacatgtactgatgggctaatattttatgtacagtataaaacatcccaaaaagaaaactttaaagcatgagataaaaggtgaaataaacaatattttaaaactatttgtattttattttcttgacaatacaaaatgtctttttattctcactgaccagaactttttttttaagtgagaacaatgtgattgacagactttttcagattttgaaaatcttgatgtgaccccatggggtacaatgattcaaaggtctagtgaaactttatttcagttcttgagtttaaagactgtcaaagctgaaatgataatctcttaatatatgcaggtgcacactgaagaaatgaatcattacctgataatcatttttcattttcgtcaataaataatgcaactatttttgttgcaatttgaccagtagattttcattttctctgatgtctaccctttgttcttacaaactaattggaataggctacatttgtatattttagtattaaaccctggctgtacttttttgttttgttttgttttgtttttgagacgcagcctcgctcttgtcacccaacctggagcgcaatggtgccatcttggcccactgcaacctctgcctcccaggttcaagcgattctcctgcctcagcctcctgagtagctgggattacaggcacctgccaccatccccagctaatttttgtagttttagtagagatgaggtttcaccatgttggccaggctggcctggaactcctgactttaggggatccacccacctcagcctcccaaagtgctgggattacaggcgtgagccaccgcacccggcctgctgtactttttatttgaaaaatatgaaattgggttagaaattcttcttcctagttaaatgtgctattatgatgttttaaagaataataaatttaaataatttccagccccaaatcacttgactatagaaatattttcaagaattttctttcatttctttttgaaaatttgctttcaaagcaattcatgttagggaatatatcatgcttagtatcctaaaatatatgtcaggtgaccagcaactaaaagccactcgtcatcacagaaaacgtcaacaaatttggaacatccatttatctgttaaataaaactgaaatatccttaggttccacaagtattttaaggatttgcaagagataccattggaacctcagtggtacaaatgtctgtatgatataaaaacttttcctagtcactccctatatcattgctacattttaaagattccagtatggtttaaatgtgagtttctataaaattaatcatgacctcctgtagcatttttgcacttctattattttgctgcatgaacttgcctacaagtaatgcactgaatgaatttgatttaaggcacctttgtaatcttaccctagaatctctttctctctctctctctctctctctctctctctctctctctctatatatatatatatatatatatatatatgtctgtctgtctatctatctatctatctatctatctatctatctatctatctatagatatttgtcagttcctgctaaagccaagtactttatcaatgattatcaatgtacacagtttttctacaaaatattcattttcttgaattaaagacttcatatacttttgagaacttatctccagtatctttctttcttggattcccagagaagtaattttttatttcagtattgaaatataatttgaaaatgccataagccgagatattccagcaacatatatttttttatccaaccatacaggaaacttcctccaatatgtagtttgttttagtattatttatactaattttctgatatatttttctttgcatcttcaacagtacttgcaaaaaaatacattttggtttgttgccatattgtattattttagccacttttaatttgtacccatgatgatctttctaaacattatgcttggcttaaattctgttaagttttaaattgagtattgcctgacttcaacccttgttgaaaaaacaaatccagaagtttctgctgctcagatgttagtttttaaatagcttcctaatcccaattgcttcacagtaacactaactaaactcacatcataagacacaataaggcaaagttcctctgtcacatattccaaataacccatattccaaattatcttcttgacaattttgagtattttctctacctgtcacataggattaagcagtaatggtattaatctcacaatatgatgaaaagtatccataggagcacaggcgaagagtcagctctgctgtattcttgtttttctgttgtgcttgaaatgtgttatctttaattattaacttcctttcagacgtattttaataggaatcattttgtgagagtcaatttccttgaaactagataattatatggaaattcacttaatcaggcatagtaaaacataatatattgcaaaatactgaaagagaatgaattgacgagaaaccctccaccctgctgggaggtgggtcccctttttggtgaggtcaccaaagcactgtgggaagtacataactgtctgtctggcccacagaccagactggaccaggataccactgtaaatccacatagtaaagtagattcaatgttagttagtgctcatttccttttcattttgtagatgaaaataaatgtagataagaatccagtgggcttgttagatagttgggggaagagccttccaggcacagggttctaaaggtacaggagccctgagacagaagtgtgcttggtatggtcaacaaaagtaaatgtgccaatgtagctggcacatatttccatgacaaattattatgagaagtccaggctttcacagtgataaaaatgaaaaactctctctcctgggaactctggccatgtggttattttcccatcattaaatgattaatgcacaggtcctttaagaacaactttgcaatgtggtcttcaaatttcctcttcatccatttcggcttctcatgatgtagcagcctactgaccagtctctagagcacctgtattcgtccattttcacactgccgataaagacatacctgagactaagtaatttataaagaaaaagaggtttaatgaactcacagttccacgtggctggaaaggcctcacaatcatggtggaaggaaaatggcagcagacaagagagaatgagagccaagcaaaaggggtttccccttataaaaccatcagatctggtgagacttacttattcactaccaggagaatagtatgagggaaaccgcccccatgatttaattttctcccactgggtccctcccataacatgtgggaattatgggagctacaattcaagatgagatttgggtggggacacagccaaaccatgtcaagcacttatttaagtgaataatcactacaacctcttatgtaacaattctgatacaaataatattaatcttttctcttcttctgaaatgtattctccccgtgagagaagaggaatttaaggagtgtcgaggagaattttaatacctagatcctgtttagatctgtactagatcacttagtacttagaaaacattcaagagtttaaaaattattattaccatgtttaaccttgacaccatacctagagcaaagaagagttttgctgtattttctaatgtgtcttaatttcagttctccttaaaaaaatagataatcctatttggatattttttggaaactaacccatggaaaggataaaaatatttcagtgctggttaagacttactgtgtaactttaaagacatttttcagagctttagtttcctcatctgtagaataaggtactatgtaacgaaattgctgcctttgtagataaaaaaaatattggaatattacttagttttataggtgagaaatctgagacccaaagagtcagttaataatataacttagaaggctttttaaagactgtacattaagatgatttccttgaaactagataattatatggaaattcacttaatcaggcacagtaaaacataatatattgtaaaatgctgaaaaagaatgagctcatgagaaagcctctttctctttctgtgtacctggcacacagtaatcatgcagtaaaggggtttgtcgttagtattgttattctagttaaaggaggaagtaactgtcttctaaacaagttttatttattcaaaaattaagaagagcagtagtccaattcactgaactccagatatacaaataaaattaagagcacaaaagccagatggaacaacttgcgatgatgcttttacccagtgcaagttttcatttttgataaatatgacatttcagaaaatgtttgcagtatcagttactaatcaagattactttgttattcagtttaatcagtttaagagaagggatcctaaaattatgtattttatttggccaaataaaatcaaatgattgtcccacttaaaaatggtacaattttttttttttagacggaatctcactctgtcaccaggctggagtgcagtggcgtgatctcggctcactgcaacctctgactccctggttcaagtgattctcctgcctcagcctcccgagtcgctgggatttacaggcacatgccaccatgcccagctaatttttgtattttcagtagtttcaacaaggggtttcaccatgttggccaagatggtcttgatctcctgacctcgtgatccgcccacctcagcctcccaaagtgctaggattacaggcatgagccaccgtgccccgccaatggtacagatttttaaaaggaaatacctcaagctgtaattaattgcatataattctgttgagctctatttagagcaaatggactttcaatatattagtctttgtgcctcagtttcctcatttgtaacatggggatagtcataacgctcatttccaaggagtgttttcaggttagaaattatacattcaaatcacttagtacttagaaaacattcaagagtttaaaaattattattagcatgtttgcggttattctaattttatctaactaacttttatgaaattaaggcatatctgctgtcttctactcagtgatttttgagacccggatgtcattggaagggctcctgtagtccttggagtcccaccttgtgaagtggcatttaatagttttagaatgctgcctcacatttgctgaataacctattgccctttaattggaaacagcatatggaaatcatcacgaagagaagaaatcatttcaagcactttgaaaatataaaagaaaataaattgtccttggtaagtaaatataggacactgatctctgaatagtcaggaaaattctgtgccagggcctttggcaaaggctaatgaggattttgttccctcccccacctccacccccacatgcttgtcttctaaattacaagaccttattactatataaggctgctttttctaagtaaatgataatacattcaactccttggagtttttagcttttcaaacagtggtgagttattttcatcagtcgagatcaagctaaaatgaaaaacaaaatctgtgagagtcggataataccatagaagttacctttatttttttctttcatgaaaaacatagcagtttccattggatggtgctcagcataactgctattagattgacttgtgtaaatattatattacatttatcggttgctgtagggagtcaaaatgcagtgatccattttcaggtctccagtattttggctgctggcctgccagatggggaaatgttgatcagaacaattttatctcagtgcagagctgtggtcagggagaggaagttcattactccatcctacccgcatgctacaatgaccagatagctccatgttgactaggttactgtgggtcccttcagctgcggacacaggactgagagtagacacaaattcaattaaggatcccatcatgttatttattccattatgttcttcatgatatccaattaccctgactctctgtttctctttcttatttgagctggaaaattccttcttctctctattcactgctcctattctcttaattgccattctttctttatctagatttttgaagtctcttctccctgtagcttcctaagcaaattgagacattgaacctaatatcgccttacctgcagaagaaacagaagtggtacctgatgtgtgtgtgtgcgtgtgtgtgtgtgtgtgtctgtgagagagagagagagaacacaggaagtccggcataaatctgtcttaattgattttcatggaactgtaaaaacatagtatggaaagttatttcacccttatagacattgtgtgattttccaggagtgcgtttcaacagtccagcacatctctcatagaaaaatctcttttcaggtttgtaagatcctttacttcctttcattgtacttatcctcctccctttccctggccagccacacaacttccttatcagacaagcttgttttgtctagtgaggctgctctcatgttctcctgaatgtgtcatcctcatttgtcacccgagtctcgaattctcacatgggctcagtgtcctggagccacggtggcaagggagactgcagtcattggaaccctttcctatttgatacttagatattattgttttgatatagctaatgttatgatataggggcttgttcctcactggtatttctagttaaatgatttgcatttttttgcacttatgttgtcaccctgctctttgaaagtaggaaccccatcttttcatagttcttggcatattacaaaataatgctttcaagatgaatgattaacatatgccacataacatgtataactagatacttaaggcaggctgatatacctgttgaaaggttgttgaataaatgaatgaatgactgtacatcttttattgttagttcaagagtggcaactattgaaaagcctgattttgctgaggttttgcttttttttaaaaaaataagcaacttatataaagagtaattagaagagtgatatatatatatgttgtacatgtgtgtgttcagatttttaatgtaatagtatgtagtaacaagatgcaaatccaagagcttcagtggaaagactgttgattgaactgagaatcaggagacctgaattcgaggtatgagtctaatttctcttacctccattaccttaactatatcactgacactacctggctctcagttgctctatttataaaacaaaaaatttagagttgatgattttaaggttctttttgattagagctattttaaatcaagacaataatgagagaaagaaaatgcccatgagtggtcatattgtctcagtgaatttgaaaaataaggaagtgttttctggaaaggataattatttatacagtattgtttggggattttatttgaatttctccaaattataatttgtatctttgtttaaaaaagagaagagctctcaaaatgctaccaatttagtgtgtaccttactagatctttttttatgcctaaaatggtattttagcaaattactattgaattcagccttttccaatgcagctcctttttaattattttattatttttatttttcttaggaaacagtttgcccaggctggactgtagtggcaccatcatagctcactacagcctccaactccaagtgttcctcccacctcagcctcctaagtagctaggaccacaggtgtgtgccaccacacccagctaattttttttttttctattttttgtagagacagggtctcgctttgttgccaaggctggtcttgaaatcctagtttcaagctattctcccacctcagccttccgaagtgctggattacaggtgtgagacactgagcctggcccttttgaaaaataaatgcttaattattttcttttccttataactttttaaaataatgaagcagttccccaccatacgaaaatgtaatcaatatgttttttaaaaaacgtcattaacagtgcatggatttaaacacaattgatctttttataaatctaacttctttactcaaactttggatccaatatgatttatagcttttatgttttgtttgccttcccccactagaaatcccaaagaaacaactgatacagaccatcttgtagagttaaaaccattcatttccattattaaaactgctacaatactctgacttagctgtctacttctatgaagcattcaaatttgatggaaatgggagaagagaggatatgtttgacattgttcatctattccttaaaccgctcatttgggtaaatatgtcaaagagaaaaaggagtcattggtatacttggacttgattagtatagtgccacatcttaaaatgcactgtttcaatcaaatcatggctgtgtcctacaaatgacttctttacagtctatactgtaaacccctaaaataactagaattgaaaatggctttaatttttgaaatataaaaatgacacattgtcattataaaagtaattcaaacattacagaaaaggataaaaataaaggaaaaactataccagccagaaataccacattattaacactttggggagaaagttttcagacccctctgtacacacatcaactcacaatcactcttaccttccattccatgaaaaggaatggtacttaatgtgctttcttattaaatgacacatcatggacgtctttccatgtccatgaatactgatttacatcataatttttaatggctgtgtagtattatacattatatagattgaccgttattgacttaactaattccctattgaacatgtaggttatttctaatttttaaccattacagatagtgttgagatgaatacttttgtatatgtaaaagatatttacgcacttttctgatcatccctctagaataaattcctaaatgtggagttgcttagtatgagaatatgataaatgatggctttcttaaaattatttcctttcttttattttatatttttgtaaaaattaagaatatgtgaattaatttgaaggctgttttacacataaagagaacttttcttatcatgtacttgttactcattatattggccaatacagatttcttttggctgataaaataagtatatgtcaatgtcaaataatctaggtaacatacttccatttctaaacattttaaaatattaatagtgatttggtactttaaaaattgacttgaaaaaatttttgatagaagaaaattctcacattttagttcgattagatttccagatcgtttcaggataaaaaacattcgtaagtatgatcaatgttctaaaagcaatgggcaggaaggtattaaagcttaggaagtctgggtttgcagcttttcatggaattatcaagacaggataaatcaaataaaaaaatctatcctaaaaaataattaaattctggtatctctcttttgggagatacgtgaaaataggttgtgcacatgataaagccttatagaacaggagttataaatgccgtcataccactgccctactaaggttatagggtccgtttcaagagaaggccgttgaaatttggatcttgtaattaattttttgttctaattcacaaaagtactataaaaacctttattttgtttttaatatagtttacagaatttagttttaatattgcttaaagattcctgacctatctggttgttagaaaaaggaactaaataatgtgttttttaaaagattgggcccccgtaacataaaggcatagaggaatggccatcttctgatccattgttcaattatctggcactgcagatgtacccctcaacatgcccagcagcctgacctggagtccagattcatgggagtgactctgcaatgaaatatggacacacggctcatatgtaccctcgaacatccttgtgacattaacaaaaaatacctgtgattgcaaattcacactgagggatgcctagtatagaggataaagctcttttcagggttgtgaaacatacgggggatgagaactgacatacacgtagacatctattccatttacatggctcttaattgagttttgtcttggtaatagggctggtcctgagtaagcctaggctaaaaagatgtccctgggggtattgacctacaggagttgatatgtttgggggtgtgggagaggggagagcatgtgtgagatatgaagatgcctgttccctggacttgcccaggaacactccagtggagagagagtacgtgggaacttaggaactgttttccattaaactcaggacactaattgtgccagagtccaggtgctaatgtgggacacagcactgtggaagggtgttttcccactcttttttctcatacatagacagctttgatagtggcagatgcagaataaattgtgggccctgcccacgcttgggaaggctggagcagaagatgtcagtgaacttattcctgtgcatggaggagcagagggagatgctgcatctgctgccggggctcttgagccagcaaacttgcaattattagtgtcctgggagcattgccattacacttatatctgtgtgatttccagggcccagcctgagtccatatctctgactcttgacagaagttggtatccacataccaaaggttatctataaactaaaataattacaaatgagacgacaccgcagttgtacagtggcatttactgatcattcacaatgcgttcctgatctcttccatttgttgaaaacagatgacctgagcataattccacccccttccccattattttttgttttccatttccaacgtctattttactatgacctccaaatcattcatgtagctaaagtattgacggttcaccagtcccttctgggttgttgtgttcaatctcagatttctgtctttgcagcaacacatgtggctatttctcactgttgttttctcttaaagattgttccaggtgcagagtttgacatgatgcttctcctctcctaaaccctgacttgtagcctccttgtgacaggagacattatgtaaaaaagatgtcaggggagaatgaagggagaatgagatcagtcaactttgtttttcctttctgtgctgtgattgtttttccctctcaattttcttttgaccttgcataacacgcctatactcatatctgaaggaggtgcgttgcaccgggaatttccatttttacagctttcaaaattcccttaatctttatgagcccaaatgtttagaagttacttgtttaattatgtgtgtgtgtgtgtgtttatgagaaatatggtgcacttaagtattgcaaatttctgctaattgataagatagacagggaaaatcagtgtgctgatttccaaacaaagagaagagtgcttttagggactagtggcttcagagaattttcaccaactaccttcacatttcatagaaaagctatattgtttaaaactttagcatgtgggtggatgagtgtgtgtttgtgtgtgtgtgtgagtgtgcagtctaatccaatagttcattctgagctaggttaaaaagaacacagcaccagaacaaattcttgtttcttatttatgtacccaactacttttcttttttacttttttttgagaatcatcctttaaagtccagttgttttcatgactcctctcccaacaaaacatgagtactttattttctaaaattgtcaatgccttgtgctgtcaatgcctgtgcagttggtgcttaatgatatagtgttaatttattttgacttttcccaagtgtatgtacttttccccatagaaaatggcgagtctcttacagacaggaaatatactttatatttcttttatctgatgatttctcacacataaaagatctttaataagtatctaagagatctatcctggattttcctatttattgtctgtcctttagtcctcggatgaagcaaagataaaaaatttttggtttaagaaaatctaattggtacgaggaggaaatgttgaagctaatgcatctttgagttgagatatcaaatcattttatgctatgcctaggtccattatcagggataattgggaattgcctgcattataactgcatgaactgccttggttatctattaatatggatcagtcacaaggaatttctctgcttctctcttataaactccagatgtacgtctgagattaattcaatctttgctttccccgattcaccatttgtttttctattcaatctagtcacctttcaagcagctggagtggaaataccagaatgttcatctctgatgcctgatcctttcgttctttcttttgttgttttattttctttgtgcatgcataaaagtttcttggcaagttcccatgatagcattaaaaactctatagtctctgtagtttgcatgaagtctctgtgtaagagtcaaaggaaaactatgcatgaaagatcatagggaaggttttgccatctcaccatcatgggaagaaataagagataccaacatttagaagctctttagatcattaattctaggagttgagatgagacatgaactaaaaattattttgtttacaaatcccattttcattcagcaactccccccctccaatcccacaatagagctaaatacaatgaacacatagacttatacagtaaagagaaatttccctaaaggcacagagatgaatgacaggttaagccaattgacaggatcaagtctaggtgcaaaataagattgattaaagaatgccaatgagtgaaaattatggaaagcattaatgggctcataaaatcttagaatttgaaagagatatctcttttgatataacctgcttctaggtagaggacttctttttacaacatcactgataaataaaccactagcctttaaaaaattagttctgatcacgagatgcaatgaaatctaaagaattaattgttgatcatcattaaacaaagaaatttgtttgtttgtcagaggcaggatctcactctggttgcccaggccggagtgcagtagagtgactatggctcactgcacctcaacttcctgggctcgaatgagcttcccatttcagcctccccagtagctgggactacaggtgcatgccaccagacccagctaatttttgtacttttagtagacacagggtttcaccatgttgcccaggctggtctcaaactcctggactcaagtaatccacctgtttcagccccctaaattgctgggattataggcatgagccatggtgcctggccaaaaggaaaaaattgtttaaaaatttaggtaaatcttccttcttataatttcttattgatttaagttctacctttagtaaaaacttgactgtctactccttgtttctatgacagctgttcaaataaagacttttctataaattctaaccattttttccctctaattatccttccaatggaacttatctacctgaaagccctagctagaacagtacatgcaaaatccacatttaatttaaataattatattttaaggtagtaccaactagatagtagttcagaaaaaaataggactttagggttttagttgggcaagctcagtataattagcattgagactcagcagttataaaacaatctcaggcataattaacagaaaaacgtttagctaaacacatggttattatttttgtttgtagcttcaacttcactgtaagaattattttttcatgtaattttccaagttgggtctatgaccattagaagagttatttcaaggcaaaatcaaccatacttcccaggtttatggattccaactaattgttagcattagcttttgatattcattttaattcagtaagcatatacttactgtttgctttgtgcaacagtactatgctaggttctagggtgaaaaagacattatccttgctcttaagaaattttcatggaaaaggcagatttataactattatacaagatgacaaggctttaaagagaggaatatattaatataatgtattatgaaatacaaatcatgaaaaaattaattctgcatagtatcatcagggagcaataaagagaagtgttaacattcaaactagaccctgatgtctgaattggaccgagaacttccagacctagggagtacctggagcaatgacacagaaggcttgcaagatcatggcatgtcaatgaatggcaagaagtctgtagagactaaactttttcaagaacattccagctctggtgttatagtttcagttacagtattgtgagaaaggtcagtgaattatgtataaaacagaattcaaatagctagaattcaaaatgctcatcttgagccttctttcatttattgtttgtgtgtgtgtgtgtgtgtgtgtgtgtgtgtgtgcagcagaaaaactcattggtgtgttcctgtaataacattcaagctctacactcattttccatagtttgtgtgaggtctttgtgtcagggtcgcaggaaaacattgtgagaaaagccataatgaagatcttgctacctcaccatcatggaaagggttaaaagatacttttacaacttctgagtttattaactcaaagaaccaggtttaaaagtctctgtcttcttcctttcaaatgcatcatcttattcattaaaaattatttctcccaaattcttattaaagatttctaaacagggagatgacattatctgatgcatacttgggtagatgactgatggcaatgtggaaatggatcaaagggtggagcttggagaatggtgattaccatacgccatgtgagaaataataggattctagatcacgcccatagcaccagggctgaaaaggaagaaacatagacaaattagaaggatataggatatggatggtggggtcaggagaggagtggacagtaatttgattgtttcatcttggatgacaaagggatggatgttggatttattgagagattgtattagaggacgatgagcaattatagaaaaaaataaatttaattttaaataaattgaatttaagttatctatagagcatacagaaggagatttttaatgcagaattaagagtatcagtctgggttcaggagaatggccagggctagaggaaatctagggataatagctgaaatacctgaagcaagaagccaagagaacagagtatgtacagaaaattggagaagaccaataattaaagtatggacagagaaagaagagtcaatggaaaaaagttaaaataagtcattagaaagatagaaagaggataagtatttctggtaagtttaaaaaggagagtatttcaaggaattatttattagtgacagatattgtgggttcaatgaagaggttggtaagaagaccacacatttgatatctgggagggtttttttgtgatatttctcaataaaatgatagggatggaagccacataatagttggctgagaaatgagaattagaagacagcaagtggagacatagagtctagataattatatttaaagtttggcagtaaaggaaagacagcaaataaaatgtaattggtgagaaaacaggaagagtgaagatggcacctacttgagggaaaagatggcccaggaaagtgtttcttagaatattggtaggagagggagaaagactgagtaagacagggtagttactcttgtagcaaaactagtggagttggaaaggattagaattcactgaagtttgtgcttaatatgtttatgttttatatacttcattttgatatttggaagtatttattatataatgaaaaatactagatgcaaaaaagttctacaaaaaaaaaaacagaaaaatcaatgaataaggtcactgtctgaaagccttctaaagcatttgagccatagatcatgaatttttagttatttaaatttatttttaaattttactttggataacaggaatacgagagctgaaaaattataattcttagttcatagcacacttcttaaattatttctaataatatcataaacatatgtaataccaactccccaaacaaaaactaagataatacctgatgtctgacattaacgacctcaaccccaatattatcaccctgcctctccccacctgaggtaactgtcattctgaattctattccattacttacctttctttttatatagttttattgaatatttacacattcctagaaagtagatatttttattttagttggttttagcttttttaaaagggtaccatgctgtatgtaatcttcgggacttgtttttccacttaagatattaccactaggatttatccatatggctgtaactctggttaatttattttttctaatgtgtaatatttcattgtgtgagtatcccgcagttcactcaccattctcttgttgatgggcatctgggttgctccaggtttttgctattgtgaacacgtgttactagaacatgtttcctcttgtacatgggcaaagacttcttttagttgtatacccaggaatggaattgctgggtcataggtttgtaaatgatcatgcttaggagaaaatgccaaactcttgttcaagttgatgcatgattttacatttccaccaacaatataaaaggcatcctgcggctctacaacttcttaatgcttcattttattagactttttatttttttatttttatttttgccattttgctagatataaaatggtacctaattgtggtcttgatttctattttcatgactaccacgtaaattaaatatctcttcatacatttattggctgtgtgttctttagaacatttttacattaaattgtttgtgttattgattagtacaagtactttatataattttcatattacgctttgttcattgtatatatggtgaatgacctttctatattataacccatattttcatgttatttaaggtttcttttgatgaataacaattttaatatgtcaaacttagggttttttgggtttttttttttttctgagacagaatcttgctctgtcatccaggctggagtgcagtggtacaatcttagctcactgcagcctcaacctgctgggctcaagtgatcctctcacctcagtctcctgagtagctgggaataaaggcacgcaccaccacacccagctgatttttgtattttttgtagaaatggggtttcaccatgttggccaggctggtctcgacctcctgggctcaagtgatccacccccctcagcctcccaaaatgctgggactacaggggtgagtcacagagcctggcctatttttttcttttatagttaatggtttcaggttttgttagagaaatcttttgctactccaagtctaagaaatataaacctattacttactattagatcttgagttttaaaattattattttaaaatgttttcttaaaatgttttaccatatatttttataataaactttttattcttagatataatgctgtttttgaagtttcagagcatttctgctttctttttcttcttcctcttcctcttttatttttctttcttttttttttttttttttctagaaacagggtcttactctgtcccccgggctggagtgcagtgatgcagtcatagctcactgcagccttgaactccttggttcaagtaatccttcaacttcagcctcttaagtagcaagggctacaaagatgcgtcaccatgcctggctaatctttttttatttttagtagagacagagtcttgctctgttgtccaggctggtctccagccccttgccacaagtaatcctcttgcctcagcctctcaaagtgttgggattacaggcctgagccaccgtgccccgcccttctgctgttttcaaaaaatttgttttaatcatcttggagatgtaaagtcatttgattaaaacacaaagaaacaggccaggcacagtggctcacacctgaaattccagcactttgggaggccaaggcgggtggatcgcctgacgtcaggagtttgagaccagcctggccaacatgatgaaaccccgtctctactaaaaatacaaaaaaatagctgggtgtggtggcgagtgcctgtaatcccagctacttgggaggctgacaggagaatcgcttgaacccaggaggcagagtttgcagtgagccaagatcgcaccattggactctagcctgggtaataagagtgaaactccatctcgaacagaaaacaaaccaaccaacaaacaaaaaaaacaaagaaacaaacaacaaaaaagaaacaaacaaaagaaactcaccttaaattcagagaattcaaccatggtaatctcttcaatgaataatagtgtcagagttttgtgattcaatagatgaaaatccagctttttaatttttgaattcttcttctgtagctttgctgttagaaatagaaacaatttggtcaaaaccaaaacgtggtttcatgctatgtaaatacatgtgcatatatgaatgtttgtcccttattatatgtgacttccaggcagcaatgctaatacaatatttcaatctgtaagaacgattttgtgttactaaataggcatcatcatttatgcttttgaaaagagattttttattatgccatgagtcatttctctagtccattctgagacactgataaaaaagatttgtgatagaaatactttggtataatgtaaggagaataacatgattgcaaaatattggaaaaatagctaaatatatagtagcaggccctatatactaaatttttacattctgtcactttctaaattcaaagaacaaaaaagttagaagtacaaactgaattggcagttttcccatcaaattgttgagttaggtagaagagaaagtaggtgaagagtgcctgctgcatgagcttacctttagcaatccttcccattcagctttttatacaaattctttgccatacaaattccacattataaaaactttctagaaactgaaagttctttttttaaactttaaaaaatccattttttaaacaatgtttgccaacatataattccaaactgaaaccagatgtcttaatgtttgctgaaaaaagttattttatcatttcacatgtacccaggtgtgtatatttatataatttgtttatatgtaatagattatggtatatgaaaaacattaaacaaacctacagatgtgtttggctaagtggttcatccaataggtaatgtattttacacattatttcatagtattctgttcgttggttgttgagactatgttcaaatagaaatggaaaggggtttatcactagaaacaggtttgatttccttaaaaggcagttgtttcttttttcctttgcttctctggagaattggctgcaaactgggaatagttctcctctgactcatttgcagagcagcactagagcatatagagttcagataaaattataatgaaacattctaatttgatgatgtggaacaagagagtagtttctaaaagaaaattttacagattgcgtttacttaaatctgctttgcagataaagtaagttgttccttaaaaacaacttagtccaaacatcgggataagattttcatttgcctttcaaactcaatattgctagtttgccagaagacatgacatacacagttatattaggtagcaataatttaattcttcatcaagtattttgaaggtaatgcaatgactattttagatttccaagtccatcaaaatacagattaaaaagttttaaaatgtttttaaaaatattattaattgtaccaaccagacagaatatgctaaaattaggactattatgaaactaaatatacattttaaaaattctatggcagcaccagcagaaatgttttgccatttttagcatggtgttcctaatgaatatatgctttgaatacagacactgattcagtcatgtgcacaagtattcaaaaatactcattgaatatttaatcaaaaaggcttgcttattgaatacttacataatatgagggagagcaaatattaggcattaatatgacaggaagcgctagtcgatcattgcactcattcttctgagcctggattgagcctccctgtctctcaagcttgtttccttgtcagtcatttggaattgatgagaattggactttgagctgaaacctctttgtagtcactgtacttagccatactcccctctcataatttggctactttttgcataccgaagtaattgactgaaaaaataaaagtttattcatctaggtatcaacttttaaagctgttttgatgtcagtaaacatcagttaagggcataccataaatcaaactgggctctagggatgccaggatgaatattataaagttcttctcttcaaaaagcttacatattatagaggcagtcaaatatgtgacccaattagtgtaatatgattttgcaagtgttattgtagaagatggtataggggacagtggaggcacaaaagaggatggagagagatcggaaagttttctagaaggtggaatatatagctcgaaatatgagaaggtgtctttcaggatggaggagagaatcacagaaagtgttcgaggcaacagccttaaggcataaaccagcacgatctgttaaagagactgagtacaggagttggctacaaccagaggctcactatgcagcaaacaagatgtagtggagagttaggcaggagcctcctcattcagggacttgtgatccctgctaagaagctggagtttgataatggcaatgggaatccaccacagatatttaaataatgggaataatatgataactggtggagaaattattggacggatgagagactgaaggctgggagagcagttataaaattatcattttagtataggtggcagaaattagtggtagagaagaggagatagataccattgatgcaaaataattggatcctgtaggataaggtggttgaagagttgtgggaggcaatgaaggagaaagaggaatctgggatgacttggatatttgagcggaatttagagtaatttgtgaaaacagcgactataggagaaggaataagtatgtaaggaaagataaggagtttacttttatgtatttttagagtgagtttgctgaaggacagccagggtgcctagtaagcaattttatataagaactcagagctcaggaaaagggaaggactagaattcatctgtgtgcagctggtggttgaagtcattggagtgagtgagatcacccatgtcataaaaaacaacttttatctaagtgattcgactgtgcacgtattagagtaaatacaagaacacttggcacccacagtaggcacagcaccagatacttgttctgtcttggacagaactctaagaacaaaataatccaccatggaacagaggaaaggcaataattttctgtctttctctaaactgtaaagtaatttaaccatcaaaagaactctttgtagtttgagtgtaatgtaagaaatatgtattccataccccagatttattaaaattgcatattggaacaattttgctgaggttaaaataaatcttaaaacaaataaatattttcacagtacacatatgaaaccatttttttttggacaccaatcatataataaccaggcagtaggtgggcaaactggccaaatcaagaatgatgtctggctggggaagattgttattaagatccacctgatttcttttcttttttcctttttttttttcttgttagagagagggtctagctctgtcacctatgcttgagtgcagtggtgccatcatagctcactatgatgtcagactcctgggatctggaatcaagtgatcctccctcctcagcttccctagtagctgggactacaagcgcgcatcaacacgcatggctattttttacttttattttgtagagacagagtctcgctgtgttgtccaggctggtcttgaactcctggcctcaacagatcctcccaccttgggctcccaaagtgctgatatcacaggtgtgagccaccacacctggcccaacctgagttctttacctagtccttaaatgttggtattctgtaggatttcatggtcagtccactgtcttctcactctacatgctatcccttagagattgtttcattctcataagtactactaccatcattatattcatgataccatcatatctttagtctggatcttgccttcaaacccatcttcgacacaacagccaggctgacgtatctagaacatctatctgcccatgccactgtcttgattaaaatcatttggaagctacacacagtggtttgtgcctataattttatctacttgggaggctgaggtgggagaatcacttaagaccaggactttgagcccagcctgggaaacatagtaagactccatctctaaaataaaataatgataataattaaaaaacccttcgatgcttccccactccctccatagcaaagccaaagctctttaatttggaaaaatagatcctttattaattatgtcttgtctaattctctgccttatctttctattgccacttaagctttaaattcctacaacatcaaattgcttacagttacttttcatatgcacacacacacacacacacacacatactcttttttgacatcttgttttcattcttgcttctccctcaatatgcagtcctctccctcttccacttgattaacttttgtcacctctccagatagccagtcttggccctaaattaattacctcatctcagtgtttttataatactctgtgcatatctttgtcacttaacacattgtttcacaattatctttttataggactgttttcctcattactgggagtgccttgagggttgggactgtatcctgttcatctttatatccttagtgactagcatgggcttataaatggttaaataaatgaggagggagtgaatgtccaaggcaagcttgcataaaaaatgcctccttgtacttgagtgtaattttttagccattgagtaattccagtgaaccatgtgtagatttgttactctggagttgtttctgttaccctttttaattatcgattcgaatcaggtgttgtctaaagtagatgtacgtctgcatgatagggttatttctttccctgaagaaatccttcaggtttacagaaagaaaaaagttggctttctgtaatataagaatatatattataaaaatataagccatacaggtagatgattccttttggaagtaaaatgtatttgtggtgctccttactttatccttctaaataattccctgaggaaactctaatagtttacttactagcttgatggtgtagtcaaacaggttttgctctccactcttttttttttgaaccctcttttctacctgcatattcacaggatgtagatatttgctacttatatattctactggaacctacatgtttataaaaagggacacatatcatctttgttcatgtaaccaaagagggttaaggtaacagcctttttttttttttagaagatcaactggcattttctgatttctgttagttgtgaatataaggcttttattataatgggatagagagacttagtgttgtcttaaattttaaactccagggagaagtgtctggtatttttcacattacgtttagagatcccagacagatattcggctccagtctgttaaaaaataaaatctttttattagagtatcatccatatagtatagtttagccatatttggactagctggacttatctataaatatatctttagttatacatctgtacttataggacaaagtaaatctttaaaataagataatgaattccatggatatctattaaaggaactgtggtttcttgcatatattttggaaaacaaaatattctctgccatacacacaacacgatggcagcttcagaaaattggcgtttcctggcagagtcatggaatcaacctaaatgcccatcaacagtagattggaaaaagaaaatgtggtacatatacaccatggaataccgtgtagccataaaaaagaacaagatcatgaccttttcagccacatggatggagctggaagccataatcctaagcaaactcatgcaggaacagaaaaccaaatatcatatgttcccacttataagtgggagctaaacattgagtacacatgaacacaaagaaggaaacaacagacaccagggcctatttgaggatggattggggaggagagagagaatcaaaaaactacctaccaggtactgtgcttattacctgggcgatgatataatctgtacaccaaacctccatgacatgcaatttacctatataacaaacctgcacatgtacacctgaacccaaaataagttaaaaaataataatagaaaattggtgtttctgccatattgcacaagtaacatacaatttaagaacccaaatattgaactttgagtttgcttcctagtttgaaatacaaacaagatattagctgacctgtagcatctcttctagaatgtagatcctggctgttgagtccagctgagaaaatgcctgcagaatacagatctacttaggagagatattggctcttaacattctgtagcctttgtgctacccctatattgaaactccttctcagcttccagaaccactcttatggaaaaattcttgcacgaggaaaggacagacatttcaatagactgcactcaaaaaaaaaaaaaaaaaacctgagttcatgtggcaacatgttttttaagaaagtcttgaatgaattgttattctaagtttcaattaatgatgatctcagctggaataatttgcacttttatgtaatttgtgtttcaatacatatgtagttgacgggagctgtctagatacatcagatttacacatctgtcagtaaatcaaagatttaaatgtgaaaggcagtacccaagtgctccgtgtgggtgtatagcattccccagcagattaaagaccagcaagtcaatacaaagttacagacatatcaaaaagcaatctcttatgttacaggtatatccttattccaggactgtacatgtctgcagaaatcctttgcccatttttcctgaacgtgggaatctacaattggccggaaagggtcaaatgttaacagtatattttaaatgcaaaatacagaaacttttaatttggtgttggccattgccttttagttgttatcattagagatgaacagaattatgagcattctgagtaacaatgtggcccttaagagggtggaaatatttccccaaacatgcattctgtacatcggcaacacagaagttactaggggactcagagcaaagaagcccgagcccttggtcagtgtggctggatggtcatggatgctggcatttcctctcctacctctgcccacatatacccatcttttcagacacttgacaggcacttggcctttggccctatcctgagatatatggcacacttcctatgtggacgtgctagagggctgtagaatctccaaaatgatatggagaaattttctttccaattgtcttctctgaccaggcaaagctcagtatttggaaattggacaatctatcctgctggtatatctgctgttttaaaggaagatttttctttaggccactctataggcaatgaagcaactcctctttaattctatttctgtcagtctctcagttgcaaaagcccaaatagtgtgcatttgagttgaatagctaacatactactggtttatagaaaattattctgcacatttttgccctaggcacgtaaagtctatcacatcacctccatggctgcagtactgcaaccactaaattcttggagtgaaggataggcttgttttccttgcatgggatgtgcacagaaatgcaccattaatttcactgtggggcaagatgtagcactttgctagaatctgtgtttacagtttaattattttggtggagtgcaccgaagttttaagaatgtgatcatttcagtgccatggttattcaaaaaaatgtgttttagggagacatgaggatggcacatatccctaacataagagaacccaagaaaatataattttattacctggactgactgacatgtgaagcccttcagatgtgatttgctacctaggctcaccagccagtaatatgccagttttaaaccagatgactgttggcctcaaaagcccagctgacttggaagtaacaccttgtcattttttttttctacctccaaatcccactccagtggcatgtttttctagtcatagtttattatcgtcacctatgtctcaggctgtccaccttagtacaagccccaggtctgcagagcttgtgatctttgtcattgtttcccccttgtccttcaagactggtctgtaaggacagaggcctagatatcttgagctctgcagcttttccagaacaacattcattacctttagacttattaaaatctaatcctaatagggttcctgaagtagttgtattcaattattaaaatcagcgggtcagtttaattctgtccccagtatatttttaagaaaaggaaatgggaactattttaaggataaacaagtgatgtatgccttcctgcacaaacttatgggtggggtgtgtaattataattctgctcggtgagtttggataacaattacagtatagagttggtgctctgaaatctcagtgtgacaattccccaaccttgacatttcagaaatttccagatatttaaaataaacgtctaagaagtaccatgatttttgctaggtactgggcaaacaaagataaattagacatggatcctgcctccaaaatgtgcacagtagtcggtgggagggcagtagattatccaccaggcagatgagtaggagaaatatggttgcaggagatggagcatgccaatttgcagtgacaaaggtgtagcatggagtgtttgcagaaatgtaagcacttccatgtgaatggagaacgcaactggggattataggaggtgtgctagagaggcaggcagaggccagattaggtaggctattgcaagcaatgatacaactcttcctcctgtgagtaggtgatagggaactattcaaagcattagcaaaaatgaatttttttcacataattcttgagtcctggtgagagaggaaaaatactttttatatatgtatggagctgctgggaagctatttcaacagtggaatataaagatgtgaattatgacagctggagtgggctgaggtaaataggacattgttaagaaatgtttaggtaatgcagtagaaaggttttgatgatcagttagaggtaagaaaaagaataataaaggtgattaaatattctttctgccatggttaaatggtaatggcacataattaaaaggtaatatattgcacttcctggagttgtatggtgcaaatctatacaaaaacacacagcaaccctgagagctgggttgcagtttggtctctgaactttttatcagttaaagcaaagaaaagaatatgatcagttaaaagaggcaccttgttaaatggtgtaatgaaacaaaaactgaaaatgctgtaagttataaaatgtaataaatgtagatgatgattattatagtcaaataggcttttctctagaggagcagggtgctgttgtccagctcccttaagtctgtcaaatccccacagtacacgagcagattcccttcttccagacctttcatccacagggaatgagaatgcttctactctatgcgggatgccacttggttaacgggatactgaagcagcattgatttaccctctattggtccctgcgtagggcacccctgctcatcaattgaaatctatttcttagaggcaaactcagggagacactgagctgtcctcctgtatcaccttcactcttcttctggagtcttctccctctccttttttcttttcaagcaacacccaaaactttcatgcaagttaactgtcttggtctgtcttgctagtttgcccaacatgcacagctttgcctggatcctagcaggttctgggcagagaggcaagatgaaatttctgccatggatattttctgcattaaaaaaatccataatttgacattattcaggtattcactcttcatttctttcattgactgtagctgctgaattctctttattttttattattgataagacataatgttaggatcaaaaagggccctaaagatgaccttgaccagtcctgtactttgacagatgaggaaactgaggcctagaaaagtaaagtgaatcattaaaggctatacaactgggtggtatctgaaccgagtctaaagcgcaagtcctctgactctcagaaaagtctttcttccattaccatgctgtttcccagggctttcttgaaatttcatgtaagaaagagagagaaagaggtatgtgcttgagtttcaaaactttggagagtgttgaatatttaatgtcctgactacagagtttgcaaatgctgtgctgctacctagtaattgttattaaacaatgagatagatagatagatagatagatagatagatagatagatagatagatagatgatagatagatatatagatagatagatgatagatagatagatagatagatagatagatatcatttgaatttttataaaatttacctgtgctatcaactttggaaaaatgcattctgcctgtatgtgttgtactggcattatacagaaattggtcaggaaactgtgttgatctacacagattaaactttgcctttataatggaaatgtattaaatatgtacatttgtgaatacttcttgaactccatcctgggaggaggaggttgtctgcagggtactcaggatctgcagaggccaggctgcttggctcccatcacaggaggtttgctaggcaacccagaaggagctttcaaacaagcctagatattcctgcctggcctgctgccattctccaagaaggcaagtaggcacaataaattagaactggacggtaacagttcacatgttgccctttaagaagtgttgatattttatggcaagaggtttgtttgtacagaactaatcagtccatgtaggggtttattagctaattggtcagaatcaaaacttataaaaagcatttggaaaacagtcatctgtgattacactgaaggaaaaaacccttagatgaagtcagaaatgttgatccttgagaaagcttgccaacctgcatataaatttgtgtgggaagaaataaatttaaaataagtccttctatactaaactttaaaacttctccatgcaaggaaaaaaaaaaccagatggcataggttttatgaggtcataactagtactttgagacttgaaattccagaccagttccagtggcacccacatatttgcagtaacatttatgtagaaagattagacattaccgaaagtctcaggccatccccatgcagatacaaaaagatgctttttctttaaccctcttttatttactcctttattttataaatgcctggtgaaggaggttagcctgtttattagagtgaatcaaaatggttaaacctagttatcttgggatactgtgagacaaagtttgattatgttgtatttttgtatttgtatactgatatataaatacctatgtggtaagatgtaaagcagcttcagaagccttgggtaataaattgtttcttgttcatgaactaagccacaatccacagccatgtactttttgtcccatacttgcttgattgtagtacttataatcttgtgatagacacacttgtttaattaacagttttccatagaagtttgtgagctctgtgaggaaggaactgtgtctatttaattcactgtttctttgccagcatttaggaaagtacctggtccttggccacataaagaaaaaaaaaagaaaaaggaaggaagatgtatagaaagagataaaggaaaagtaggaaggatggaggaaagaaaggtaaatgggaaaaaggaaaggatggagggaaagagagaaaggaagaggagaaagaagaggaagtggaagagcagaagcaaataataatcatagtaataaagccagtttagtggctactttttatttgccataaaaataaggaactggccaattctttggatcttttcaaatggaatgtttctaagtttgcatgagtaactgagttgtatgtatctctaaatttatatcaacataaagaattctgagtatcctataagaaaatcatatagcctctcaaagttttaaaaccataaggcttctaatctcattttgactatttatttagaaaaaaataaaaaaaattttgctacattttcctaagtaaagtgaagagctgtcttttagtttttaatagaagaacttgtacttcatttattcttcaatggaatcccgcccctcactttagccaaatgatttctccaaatcctcatttttttttgttgtacaaatagagtcgctcaattatctcccaaggctctacaaaatcgaaataactttttcctaagctaattattgtggaaagttccaaaaagtacatgtgtacattttctaataaaaatatacagtgattatcatagatcgattggtctggtttaagtcaaattccattaatcaaaaccttcaatcaacggatttatcgtggatgcatacatttggtttctaatttatttattgtctacattctgcttttagaagaaaagggaaaaggaccaataagcaggtggttagtattaatttagtaaatagaaactacatcttcaatagtatattgttggaatagatggttataatgataaacgtctttaaattaatgttcataataatggccagatagaactctaagaatttgcagataatctgctgtttaaataacattgtattaggtactcaagcagagataatatagatgtgccatatatgttagcaataatgaaacttctgagcatttattatgtgccaggtataatgctaatgctttatctacacttgcctcatttaatcctcacaaaagtcctatgagaattgtttttccattttacagacctagaagctaagagagaaataaagtaacttgtaaaagatcacacagttagaattttaacataaatttgattctgactttttgtcagttgttctagttatcatattttagtactttttatcatctccttcattgcttccttcccacccttacttaaactgtgtggtgcatacttctgtatagcatttgcatattgtatgggaataatttgcagcttaaaaaaactttgccttttttatgagaacacaagctctttgaagtcatggtacagggtttttcctatttgcagcaaagggcctagggcagtgcctgtaatctagcagaattcagcgaatgtttgtggaataaatgaggggttctatctgggtgtattgcctccattagattacaaatagcatatgctgggtgaggtggctcatgcctgtaatcccagcactttgggagcccaaagtggaaggattgcttgagcccaggagttcaagaccagcctggggaacataggaagaccccatatctacaaaaaaaaaaaaaaaaaaattagccaggcattgtggcacagctgtagccccagctacttgggaagctgaggtgggtggatcacttgagcccggaaggttgaggctgcagtgagccatgttagtggcactgcactccagcctgggcatcacaacactaccttgcctcaaaaaaaaaaaaaaaaaaaatggtaagtatcttgaggagagggaaatatctcacttgtgaattctttacccacagggatgactcagattaagatttattgaattgaattaaggatttaaatgagtgctatacaataaacattatattgttatatttattatgttaactgagatgtgaaaatactatcatatcttagatacatgttcaataaagatagataaaataccttacaggacttttcaatgaaaaaagaatacagtttgttggattctcacaataaacctcagaaattaaggattcataagtaaaaaaaaaaattcaggattgaggggtctatgacttgtccacattcacagagctataagtaggagagctgggatgagaacctaggtctctgactattagtttgggtgcttgctatgatatttaaactattatactactgacatttcaatttgtgaaaacaattccccaaatatctagagttattatgctattattgtttttaatatttactgaaaattacaaattgataggttcttttgtgaaaaaatttatacaatatagccatgatgtgctcccaaggagctttactcctccaggaaatgcagggaaaaccaatcctgtgttgaaataaatccatagcactccttttctttataatctaaactctataaagaacttatctctgctgtatagatcaggaataccctggagtaagcgaggcatagaaaattatgtaagcaaatcagtgggatcccagattctcagaaaccagctccacacccaatccattactaccgacctgtatacaattaatctctttccattcctttggctaaattgaatcaagagctctttggttgggattgccaataaatgcctcaggcttttatggaatgcctagtatagggactgccttacacataataaaaaaatcagtaaatgtttgtctatttcctgggtgaaaactccttactacgtcagtcagtaatttgaatttggtgagttacagtttttgttctgaataccgtcactgcttcaaatttctacttgttttaaactctgttcatattactcattttgcaagctgtgaatctagcataatgaagtataggcagtgtgcctgctgctataagtaagccattggattttgtggtcatccacatacttgtcatcttttctctcagaaggcatctttttttctgactgaaataggatcatttccaagcagtcttctattcatatatttcttactatttataagaattttcactttgaggatcccaggatgttcaaaaatagatgagagcattttctttggcctacctgtattctgagatagaggcaccactgaccccacaagaagtaaggcaccatttaaggtggaattcaaaagaagataccaggttagaaaaataagtcctccgaaaagcttcccatcctttccttcagagttacagcagagttttgagcttgtaaacttgtttgcatctgacatgttattgttaataaaatattttatcctatgaaagtaagcatcttgaaataatttatcttctgctggttataaacttaaattacttagactggttctgatttacattggccaacaaatacctagatttaatattttgtagataatcgatttttttatcctggttaaacaagaggccttcatagaaactgagcacagactaaatttatggttcacgttcggcagaaaatggttttctctacgtcaatattaagttgaaacataagaacacctgtgtaagaatttgttttctgtaatttcaaactgataaccttaaataaccattgttaataaaactgatagaaaagtggtcgatagttcattgggatcgttgtattgaaacaagaacctgtctttgtggagtgtcccttacaaatcttccaaggactatgtgtggtccctacaacaaaatttctcacttctctgtagctgtatgaatcttgcccatgaatagcaatgctgcgaggaaacatgaactgtaacatgctccaccctgaaaattcacaattttattttaataccagaacttgctaaaaatccatttttctaggaggagcactaagaaaaaggccataaaaataaataatgttcaaggaggaaagacaagtgaaaatattttatgtcaatgatgaaaaaggaaataagttcggggttttcttaaattatttgaattcagttcaaaggaaagccttaagtttcctttacaaatatgctggcaaagtaatatttattataggtttccgaagttggactatatcaagttcaataaggaacaaggtagaactttaagtcatgttatttagggtagtgcatcctggaatttttattgcagtgccatatgtaggaaatgaaaatatttctacagcattttgggcaaacaggcaaggctgctcctgaccagaggctactgatgtggggtcttagtctgcctctggccctggccagatgccctgaggactgagggaaaacatcaataccttcagcatatcaattggccacaagtcagcagccaggaaagttctatcctggaggcaaggttgatattactatttagcctcagtatatgtttgtagttttcactttttatttttaatcacatataaacatagataagtaaggatgataacttttgaatccagctaaggatgacttattaatatgtgtcaaaacccaaattctatagaaccaaggttaaggaggattgaaaaacaacatacagaatagtttatgggtcttatagttctagtgttgagaagttaccaaaaccttaatcaaatcaagaaattatttaagcagttaatataatctgttcacgaggtcattaacactgtaggatttctagattggtcatagctgctttttgctgttgttgttgtttttttttttttttttggacagtaaccttgcaaggagaaaaaaaggattgagtttatacatgtaggatgaaaagtttctataaaactgctttagatctttaaattcttattaatttttcagttgcaatgctagttaacatggtttattctgaaagagatactgatggttatagagaccagttttttggataaactaggatttacgtgattcagagatcagttttagcgagatctcttgattgctgtgtagacccttgtatgcagactgcagttggtctcttttcactttctgagaatgggatactactttacacataattggataagaatcaggaataatttatttgcatgtgtgaaaaatacacttaaacagcttaaatcaaaaggagactccactgacccgtgtaatcgaaaagtccattgggacacctggcttcgaaaaggctggatctactagtctcgtgatgtgatcaggtccaggtctttctctcttcaattctttgcttggtttccttgttgctgacttcattctaggcaagatctctcctgtggttctaagatgactaccagttactgtagagactacatacttctcaatgcataactcatgggaagaaagcatattagtcccagaattctcaagacatcagaactggattaaattacatgctcaccccaacccaatcactgtagccagagaaatgaaatgcaccaaatacttagcctagcttcaaaccccttcccaccactccacaatgcaatgccagtgaactacacaagtcatcaaatggaaatttatggcttttagagtggtgagaatggatactggagacataatcaactctacaatggaatcttagaaatagaatgagactttagaatcttcagccaaatgcttactgactgatcaaactttataaaacattaagcaaaaatggtcatttagtctctgaagataccactcatgccaatgaaccagctactaccttctgagactgtttgatttttgaactgttcagtttggcaaagcctgtcttatattgaacataaatttgcttcccattgtcctttattcatcggtgtttattttgccctttttagccacagaaagtaaattcaatccttccacattacagcttttctagtatatattaaaatattaatagttaagatagttatcctaagctgctttctccaggctcaatatcccccattctttcatctgttcttaatattaaaaagtttagaataccctcactattttggccactcttctttgtataaattctagttaatcaattccaaactcagacacacaattccatgatacggacatagagactcccagtgaggccactgggaagtagtttattgctatatgtgtgagtagaaagagactgagtctaaatcttttgcaaaataactttaacagcagcttgctgaataagccagtctcagaaatgattaccttcaagtaaaatatacacagccagaatgagtgccaaaaatatgttttggaacatgatctctctaatctgtaatcattaatactgggcttaattgcttaattttttgttgtcgtggacctgatgtttgatttttaaatttttataaattatcagtatttaaatcaatgtatacataataatacagttatgtgctacatgtgatagtaaacaaaggaccacacaatggtggtcatagaagattataataccatattttcactgtacttttctatgtttagatgtgttgagatacacaaataagttggccgttgaaaaatgcaggcgctggggcgccaacccccaacaaagcttaaaatgtgcgtataacttttgactcccccaaaacttagctattaataacttactgttgactggaagccttaccaataacataaacagttgattaacacatattaatatcttgtacactatatacattataaactgtatttttacaataaagtaagttagagaaaagaaaatcacaaggaaaacatatttactattcattaagtggaagtgaatcattacaaaggttttcacccttgtcatcttcatgttgagcagtcttcatgttgcgtaggaggaagaggaggggttgattttgctgtcttaggggtggcagaggcagaagaggggaggaaacagaaggggaagcaggagaggcaggcacatgtggtgtaactataactgaaaacaaatgtgcctaagtgaacccatacagttcaaacctgtgttgctcaagggtcaactgtacttatcatcatcctacaattgcccagggtattcagtacagtaacatgctgtgtaggtttctaccctaggagcagcaattggctttgccatataacgtaggtgtgtagtaggctataccatctaggtttgtttaagaacactctctgatgttcgcctaagggttcatttctcaaacatatctccatcgttaagcaatgcatgactgtatatgtatgaactcttcaatttaatgtatttaatatttattaatttattttgagacagggtcttgctacgttgcacaggctgatcttgaactcctgggctccagtgatcctcttgccttagcctcctgaagaactctttattttttaagataattctttttattttctcttataaaaatgaaagagaaagaattccatcaaaatggccgtgttcagatactattcgtaaactgaactctcaggtcactgacattactgttaatgctctccagcagcgtgataaccacccagggtacacagcctggagcattttgtatgggaaatttgacaaacagatggtcccacagctgttctatgggggtagacagctgtcttccatctatttctccatttcccccatcctatccatcactactatcttcttaaacataagatcactaacaattatctattaagcctgtggtgtcctcctctctttcatgaaatacttacactggtgttaactctgaaaaggactggtccccatcagacacaggagaagtgggaggaagttgagcagtggtttaaggaaagcctgtaatgaggtgtctggagcgcctctctcttcatccagtccaccaccaagtcttgtacatcaaatctacttccacaatacacttcacatacactctctttctcccaattttactgccaccagtagtctaatcatcatcatcagccacttgggactcctgcaatgacccccaaatttgtctcttttcatcctccagtctgttttccaaacagcaacccaaagactttaaaatgcaaacaggaccatgtttgtctttagtaaaactctccagttacttttcactgcacttaggatgaaatacaaaattcctcataagttttgcaaggccccgcctacatgtccaagtacatctcccttcattctctctattgctcagtacatttcagatacactcatttcctttcatttccattactagaacaaactcttttctgccttgggacctctgcacatacctctcccctgcttgaaacactcccggtctctttgcctgacaaactcctactcatcattaattctcaaccagtgtcgtttagtctccattcttccctaacagctcattttaggaccccatgttatattctccaaaaatatcctctaattttcctttggagcacctacatgtgtactgcttatgtgtctaaagtctgcctcagacagtagaccataaactacaggagaagtggcttggcctactgctggatctccagggtgtaatcagattgcctgggtttgaatccttgtgctctcacttggcagttgaccttgaatactcagcctcagtttcttcacctgtacaataaagaaaaaaaaatataacttttaaaaaaagattattgcaagaatcaatcacaaaatccttgtaaaatactagagtgcctggcacataataggtgttcaatctataatggttattagtacagttgtcccttggtatctgtggaagattggttccaggaccctgcttggataccaaaatctaaggatgctcaagtccctggtgtgaaatggcatagtattttcatataacctatatgtatcctcccatatacttaaatcatttctagttacttatattacccaatgcagtgtaaatgctatataaatagttgttgtactgtattttatttttaaaatattattttgggccaggcacggtggctcacacctgtaatcctagcactttggaaggccgaggcaggtagatcacctgaggtcaggagttcaagcacacctggccaacacggcgaaacctcatctctactaaaaaatacaaaaaattagccaggcggtaggctgtatagccgggtggcaggagtctgcagtcccggctatttgggaggctgaggcacaagaattgcttgaacccgggaagtggaggttggcagtgagctgagatcgccccactgtactccagtctggctgacggagcaagattccatctcaatttaaagaaaacatatgtatatttatatatatatgtgtacattattttgaattgttatatcgttattttttattgttgttgggtttttcccaaatatttttgatctttgtttggttgaatccatggatgcagaaactgtaaatatggaaggccaactgtatattattattgttttaagatgcttacatattgtaggcaaaagtcagtaggaaataatagctatttcttgaataattctaagaagttattgttattcaaattagaacagtgctacaaaaattgttttcactggtagcttccctgtggttttccctcagtactttttaaaactgtcagatatttcaggctagccatcctaatacataacttagtctccatttcagaggttgtcttaaaatatttgagtttttaaacaatttgtaagagatatgtaagtacttactttcagatgcattgaaaaataagtcaccattactttctgttttttccattgagattgctgagctgagcatatttcatacacagagcactctgtttgggcctcttgacaaagaaattttatttttataaacttcaccttctggagataatgataacctttccttttttactctctatattcactgtcttcttaatggtatttccatggaggagctttttataccttcatcagggtacagtaaaaatgctgccctgtgtaaaaggattatgatggtgtacagattttcactgtcagacaccttcctttgggtaaatatttatgtgaaatgaggcaccgaatttaaaatagtcctaaagaagctgcatactctccttgacaacaacaacaaagaagtttgtgtgtgcacagttggtttagcagtgtctggcatagagaaatgaagacaaaaatacactttggtcctgtaatatttatagcattgccagtttaaccgtcgtgtcctatttaggaatattttttgagtgagctttattttaatatccaagagcacagtcttaagttgctgagcgacgctcaagctaactggagaggacagagaagtacttgcgtgctgttctgtgaaggatgaagagggaacttggcgttggtggcatcttcctaaattcttgcttactccaacaaagaagacattgctaacaatgaggtagccacttgcaaatgctgtgttaagctttgtaggcttttgtaagaaacattgtcttcatgagtttatacgtgagaaaggcaagagattccgttttgtaattctgagtaatgcctatccacgtatggcagcaacttgtgtgtgtggcgctcctattatgagagagtgagccagtccacatagtgctcatattccaggtgactgcaagtgaagctaaaatgcatcatgacttttaaattttgaatctttctgaaatgcacataatcttcactttaaaaactaaaaataattgccatcatattatagatctattaaaaatttacatatgctgcctgacttccctaatagagttacccgtcatggtttaagctccttagagactcagtgttctcacgtaatatcactttttgaactgtgttttgttaaactgtgtgaatgtgctggcttggcactaaagggcattagagtgccacacacaaagcattttagccttttagccctttctctcttctttttttttttttttttgtttttttttgagatggagtcttgctctgtccccgggctggagtgcagtgatgcaatcttggctcactgcaacctccgcctcccgggttcaagcgattctcctgcctcaacctctcgagtagctgggaccacaggtacacgccaccaagcccagttaatttttgtatttttagtagagacggggtttcaccatgttggccaggctggtgtcgatctctcgacctcatgatccgtccgtctcatgatcctcccaaagtggtgggattacaggtgtgagtcactgcgcctggccgccttttctctcttttaagctctcagcgtttctgtcagtgtgtgtgagcatgtgctcttctagttctgtcttctctcccctctaattttctatttctaaacatctgtgggttagaaaacattagaattacttctgaaataagagtaaactgttttcagctaattacccaaaggactgccttacaacttgtgaaagcatgcaagctttcatttttttttcattcatttgacaaatatgtattgaatacccactatgtgctcgttattggactgaggacaagatggtgagaaaactggtccctgccactgagggagacattagtatgatgaggtcggtgctgtaaggggtgcggtcggacccccacccctacctgggagtagtcagggaaagcacccaaaagaagcaatgcttggggctgagtcttcaacaaagacgctggacaggatggtttttcagatgatgaaggggacactgacagagtgaggctgggaggaagtggaggagtgagagcattccagacaatgcttttcctcccacctcccacctctctcctgtcacccccatctcgctctgctttgaggactcctcttgttcctgttgattcatgttggtgctcctccgggttctgccctggactcttcattcagctccctctttcagggtcatctcatagctgccgttactgttccttgtaagtgagtttaaaatcactgggacgtaatttgtaaatgttccacctgtagagcatctctcttccctgctccagagcagcacatccaactgagtattggacatgtcgactttcatgtctaacagacacctcaaattcaaccttccctccagattggattctcttcctgggttctttgtctcagtgaaagacactaccagacaaatctagtcaggtttttgagccagaaaccttgacttcttcctttctcctcctccctttcaattcatcagctctacttagttcctcatcttgaacatctttccagtttgtcacgttctgttcattcccagtcaccaactgcattcaggacactgtcaatgttttcctacattgcttcactagtccactaactggcatctgtccagctctttcctcacaatgcaaccagaaggatcttcctaataagagagatcaaacctgaccacctgaatcaaatatttaatggcttccaattgccttcaagataaacaccctaaatgaatctgccctcccagtctcctactgcaacttgcctataccaggccatttatacattttttatccttggatgacatttatttctcatgtattcaccttactgactctaatccttcctcagggaagcttttctggcccctctgactgggatagggtcccctttctgtctgcttcttgtctcaatgattttaatttgtagaggtgactgaatgataacatggagaggcagaggctcatgccactaagctttttatgacttacatttcccgaaaggaggaggcagccccactatgcagaccacacggggaaacaccagtgccattcagaaagcagaaaagaacgaggggaaggcagaggccaccgcctttactgtgttttccgtaggaaaggcaaggcgagtcaggggaaacagtttagggttagccagttttaataattctggcaggctttgggacataggagctatccctggttggctgggtttctagtcctgtgttgatttagggcaggaaatattggcttagtgtgtgagagataaaggaagtggttagggagatggactcactaatgcttggtttacatatgaaaggaatactggacggcaagttatttatcatattaggaattaactagctctgggaaggacagtctctccccagccctcaagcctttctattccatcaaaatatcaaaacatcataaaatacagaatataaaaaacatgattaataaatgcactactctaccacctattgtgggaaggtacgtatctcactatattgtaacacatgtcccaaacttgctatgttgtttcttgagagcagacatctgtctatcttgttcaccactgtaacccctgtgcccggcatggggtctctggcacttggtatatgctcagtaaatattgactgaatgaaagaatgaatggacagctttctatcttgtatacatagttcgtgtttcacctggaaagcacaacatttttttctaaatttagattttgctctatcaattaattaaaacatattttcatttactttaaatgtgagggtttttttctttcctttcaaagtttaatctggctcagcagtataatgtattacttaaaaccctataaagagaatgactcatctctacatccctgtgtcagccaatggttctttactggggataatgttgccacaggggacatttggcaatgaccggagacattgtggttgtcacaactggcatctagtggatagaggccagagatgctgctaaacttcctgcaatacacaggacagctcccctaacaacaaaaaattatctaacctaaaatgtcagttggtcaggtgcagtggctcacacctataatcccagcactttgggaggctaaggtaggcagatcacttgaggtcaggagttcgagaccatcctggccaacatagtgaaactccatctctactaaagatacaaaaattagctgggcatgggggcatgcgcctgtaatcccagctacttgggaggctgaggcaggagaatctcttgaacctgggaggcagaggttgcagtgagccaagatcatgccactgcactccagcttgggtgacagagcgagactccatctcaaaaaaaaaaaaaagtcaatagtgttgaggttgaaaaaaaactttattaaaggatggtgtgttgacaagtttacctaaaaagacctcacacaaccaaccatgtccccagacttctccatgaagcaattacaaggtaacttgctgatatcttagaagtaaagacagcagccctaaggggaaaagtaattttcagaggagaaaacattgcaagctacaagagaggggctcggtatcagagcaaataattaggtagattgagacatggaatgacaatgctgaagtcagggtttagcatgagaaccaaaatcataggctttttagctgacagttaaaaggtatgactaaattaacataagtgatgtgggggaagggaacaattatatagaatttataacttcaaagttgctctctttaaaatttgagttgttttttcatgctaacatgctgccgttgatcaaagagatgctgtcatatctttttggaactgtcttcatgtgtcatgctcttttgaatatcatcagtggtagtaaacattgccctctgaggcaggaatttggttttaggaaaaaattaagttacttgaaccctatataagatgaataaggaaagtcatccatactcccaatgccattttcataaaaattgaggacaggctataaattaagtaaatctgactctaaaggcaattttaaaatgagtgttagaaatgtcttatgccaaatcaacatcactgtgctaagtgtgtacctctcaaggtgactgtttcaggaggaacactcatattgaggtgtgtgtgttagcaaaacgttacttgacagttatgttgctttcagtgctacatacctacgtggaagtaacgccacatttgtgtacaaccaaatttctgttaagatgtttattaaagatattactgtgctttttacatgttaaagtttaatttctaagctgtgatactactcttcaaaatctgggaattcctagattaggcaagaattttatcctcaagttcttttctttgatgtcagctttactttggccacataggcttaatctaggatggctttttagtgtcaaatcaagtgcacattaagtgtacttgagatagattagtgttataaaaggataattaataaaataatgctaccagtctactcgcagtagactaccaattcattgcagtttgcctgggactgtcctggtgctaaaattgaaactcatacttcttgggaaactctttagtcctggggaaatcaagttaccccaaccccagtttcttagctaactccttaattatttttggaatatctacagtaaaaataaagcaatggctccaccaaaataaataaaataaatggacatatccatattgggagtagcagaacaacttgagtcaaatagcaacaaatatcagccaaaactaagctaagccactcactgactgttaacgctgattcaaactagagttagatgctctatgttacggcgatggttcaggccgtgttttaccaactagtaataattacaaaaaaaacacccaataataatataacttttaaaactttaatccatcatgcttagaatgtttgtttcagttctcttaggagaaatattttgataattaatgtctttgcacaaggaaataattgccttatgtagtttttcaatggctttgtatgatgtatctaacaattttatagaatgcctgaaaaatacccagtggtggagtttagctgaaagttaacatttaaaatataccatcaatcaggagctagtgttatacagataagagagagaatggtgtggtggttaagcactgcagtcaggatctttgttgacatcctaccttaccactgacttgtgcatgaccttggactagttggcctctctgaacctcagctccttaataaaacttgaaacatgcataattatggtatttatcttctggcatttctgtttattaaatggtaatgaagtacagtacttaatgctgtgccaagcataaacactcaataaatgtgagccattattattcgcacctaccaaaagttcctagaatagtattttctgacaatgtttcagagtcatgttgtctttttaacttatttcctatccactggtactttttgcagaggatcatgttttaaaaaatgtacaaagaacacaaagaattttgatacaagatgtgtaattatatcagcttaattgccaaagatcaatacagtattactttaagaaaatattggcaggaaagaaattatccatgacataaccctttgcaaatgcccccaaatgggaatgagttaaagaaaaaaacacactaactatatcttaggcaggtgacactgaaacatatcttacctgggagaagaaagtgagatgtatttgttttatctattaagataaaaatgctagaaatcaagacatgacatcccaggataattggtttgcagatttcaaaaagcaagatgatttgtccagaattgccctatatatttattttccaaagtttcataacacaacatacctacctcaaaactagggtactatatacatgtagtcaaaatagccaacaatttgttcctcaaaagtttttcttatagctgtcttgatggcagctacttgactaaataacactttttttattttttgtttttttttgagatggagtcttgctctgttgccagtctggagtgcagtggcgtgaccttggctcactgcaacctctgcctcccggattcaagcaattctcctgcctcagcctcccgagtagctaggactgcaggcgcgcaccaccacacctggctaatttttgtattgtttgtagagtaggggtttcaccatgttggccaggatggtctcgatctcttgacctcatgatctgcccgcctcggcctcccgaagtgctgggattataggcgtgagccaccacgcctggccaataacactttctttaacactattaggaaaatacctggaaaaagcaagatgacataagtgtagggcattgtggatcaaggaatgtcagcatcacatcatcatctaaccagaggcagattgaaagaaaaaaaaagggaggacgacttatatctaagaagttccccacatgaaatactgtaagtgggtccagatgccataaccttaaaaatgtgtatcctaccgtaatgtatatggttttattttctgtatgagacatgactttaaaggtttaggaagaaaagtaaggaaggcatccgttaaaagcaacactcttgacaaaatgagggctcaagatgggctgttttgtgacctcccatactattttgaaaacagctggctggtgattaggaaaggtcagtgagagtcttactctttctgtaacccagttttagaaatctgccacccaaaaagaatggaacaactcttgaaggattccacagtccggcgatcagaccatggtcagcctccgctttcctatgaaagccctacacatcgttcgctcgttctctgctgtattctaaatataacatgaaagcagtaactgatgatcccttttatgttctttattttttagaattggtacatttatgtcttgattaatattgttagagattgtaaagtcctagaaagttacaataaagtactttagtctccttataatttcactctaacatttcaaatccaagataaaataatttagcatgccctctttcctaaacaccttatacaaagtgcttgagagaatgctatgcgtgttttaagagtgaaattaataaaggttttttccctgtagaaattagtgtcattaaaagaaatatatttaggcttggacttttgggtcaagccctttgaatcgacaagttgtttcactgaacttattagttgtgttgctttcaggaagtcacagttgctttcctgtgactttgtgaagtcacagctaaaattcttgaaccaaatcctcttcctaatctgctctatcaaaatgaatatttcattggtgttttatgttttacaagggattacattgttgcttggctttaagtcagttgaattcatcttaaagcatatggaattctgtgaagttcagaatttctcatgatacacttctctgtcatctctgtactatctcttttacagcctgatagggaaatggtttacatcaggcacaatgcatattcgaacaataggttgtgagcagagtaatactaccttttatgggcaatgagacacgtaatgtggcacagcctttcccttaagctatatagcaaatgggacacagcactttgtttctatgcctggattcccatacaatattattttctaagtatgttcatgtcaacagcctgagccttatttcaagcagtatttcctcttgaagtgcagaggaggagaatgaccttcagttccagtcctcttaagtttgattaaagccacctgcaataagtttatttccttgaactctgctgtttaacctctgtcatcttcagccctcttcctctccctgtcggggcagaattggtataatattaataaaacctagcccaggagaagtaatcatcacacttctgctttagaattgattctcttgttaaaaggctgtttcgaaccatatgtaaaattaaatcaacaatgagaacaacttaagaaaatgtggcagtttaattctggcatatgctttcatagcactgtgtgtgtgtgtttgtgtctatataatatgtgtatgtacatataagtaatatatgcctacatattaacttttaggacaatgtagctcaaaattgacatgacttaaataataatgagtagactggataccattagtattgtccaaatgactctcattgcttaatgccactttagttttggggatctgattaatgtttgatatttccaggaaagcagaaatcatattaaatgtccataatggtccaaaaggaaacttttttggttagttaatttggttagttagtaagtaaaagaataaaaaaaacacttttttccctctctagaatttttgtaactagaggttcaaaatgtttggtgttgcgctctgtctgatttcatatttccaatagtggttttcaaaagatgaaaaattttaattagttgattgcactaataagatccgatttgttaacattttggttcataggaacagaatgaagaaccaattaaccaagtacagggtaaaactcagcagtaggactaaaatgtccattttcttaaggaagaaaagaagcagacactcaacaaccattttctgagtctacatggggaatccatataaatacacaagtttttattgtagtgtgaaagaatcaatgcctatcaatttacgttacttaatgaaggtaaattccaaacccagcatttcattttatttggtgtctttcttttatgttgctataaaggaatacctgaggctggataatttataaagaaaagagtttttatttggctcacagttctgcaggctgtacaggaagtgtggcaccagcatctgcttctggtgaggacctcaggaagctttcaaacacggtggaaggggaaggggagcaggcatcaattgcgaaggaaaaagagagaggaaagaggtgtcacactcttttaaacaaccagctcttatgtgaactaatagagcaagaactgactcatgactgtggggaaggcaccaagacattcatgagtgattcgttcccatgatccagacacctcccactaggccccacctccagttggggattaaatttcaatatgagatttggaggggacaaataccccaattatatacttagttaacttgcatgggcttaaagcattcactgcagttagagttgctcctctgtgctcagtggtgaaggatcttccttaatctacccactggagggttttagaataagaaagcctgggtttccttgcagacaaataaaaatctctgagtagggccttggaatttaaaagctttccaggtagttctaatgtgtagccaagaacctttggcaagcctaaggatgctttgtcaatgggagtgatatgtccccccaggagcatgaaagttgatgtggtggtggtgaaaaaattgtaggaatgacaatggttcgtggacctctagagagccacaatagataaacagttatacggcagatccgaagcatttgcatttcatggtggggtggtggcaggagattattagaaaaacaaaagtctaaaaagactccctaggaagtaataatgaaaaaaagttgaaaaacactaccctaaccctatgaaattgctgctatggcttttggtagtccaacttccttccaaaatgcaaatctagttgaatgctcttgcaggtattggtagagaaaaatagcatctttaaattatgttacagccaagtgtggtggttcactcctataatcccagcaatttgggaagcccagatgggcagatcacttgaggtcaggagttcgagaccagcctggccaacatggtgaaacctgtctctactaaaaaaaaaaaaaaacaaaaattagctgggtgtaatgacacatgcctataatcccagctactcgggaggctgaggcaggagagtcgcttgaacccaggaagtggaggttgcagtgagcccagatcaagccactgcactccagcctgggcgacagagcaagactctgtctcaaaaaataaaataaaataaaataaaatgaaatattctattacatgtcaatcactgaactaggggcttctacacatgctatcaagtcgatcgtcattaccctgcacttttttttcagaatacaaatcacaaatataattagttttacttgatttttgtttcaactctattttcaaaatgatttataatgaaagttactgtctttatgaagcttacaaaaaattccatttgaagctatgaggccactaggtagctttagctttaaattgctttcacgttaaataattgtcagatgcatttaaccaagtttgaaaaagatgacattctgttaaaagaaatcacaatagaaaactgccacattccattctcaataatactatttttctaaagaattttagaaaatcatcatttcattaatttgtaataagttttagtgtataacacccacaaaaggcaagtatatttaaataccaatggttgcatataatcttttgcaaggatataggtttgttttaaaatgtatctgggattttattttgttcagttatagcgaggccaacagatcaggagataattaccattgaaaagatagtttgctactcacagttcccaagggtagggccacacaggacagcccagggaaacaccagggtcagtcagaagcagaagcagagagcagaaggcatgggcaagagcctgtattgtggtttctacaggaaggaatgcgccaagcaaggggagtagctgaataggcttaggatttgataatttaaataattttggcaggttctgggttataagaatggtccccaactgtctggtacctggtgctagggtgactaggacagaggaatattgcttcttggagtgtcagagccaggtagaggaggcagtgggaatgtggactcagggttggttggcttacttatgaaaatgtgctcacaggcaagtggactatctctaggaatcacctaagccttggaaggccagtctctccttggttagtgaggtcccacatgccagagcataagaatacagaaaataatattgttaaaacagggttttatagttaataaaaggttgagtctcagaaattcagatccataaactcgattggttgtgaaaaaggagaaagctatccaaatgtcatgaagaaatataactgggtgcaatgaaatctggtccatttctacacaaccagtgtaaagatattgaagtcttcatgccattgtatacataagtcaagagaaattacctatcctaaatggtgaaacttgttgggaggaggcagatggaggcaggattttattgacattgtggtcttgctatttatatctcctgtcttatttctctgtgtgcttggtctatacagacagtgtgtaactgatgggagtttagatactttctattaccacagatcttagtttgtctgtgctgctaaaaataccacggttctggaggctatgaagtccaagatcaaggtgccagcaggtatctgtctggggagggccccttctctgcttccaagatgctgccttgttgctgcatcctctggagggggagaatgctgtgtcctcatatgggatggaaagggagaactggtcccctctagcccttatataaggtcacttatcccattcatgagagctctgtcctcatgacttagtcactgcctaaaggccccacctcttaatacaatcacactggcaattaagttttgacacatgaattttggaggacattcagactatagcaccagacaatgccagtacatgaagaaacagcaagtttgttgggacccaagggcaaaaatctgtagtttcaaaaagtatgaagagttttgttattgttgtagttgttatttttactgctcaacaaaatgaatacaacattgtatcaaaaaaatctaaattttatagtaatataggccatggctgaaaatctaacccaggtatttagtactagcatgttacctttccaaacgtgaatttttcataataaaattcatgttgtaataccactctggaggctagaaataatttgaaaaacgtaggaaatagttgaagattaaaatataaacttttttaagaagctaaagctgaatttgagaatgtggctaagatgtgcaaccacaatgaactttttaatatttcatcccagaattaaacttctccttccagtctcaggcaaaggagagggcccactcttccaaatatagctgagaatacaacccaagtaaggagtcttaaaagggactgacctgagctaggctttctcagtcccttctgttagtctcaacaatcaggcaagacaattatcctctgtcttgaagagtgagtgaagggttatgagagaagtgcatgagtccccaacctcccagctctggaataattacaagcagggactggaaatccccttgcactactttgaagattattgtgaagatcaattacagacgatgtatgcaatctgtctatccacagcaataggtattttcaatggaaagagatagttaaattaatcaagacttcatttaccacatagaggattgttccttcttctgataatgaaatttagtaaaatcacttcttttttatttttttccatatctaagagtaaactttttttaaaattttattttattattattatactttaagttttagggtacatgtgcacaatgtgcaggtttgttacatatgtatatatgtgccatgtgtaaactttttaattcacaagaaaagcagatgttctgtatgaattcaagttacttgtaattatgtattttgaattaactctaattaattttatatacaattctcaaatttcattctagtaagacaggtaaaattggtaaaaatatcagaaataatgtaataccaaactgcaaacatgaatattatattttactatttcaattgttattgttggtattttagttaatcacattggatagtaggtacttcattcatcattctagatagaacaatttagcacatttgttcaaaaatgaggatttgctctctcagcaatgataccaatatatattgtttattaagagctttatgcatcagacagtgtgctggtgctttacaaaactttatttctaatagtataacaacctcggaaggaattattatgataccaattttctaaaggagaaaactgaaggtcagagagataatttttaaaaaattatacagaatcagagtagtggagtcaggattctaaccctgaatcctgcaaattctttcctttaaatatgtctttctgcctttctgtaggagaattttatgtgaaaagaaagaaaacaagattatagttccctcaatgtaactaacagaagtgaccttggaacttcacttgattgaagtatataagggacaggaagacagcccttttttaaaggctcagtatgagtttaaacacgttggtcatcttcacgttgtttggttgatttatccaaacgatgttgagagcttagagaacaataacacaagttttcctgcattgattctaatttgacgcttttaatgagcacaccattgttttcatggtttttttataccctgaacgtctcccttcgtaggattcatcacaattgtaaattctttgttgaagtttgtgtcagattctaacccctgagcagggcagtgatgacttagtcgtatcactgtatcccccattgcccagtgcgggggataggacaggtgctcattacacatccattggctatttgaatgagttaatgactaatggtatagggttctcagaaatgagtggcagaggtattatcaacttcagccaagaaaaggagagactctggaggactcaatcttccttgaactgtagcctttttttttttgataattaaaaattactcagaattgcacacaccatgaggctttcaacactttgtaccatatggaaatatctgttacattttcataatttgcatgtataactgcaaaatcacaatgcttattttagattcctaggaattaatgtagattgccaaagatcaccagtgtgaagctcataagccagcataaaataaggtattgatgagctccagggagaataaaggatatttatctctcttgattctctccagtgaactcctctctaacaaactggaccctctgggcttggtgaggaatagatcagaatgcaaaaaagttggagcaaaatctatgtcatgtgcttcctcttcctctaccccagaaggccatgatttctgcaggtccttgtctatctctgccctcctgatatttagcatatgtctgtctatgtgggactgctctctcctcaagttttgcacctaatttctcttaacattggcaattgccaatgttcttcacatacaggtttcatgatacagtacagttattatattacaaagctgtactttcatttcagtttttaaaaagatttaaatatatgggttttcatgtaatcatattttgtagtctgtatctttaaaacaaaaagtcacttaaaacactgacaatttgcctccaaatgtgccttcaatatcttcattttttaagagtgctttctcttttttttctcgctctttcttttttttccagtaactccagaaagattatgcatgggaaaagtcctagagcctgcttccaaactgcacacaaatggtaatacaaagtgccctttcatatgggctcagcattgccatctagggactatgtaggtctcaaatgtgaaacgatgttcaaccaaaaatgggcatttcagttttaggcaaagtcttgactgaaaataagtctgctgcccatgctgaagccacactaggcataattcaggcataaaactgagccacagggggaaaatacttatttgtattcttgaaatagatgaaatttttacattctccaaatcgactggttagttgatcaagtatccttcagatatagatttatctgaaaaaccattgtctaatatggttttatctttctctctctctttctgtctatatagctatatacaagggagtctgtgagggagaataatagctggcttttacaaagtactttatgtgccaacactgttctaagcactttacacagattaactcatttaatccacacaataagtatatgagggaggtataatatgatccccatttttacaaattaggaaatttaggcatagtaaaatacattgcccaagcccatacaggtaataaacaatgacttgcaccagacagtctgactccagattctgtgcaatttttttttttttttttttttttacacagagtctcactctatcacctaggctacagtgtagtggtgtgatcttggctcactgcaatctctgcctcccgggttcaagtgattctcctgcctcaaccacctgagtagctgggattacaagcactcaccaccacacctgggtaacgtttgcatttttagtagagatggggttttgccatgttggccaggctggtctcaaactcctggcctcaagtaatccaccctcctgggcctcccaaagtgctgggatcacaggtgtgagccggattcagattccatgctttttaacaacatgccaaactgcttctagcctcagagaaagtgaaacataatgggaaatctaaatagaaatgataattcagcaatatgaactgtcccacaatattatgtacttagatggcacatggcctctaagatagcaatagctgcagatatagagtatgcatttcccctacctgttttactgtggattggggtaatcaggggaagattcttaggaagaaaactattgaattgggccttctaaagtggcagaattggatgagagaagtagcggatagaaagcattctcagcaggaagaaaggtttgagccgaaatatacaaagcattattataggagatagtgggaaggccagtgtgcccagagcaacagtctcaagtagagaaagcagatatatttagaaaagttgcttaaatccagatgttacaatgatgtgactctcatgtgaagaatgtggacttcatttcatagacaaagcagagttgtctgaagaggtcaagaacaagagtgggaaaatgaaaaaaaaatgtttgagggaatattagtctggcaaccgagtgcaagagaaataaaggataacaaaaaggaagcagagccttacctggaagttggtgcatttttcaagatgagggcctagaatttaatagatatgtgttaaataaataaaaggaaggcatcaatcctagaaatattattaagggaaaattagtaggaattgtctgagtggttatgaaaacctaagggaaaacatcaaagattatttcaaaaattttaagcctgggtaacagttagatggaatccaaagaaaaagtagatacaaactggaaatgagaggagagattggggttttgaagacactgatttggaagtcatcatcataaataagaactgattttaaagagaaactggggggctaacataaccttaggtaatgtccatgtgtgaagagtagaaagaaaagtctacaaaagtaaccagaaagtcactaaaactagaggctgtggggaaccaggatagcataagcttcatgggtattaatgaaggaaatggtttcaaggtaaaactattgtggtcaaccgttccaaaagttgcaggaagaaaaaggagaatgagaacatagaaaaagacaattgaatctgcaaactcacattacatagcatatacataagtagacttaacttttttaactgtaattatttttattttgtgaaaatcaaaattatttcctattgggtaaatcaattattccttattcttagccaggcaattaatcagcaatgcttatcgagcagtcactatattcagaacgcaagaggaagaaagcttggtgggagttggggaggtaagtgtaactcacagtaaaatcaaatggtctctgaactgtagagcttgggtggctttcactctgatatccttttccttaggcacatagagaatagaggcaaaaaggtgacatggtggctggacacggtggctcatgcctgtaatcacagcactttgggagggcgaggtgggcagatcacttgaggtcaggagtttgagaccagcctgggcaacatggtgaaactccgtctctactaaaaatataaaaattagcctggtgtggtggtgggtgcctataatcccagctacttgggaggctgaggcaggagaatcacttgaacctgggaggtagaggttgcagtgagctgagattgcaccagtacactccagcctgggtgacacagtgagactccatctcaaaaaaaataaaaaaaataaaaaaaataaaaaaaagtgacatggtgataagaagctatggacttgcattataaaccccaagggtgcactggcaaatctcatccatttaatggatcttggaaacttgggtctttatttggaaaagccattccccacaaacacaggaggttcctcccaagggatgttctctgtgatcttccatggcagggacctactgaatgcttctaatttgaaagatctattgaggattagttaagagaagaggtagactgggttctgtcaacacacccacccatgcaattgggggccatgttgcacatctcactggtctttggccagtatgacctactgtgtaagagtatgtgctttggaatcagatctggatatagcctccctccctctccatttaccagaattgtgatttggaaagtcacgtaacctcttcagactttttgtttttttaatctgtaaaggtggacataataaccataaataaaagattattgttaaatactctgttcatgggatacactaaatacatggtagctactctaattattgttttaggagttgaaagaatgttgattgtcctagctgattatggggccttaaatagtgtcacaaggtctccatcctgatgcctttcactatgtaataaaatgacttgcatcttcaaacttctgcaaagctcttccatctccactaatacatgttatcctcacaacaaacctgtaaatgactcagcgtgtctgttattactcctatctcgcagatggagagagagggccttagagagaggcaaacacttgtttcagtcacaacgtgaaaaggtcacagagcctgaactggaacccatggctgctcactcccgtcagagcttgatgggaatagtcaagaatatgcagccacttttcttgccaaaatccccctccacttatgtggagaacacagtgctgagatgagctaattctctagacacataaaagagctgcttgttgaacttttgacttttggcaagttgtgctcatttcttagcctcagcaatgtcttgacacttcttctgctttaacttttcatctttcaagggactttactcttagcatttttgaagagtgggcattgttttcatccttctcacatctcaaaaaatatgtgtcttatgttcgcattagtccatccacatactttcttaagtcagaatattggtttggatgcctgcggtgcgtgtatgttggggttgggggcggggtgatttagcctgaggaaagtgcagatgaaacttaacctcaaatattttgagatatgtaatattacttcaagtcttcttatttcgtgtatgaaatatgcatttcttcagctttgtacaccaagttaatgaattaaagagtccgtgatttaacaaatttcatacttgcttgggaggcttaaggacctagacaagcaggtcttggtcttaagttactgtgtttacccgttgggatcttgtggtgggtaggtgtgagggtgggcaatggaggaggggggtcaaaagcacaacactgcaacccctgatccatttccagtggatgggatgatgatcctgagtaactctgcgttgcaatgtgtccacagttgtgtgagtagagggaaaccttggaaaattctttgcacctcctcctatagtcttcagccatctcaggaaacagactgctttggtcgtcatgtttcttccaggagcaaggtgacttggttaggagaaatgttgaaaatttccctcagatggctccccatagagattttgagcgttaagttctatggtgcccttctagcctctaaggaaccacttctgattttttggtggggagggaggcaagaccaatgtttctgcattctgggcccataaatccaattttactttgattgaaaatgtgtttctctaaggtatcaatgtttacatggtaagacagatgacattttgaccctacatggtatatttctattcaaaggattttaggatctgtttattcatcaattagtaaaggcaacatgtattgactacaaagttgttggtaacactcaatctattatttttacagaaagacaatgaacttattttccccaagagtgaagtatattaattgcatcaagatatattcccgattaccatatcaggacatcaaaggaaagcaggttccttgaatcattactccccacctctttcacttcactgaccaatcacggaggtttggatcctaaacttaactttgaacgtttgctgccagttccaaagaatttgctaaataggtttcaaatgttcgccctttgtaggcttgagaatgaagaattaaaagaagagtgatggttaccattatagtaaaaacttggcacaaaataaaaaagggcttttcttctctctcactttttccaggtgctcacctaaagcaataaatatgtgggtgattacccgtgggtttttccaatcctaacgcagttaaatggcatgaacaatgtgctttttaaaaagatcactgtaaacatttatttcaattcaaggagtatttgtgtactttctctggggcaaatccaagaaacctaggagattcagaagaaacatgaactagaggctcgctctccctggtcatctgtgaccactgcactgcctggccatactttcctcattcattcctcctctatcaccttttttctttttttcacttagcccagcacaaagctatctatcaacttctatctgttggcatctccgaggctctatcctttgtcttttctagctatactgtctccctcggtgtagtacattgactggtgacccacaaaaggatttgtttgtgtcctaattcctggaacctgtgagtgttattttatttgggacggaggcctttgcagatgtaattaattaaggaacttgcgctggagagggcctagattatccaggtgggttctatccttgtaagagacacataggaaagatatgatagaagagtaggaggcaatgtgaccacagaggtagagcttggagtgatgtggccacaagggcacaagtcaaggattgctgacagccaccagaagtgggaagaaacaagaagtgaatgttctcctagtctccagagggatgcggccctgctgacaccttgattttggatttctgtactccagaactgtgaatgaaaaaatgttctgtggtttttagccactagtttgcagtcatttgttattttccatcctggtggaaaataaacagatctaaaagatattcaacatcattagccattagagaaatgcaaattaaaataatgacaatatcactacatacatatcagaattgctaaaataaaaattagtgacaacaccaaatactagcaagaatatggagaaactagctcatattgctggtgagaatgtaaaatggtaaaatcgtaaattgaatgtaaaattgtaaaattagtttcctgtggcaggaaactaatatattaggtaaatgtatctaatctctcatcttcaaattccatctctaggggactcattaatttaaatctccaatcctgacttctcagagtaccatactgagacatctaactgcctactggacatctccgcttgaatatctaatgggcgtctcaaacttaatatggctaggataattttttaatttctaacccctatgctcacaaatctccttgcaagtcttccctatcagtaaatgacattaatgtctcaggcttggggattagacccaagtactccatggctccaggagagagtctaagcagcatacttgattctttccttcttcttaccaccctccgcctaattcctagatgaatcctcttggctaccaccttagttcatcatgtctgattgggctgttatagtcgccttctaatttcctccctgccaaaatttcctcttacctttctccgcagaagctagcataagtttaactcagttcttatccctccatgcctaagatgttctactagcttcctatcgcccctaataatattcaaatttcttacctttgcctgcaacagtggttctcaactgggggctattttaccgccccccccccacccctccagggacacttggcaatgtcttctgaagacaattttgcttgtcactactagggagaacctactggcctctagtgagtagagtccaggaatgctgctgaacatcttatactgcacagaatatccccccgcaacagagaatgagatgtcactagtgccgaggatgagaaaccccagcctacagattccacaggagctgagatctgccttgttctgctgcctcatctctggcttttcctctcattcacctctgtccagacacgctggcttttatttcattcttcagacatgctaagcttgcccacctctcagagccttatgttctcactttgggttgaaacatacttttcctaaatctttgcatctctgcgtcttcattactcaggtgtccgttcaaatagtatcccctaagagaggcattctccaacgacctttactagagcagcctccacccattgctctatcacgttagtctatttttaacttcctatatagctctaatttatcttatattttttgtgtttattgttagcattttctctctaaattcgtaaagctctctaaggtctttcacattcactgctgcctgcctgcatctagactactacctggcccagagtaagtgttcaataaatatttgtcaaatcacggacatacaaatgtaaaacaatagaagataactaagtattcctaaaatgtttggtgccaagagtgatgcaatgtatcaccaggaaggcaggttttttgttttttattttttctagcccttgtccattttcagtatatggctctttagtgggtgttacctccatttaaatcttgtctctactgacagaatgaggctttgggatgttcagcccatcttgttggtcagaaagataaaatttttatctttgaacttattgttctgaagacacacataagagcaatcaccctgtgttcgcttttgctccctttcatcaggtagtagatggctggtaactgatggttcatgtggttagactttgaagcatccgcacagcagcaatggatgaattcctgagagcagatgagctcactgagggactgctttttgaaaaggagctgtcaaaggaaatagagaaaaatgattagaaaagtaataggaaaacaagatgaaactaagtctctgtagccccagggtgatagaaaatagccaatttataaaggaagtcttgttaatgcatctttgacatactatgcttttttactagaggcagatgtgcctttcattaatcagtgaatagctaaaaatgttcctgcaaagcaaaatataaacctagcgataacgggtacctacagagaaggcaaagttgggagcacatggaataatataataataattaaagtattcagttcttactttctaaaaacattaaccctgctaggacattttcctaattataaagggttttagaatagtcctaaaatccctaatttttctaacatttttattaggagaactttgactatttttaatagctccaaagtgttggaaatagagatcatttttgtcccctttcatcatgtgttgagtgattgagaaatcagctagggagattggcaaaatcaagaactgggaaaagcttccatctgccccaatctgatccagtcctgcttccatgtttggaaatggttccttgagcttatccacattttgttggcagctcatatttttggagaatgacaagtgcttttctccttaccacccattagccataatcttggccttggggaatgcaaactgtctgtaatgttcagaatctgagggcaagtaagctgaagaccaggtggaattgtgggtgcagccatgatataagaactatactgcagccacacacagagcttgcctggtggtggtatattttgtcccataatatgaagacagaagggaaggagaggtcatttttcaaagtaatatagagaataagagttaaacatatctgagagtgaactcaatttgtattgcatttaattccaagaaaaaggcacttctataacacctttggtgagagtaaatttttgtgcccaaagtcagatactttccacaaggcaccctaggcaagtgtctatcttattagatcattacagtgagtatacagaccagtagtctctgtcccactgaaatgtgttttcatctaggaaaaataaacttttatcatatttgtaatttcaaaggtgggttaatttaatagcacattcatacaggccaccagactaagaaataattttacctgacttactgatctgtattattagtaattaattgctacttcaatgctgaataaatctgaaataataaggaaagcttatgatgtttagactttttatgtatttagactggactgaaaaacttatttttaagtcttgcatctttaactttttttagaagttggagtcttgtgatgttgcccaggctggcctggaactccttggccttccaagtagctgagtctacaggtgtgtgccaccgtgtccagctcacatctttacatttttttaaaaaaatcagattttattatacttgtttattttaccagttgatcaaattctcagggaaatgaggataaactgatttttaaaaattagttttagtacatgctgttatgatttatttccatagtctataaaactttaattacagaggtacaatctcagatcctctgaccaaacaacttgcattaagctttttgcataaaggcctaggagacttgttactcatatttaaccattgcctctaggcaaactcatagtagcatggaggccacagctgtcctggatacagtctgtcctcgaaatgcaatcaatcaatcaatcaaccttctaatcaaatactggccaggtgatgcatggctctcactgagatgggattgcatcctattaggacgtacatgggttttgcatgagggggaccacccgtcaagattatccaccaggcttttcactccatttaacctaattctagcatatggagcaggtgccaaggaagttttgggggataaagataaataatagatttttcaaaataagagatgtggctgtgtgtggtggctcatgcctgcaatcccagcactttgggaggttgaggcgggcagattacttgagcttaggagtttgagaccagcctgggcaacaggcaaaaccctgtctctacaaaacacacacaacacacacacacacacacacacacacacacacacacacacacactagccaggtgtggtagtttgtgcctgtggtcccagctacttgggaggctgaggtgggaggattgcttaagcctgggaggtagaggctgcagtgagctgagattgcaccactgcactccagcctgggtgacagagtgagagcctgtctcaaaagtaaattaaaaaaaaaaacaattaaaaactgagagatatggaaaaaatgttatctgagaaaaccatcaggttttatttattagggtgacatactatttctctctccctctcactctgcctctctacttccacctgtatctccatctttctctctcttcttccctcccactctttgatttgattttttttctcattaatcttaggtggtttccaaggaagaaagtttacggtaaagccattcatttatttattcaataaatagtaactactgtctgttagacattgtgctggagatgtagatgttcttacaaacaagaaaacccctgctatcaagaaactcagtccaaaggactgaaaaaaagacaagaaaattaacctttatgtggaatacatagtgtgtcccaggtgttagctgggacctcctggctcgttgagatctgactggaatcagcacaaagcttccatttcatgtcctttcgaagcccaaaggctgctcccaagatttctgttgcattcacagtcagctctgccctgacttcctgctttctaatgtactgtgcatcttgtagctgttcctttatctctgtcttggcataaactcaagcttgggaaacaactctttctcatctattctccctcccctacaccacacacaaagcaatcataaaaaccaagctgataatatattgcaaaaacttgaactgagagtttttgggtcatgggagagcacagcaataaacttcaaatgacagagggcacattcctgttatgagtccatttgccagcacccccccaccccaaccagggccttctcactgtctgctttaccccacacagcagccatatgcctgccaatcttctcatccatctcccggttctactcctcacatcatccctcctgcactgcattctaccctccttcaagctccagctccaggatgctcttgctgtctgttgtacagagtaattctgttcttttcatgcatcccccaaattcaaatccaggcccacttttttcatacctaaatccatcttggtgcttgggcaaggagacttttatgttccaggatctactgtctagcctccatagaaggcaattatggttacacagtattgttttttctccttctttacttgcactatgattcatttattcagtcatttgacaatatttactggatgtctgctatgtatcaggcactattatcggtgctggaaataaaaccgtgtacaagatggcacaggtcctgtcctcatggatttacattctgggaagtacgtacaagatgatatcaaaaagtagagggggctgggtatggtggctcacatctgtaatctcagcactttgggaggctgagacgggaggatcacttgagcccaggagttcaagacccgactgggcaaaatatgaggccctgtcactacaagattttttttaaaaaaaattagctggatggagactgaggtgggaggattgcttgagcccaggaggttgaagttgctgtgagccataattgcaccactgcactccagcctgggtgacacggtgagaccctgtctaaataaataaataagcccatacctcattctgggatgggagactattgtggattatggaaagctaagtctgataggacaaccaggattaatctaggtggatcggagggactcacgggcaaaagttggcagcaaaattctcaaccattcatttgagtggatagaaagaaacgggaaatagaaaaagtggtttatttgagaaggcattcatcatcgctccctctggctcctatacctcaatgctcaagcaatacctttaaagcagaattgaggtatgagctctctagggagaaagaaaaggcagtctgcctccccattttagcttctgggtagagacgatagatagaataggcttgtttgagttggtttgtctttcccagaaaccctggagcacagctcccccacttacccttgtaaaccccaagggaggacttcttctatataatcttgcctgaagaaggaaagctagggtatggcagaaggtttggtcaagatcctaaattgctgtgggatttaggattggaccccagggctgctgctagttcatatgaagcatttataaaaatttaaattatatagctatgtatcatatatataacatatatatacacacacatacttctgggatgatataacccaaagctactgttttacagggcttggcaagtgaaagacccccctcccctagttcctcctgtattgggtattacctgaacaaatggtggcctagtttgtcccagattgtatagattttactaatgtaggttgaacagattgatgaagtttttaaagtatctgaatctactcatgtacttgaagagcaggtcagcaggtccttccttacaaagctctgaatgattagttaataacatggtagtttttaaggaactgtacctcacagtaagtacatctttttcctctttatccagttacttaaaatgacagtaataatagttaaccattattgagcataatggatatgttccagacaggcactaaatagtttacaaagattaattctatgaattcttataacaaccttataacacaggagtgtactattattcccttctaatatttcagaaaacaaaggtttcagtggttgaactcagctactgagttaatttcaagcccattttagctcccactctatactgcccattttcttttttctctcccaccctcttctttctttcctctacctctgtctccctataggaaataaaagtctgcggaggaaccacgtaaatatgattttcgtcgagccacctgataactctacaattgaccttttagctctgacattccctgagactgagttttccaacaaacaacttctctttgttgtttgggttatgcttaagagccagcgttctgaaaatcctggcttcaggtttccaaactagcaggttgtgctcagagcctaatccttgctggatggtagcacatttcatcacacaaaaaccacagctcctcttggtccttggcctgatgctctgcagcttctttggccaactcaactaaaagtgcagtggggaagccccattcatggtaatttccagagaaccatttgcctcacttggggaaacgggtatagcacaatccctgatagtttctggacaaaaaggttccatgttttcccctatgcttttggcatgtcttggatgattccctttggtatgagtcatctccttaagaaatcataagatatacagcatttaactaaagtttgtaacaccagattctctccagaaggtgttttccttgatttggctttttaattcttcttgatttgaaaaatctttataccaaaaaaaaaaaaaaaagtcaacttaaaacatggacctatccatgcaactttaaactttattagagaatgtcatataatgaagacatacagctattctataaaatgtctaactatggtgaaaaaatatgtgacattcaatgtattaactttcaaataacatagcttagtgctcttggttattggtttccaaagacttgctgagcatttccttgtttggccttggaagaatttgctctgggatttcagcctggcccttgacttgctgaaaaaccacaagatgtagaacaaagagagcaggctgagaagccagttagtgaaaatgaaagcaagaggtcctggcctgaggcttagtgtgtgttcttgaaagaaggaagttgctgcagggtcaggagaatgtcactggaggcccttgcacttgctaatgccaatcagacctcatgggctccaggcaaatcaacaaagtctggagacgaaatgtttgaatgtaactgttacagcaatgtcctggctccacagagatgtcttttctcccagaggttactgtttcaccattaaccatttaaccattttctcagccactcctgagctccagtccactctcccaactcagtaggaaaagtgagtgacagattttctaaattagagcccagacttcgaaaggtcacagctaagaaagcacccataggcatttgccttgccatttagtaaaatttctgaccatgatacagtgatggggcaatctaagaaggaaaggggactggatttgtgtgggtttgcagaggttaaaagagcagtgtcttctgggagtccctggtggaggagtgatgggtcttttttctttttaaagaactttaagtatatactgacttgcaatgggtagagcaatttttaaaatttcaaatgaatggcataactcccttgtggaggcctctcttttcaaagttaaaaacaaatttttgcagaagcaagctcagactgatttttgagccctcctgcattttccaggtggaaattccttggcctttgaaccctgactaaaacgtcagagattataaatctaactgctaagtattatgaaatatagcgtggcaaaacaaaaacgaaaacaaaacagaacgagaaaatccacagaacgagaggagtgaggagaccactgtcttagcctctatgtagttgagcaagtccaggagtctttccaggtcagttaaaaggagggacacgaatcattagttaacctcaaggggcccttgcagctcctaaattgtatactcacataaacacaacactctgtctctggtgggttaccactgttttatgatatcctacactgtacagctaagttttggaccaagtttacaaggtagtgttactccctaaaacatttttctgatatattaaattgaactctaagtcccagaaatgctacatagaaattacattgcactttgtaaaagttgtatatggctccaaaactgcattagagactaaaaatatatttccaaactcttacatgcatggtgttcgtttaaaatggaaaatgtatttgtaaaaaagtacgtttctctcccgatggtaatactgggtttatattatccattaccagtgctttcactgccctctgctgctctgaggaggtgtggagcgccagtcttttatatcccattggagaaggccaacttttcatttatggtcatgattattaatgttcactggcatattccaagtgtaatactatctgacttggaaaatcccaacaatgaggtagccaatggcctgaaaccaaagaagcactgtgttcctgtgaaccaggactttctaaagtcttctggggttttattaagttctgggcgttctttctataaggtcactaatatatgaaaatagctgttattttggaagttgattacaaggttttttttttttttggtaaaatatcagttattgtttaaaacatgaaaaattagtagaaatgccaacaaaaatgatttgagatgagaacctggcctctttaaaaagtagactgaagtgtaatagaatttcattatgggaatgttctattgtttgcatttaactattagatgattagcataaggaaaatattgagcactttcattgtttcaattatatttttctattattaattaacagcattaggtaaaatttctgttcattgtctaggacttctgtttaataatgatagcaaaaattaataatcgacatatatgagccttcttggaaatgtacttgtaatttgtactcactttccacctagcaaaagctttatctgaaagctgttttattcctgaattataaattatcaacagatttcattctcttaacaattatctgtcaaatgcctaccatgtaccagacataagcatgtagatgaataaactacacttctaccctaaggtgctcacattttattcagaacaaaatatagataaataaatgttttattgagaaatttccaaaggtcttgctatcatatgtgccaatcaagagccccagaagtttgattgtttctgatcaagatctatgacacagtcactagtgaataactctgtcccttagtactctttaatattcactaaataaaacaataagtttgtatccctccaatttttttactatataccctgtaataacttgatacctcccttggataagatgcatgaatgcttttaccttaaccaccccacatattatttacaaatttgtctgtatatgatagaaagataaatatacttcccatagcagataacctcatttcattattataaagggactgtagtagaaaactggtcttgctatatccaattactgccaaaatagagaaagctacaaacactctagaaccaaggtgggtggatttggcctatgaccacataggctttctaaaggttcccttcatctcagaagcatttgcacatgcagagaagaagtccttagaagaggactagaacacggtgggtgctttataactccttgtcaataaatgaatgaataaagtaatcaatcaaaaagatcactttagtttttctcagagaaatgtcaacatgagttccagaggacacagaatcttttcatttgttttgacccccaatgatactttgtctccttagacaggcttgttgttagaccaacactctctggggtggcaaaaagctggggtcactttgggactgagcacattctggtgctagtgaaaggtcccgtgagcaccttcgctccttctctccctccgtgttaaaatgcaatatgttattctttgacatgaagatgaatatatgttatatttgatttctgagatttgctcagtgtcttaagttagctgttttggctaatgtttagtaaattactctaaacaataagcagataattattatgtgtcttttaaactgaaaacaaagcgaacccatgactcttaagaacaaggagccagaatccatggatggttatgttatgccagtgttttcaagacagcagaggactgggcaactatctcaaaggtcccaaatgttgaaggcttagagtagctctcctacatcccaccatccttttaggctttaacttgaaatgatcagttttactcacaatgaagatgcactggacaatgtgacttagacctgaggctagaatggcgcttccatatcttttaggaattaatgtttattacattaaagccaatgggtctccagtgaaagggcaacctgacttattcattcatagacagcaaagctggcctggagaacaaaagctagctgggcctgctagggcagggtttgcctactttctgggtcctgaagcacaagtgagcgcatcatctgtgaacacagtggtctgaggcagtaagagaaagacctggccagcttttccttttcaatgcagtaaccatggtctctgaaaaataatggctcaatgactcagtctctctttaatcaaattagctactcttcccatgccgagaagtgacaggagagatccagaagtgttatgttctcccatccatgagaggggtggacattccctcttttgagaaagtgtaagaaggaaaataatggtttcttcaacatcacataattctacagggatagacctcatagtgtggtcccagtgagcgtcatagtactctacagtggtcttgaacagcttcgtaggcttacatgtagaactctatttaatctccacagaaattctatgtaggagttatcctaacttctgacgagaacttcctcagaacataaaagaaagagaggagacagaataatatttaactatacttataaaaacaattctgaggccgagtgcagaggctcatgcatgcctgtacactttgggagacagaggtgggaggatcacttgagcccaggagtttgagaccaacctgggcagcatggggagaccctgtctctacaaaaaaagaaagaaaaaatagccgggtgtagtggtgcgtgcctgtagtcccagctacttaggaagctgaggtggaaggatggcttcagtccaggaggtggaagctgcagtgaactgtgattatgccactgcattccagcctggctgacaaagggagaccctgtctcaaaaaaaaagaaaagggaattctgagatttcaagcagaatctgattcccttacatttccccaaataggaaaataaaacactttttatgtatttttttcttttcctccaagcccttcaaactgtaagggcagtttgtctaaactaactcagaagggaaacgagcaaatttgtctcttaggtgctagctttgttttttctccatcacttctagcattgtcctcttaggattgttgtcaggtttacagagtcagcaagggtgaaactgttttgcccactgcctacaattttaagttatacatctctaagtttaaatctagttctgtgaccttgggcaagctacaaaaatctcctcaaagttcagtttacttttcatcacatagtgagtgcttaataatttcagtgtctttcatttgaaaattggaaacaaattagatattacaggatcagaaatacatattttgtaagctggctatccccgcttgctcacctgctttttctccccattcacaccactttttcacaccaatggtccccacttattataactcaacttatgatgtttcaactttacaatgggcttatacatgcattaaatgcatttttgacttatggtattttttgatttatgatgggttttgtgggacatagtcccattgtaagttgaggagcatctgtagagtgaaaaacgtttgaatttttgagtaagtcagaattatagaattagtaattctatattattatgtgaattctgttaattattatatgaattccatcaattatagaattattaattcaaggattctattatactattattaaaattatagtacctcaaatataagactttctcagcattttaaaaagtagttttattatacatatatacgtataatgattctagtaaggcacacacttgcactaagtgtgtgcacacagaggtcagcttcctttcacggtggtgctgatttttaagagaaagccacagcatagcacgtatgatatgatactggcagttttcgtttctgtgatgagtgaggatgaattaatccctgtgcatgtcaggtttggctaaccaccataaaaatttcccttcaccaaatgtaaatatgtatcttgccaagtactttccacttactttttaagcttcatgtttttattggaaatttaacccatgcgtgttgagttatttactgaactcggaatactgttgggcaaatgccagttcatagccaaaaaattccctccccacaaaagaacccaccataaatagccacatttttttcttctttcctttcattttcctaaccacaattttggatattaattagtatcagaactaaaagaagcctagtttggtcctgaagttacataaaagctatataggctacaccaatcagtagccactggacataaaacctaaacaaaccccactgaaataagcaatctaacatcactcagaacatagtttaacacaagtaaattcttcattgacctgttttaagattcttctttcttcacaaaagcaggagtcaggtattattgttcccattatacagctgaggacgctgacttaaatcatcaacctgcttatcttggtcatatgattttaatttttgaaaagagagttgagaatgagagttaaacatagctaaatattaaacctggacaataattatgtttgagctaagaaaagaggcatttctacaacacctttagtgggagagtaaattttagtgctcaaagggaatcagccgtagcaagtggcatctgtagcatttctcagtgggatgagatagaaaatctcacacaggtattgtatctcaggccttagagattccatacctagttgtagtggtggctctttttagagccaagttatataacaggctttcttgtttgtgaatatacagtccatccttgactctcttgcccatccttggccactggcccagcagaggcctagacccagaatattgtggaaaactggatttcttgccagattaggtttgacttccctcacagttcacttgtccacacctatgacttctcccacatctatccctaattgatatgttcagccttgatttttcatttgtcttctagtcttaattcaacaatttgattgattttaacacatccctttgcttggatacttgctagcaatgttctcacatacaatcaatgttaatactgaaaattttgaaaagagagctgggattttagggtttctttccccagattttgattctttccctatgtttctttcttctaccaacagcatcaccattattaggactttagattcatccttgacttctgcttctctacataccctatctctcactaaggtgcagtttgcttcaaatgttgtctcttacctccttcctggggttattacagataactctaatccaggctctcatcacgttgtttttgcagaactttaatggtttccttgtttctctatcttcagtcatctcctgtctagtccatcctacacactgactaatctccctagagtgcttacaaaccaataataatttctcatcactactggatgagagccaagtgttacattctggcattcaaaactcttttcaatatggttctaccccagtaatccaaccttactttcaataacctgtcacacacaccttgcacccacgtgaggccaccctctgcacctccaggagtacaccagactctttcccaccactgttctgtcatacttatcttatgggccacatatcgctcagtcattgggctaaaggagctagacaaagaccagcacacagagtaacaaataatttgggtgacagatcccaaaatctatgtagtactactgctagaaggaagactaatcaacaagtagaatagagtttgggcacctatggcaacagaaaatttggggttgtctgggcaagaagttcctttcagaaaaagccaagctttaagagtgggaataggctggcatatgaatgacaaacagagatgaaggatccaatacaaccattatgaggaacttaaggatacacacagacaggacttgggatatctactaacaagtggtagcagagtccaagcaatcaggcgaaattcaagagcaggactttcacccccaggaaggaggaggaggtgcaaggggaaattcctgtcatagaagagctgggttaccacacaatttattaagggcacaattaagtcacaaagagtaagacacacagggatatagttacaggattagttccctagcacaaggcagaagcctaatcatcaaaacttggactctggatcagagccaaccagcattaagtgacccagtctcataccccaaaaaacacagggctaagaatatgtgctccacagcctgagagggaatctaccatagtaaatgcctttgaacttgaatttcattctcctgccactagctgtatgatcagacacaagtcccataacttttgtgagccttactttcctcaaagtcaggagaaaaataaatattttacagatttgttgcaaaaatataaaagtgccggctatggagactgccatttattaatagactccctgtcccctaccagagcttttgaaatctttcttgcccaataactggattgactctagtgactttgtgtccagaattggtgggttcttggtctcactgacttcaagaatgaagccgcggactctcgcggtgagtgttacagctcttaagttggcacgtctggagtctgtcccttctgatgttcagatgtgttcggagttttttccttctggtgggttcgtggtctcgctggctcaggagtgaagctgcagacctttgcagtgagtgttacagctcttaaggcagcgcgtctggagttattcattcctcccgctgggctcgtggtctcaagagtgaagctgcagatcttcgcggtgagtgttacagctcataaaagcagcgtggacccaaagagtgagcagtagcaagatttattgcaaagtgcaaaagaacaaagcttccacactgtggaaggggaccctagcgggttgccaatgctggctagggcagcctgcttttattctcttatctggccccacccacaacctgctgattggtagagccgagtggcctgttttgtcagggcgctgattggtgcatttacaatccctgagctagatacaaaggttctccacgtccccatcagattagttagatacagagtttccacacacaggttctccaaggccccaccagagcagctagatacagagtgtcgattggtgcattcacaaaccttgagctaaacacagggtgctgactggtgtgtttacaaaccttgagctagatacagaatgccgattggtgtatttacaatacttgagctagacataaaggttctccacgtcctcaccagagcagctagatacagagtgtcgattggtgcactcacaaaccttgagctaaacacagggtgctgattggtgtatttacaatccctgagctagataataaagactctccacgtccccaccagactcaggaacccagctggcttcacctagaggatcccgcaccggggctgcagctggagctgcctgccagtccggcgccgtgcgctcgcattcctcagcccttgggtggtcgatgggactgggcgccgtggagcagggggtggtgctcgtcagggaggctcgggccgcacaggagcccatggagggggtgggaggctcaggcatggcgggctgcaggtcccaaggcctgccccgtgggaaggcagctaaggcccggggagaaatcgagcgcagcgccggtgggccagcactgctgggggactcagtacaccctctgcagccactggcctgggtgctaagtcccccattgcccgaggccgcagggctggccagctgctccgagtgcggggcctgccaaccccacgcccacccggaactccagctggcccgcaagcgcggcacgcagccccggttcccgctcacgcctctccctccacacctccctgcaagctgagggagtgggctccggccttggacagcccagaaaggggctcccacagtgcaggggactgaagggctcctcaaatgccaccaaagtgggagcccaggcaggggaggtgccgagagcaagcgagggctctgaggactgccagcatgctgtcacctctcaacttgaggagacactagccttgtgggtgggatccagccattctcctgatggcagggaagagcttcagaggctagaaatcagacatgtctggatcataatcctaccttgtctgtggagcatcaactctgccctatagaaatttctgcattatgtaggccttctttgaacgtatatcatggtgagtagtgcttgaccttgtacagtgttagcaatcccacttttgacatctctaaagcaaccctgtaggtttatggcattgccacttataattttgcaaagacataacttccactcaggagttctgcaagcctggttccaggtagtaggttactagccaagtgagtgaacccagcaaataggacctcatatatagtccaacatagttttgttgttatcaagttgccgttgcatgaatattttatgagggaattatatgctactgtagaatttgtggattgggaattttctaagatctttgggtgaattccttgaaaacgtcaatggcttatgatgtcataacttattgattttctagttgcaacttgcttcttggccagatttgcccatctaaatttcaagcttctctaggaatgagccaagtcacatctttccctttgttccccacaatttagcccaaagttgccctcaaagcaagcatttaacctgcagttgctgattgattgaattactgtatcttgttgtcattttatttactttttagaattctagataatcattttctctaattgttcagttgcatcaaaaataaaatatgaccgtttccctagcatagtaaaaagtgcagtaaaacacaaaagagttgggtctagcattaattttttgacaagaaaaacatgacaaaccatttgcagggaaacttcggctataccttatcctcgtcaccagttggcttatgaataatcagggtaatttatattaccttgttctgtttactatatatatgtgtattccaatggattttccacttgtcccaatgatttcctgaaacggaaaaacattcaacttcatttacaaggtaatgattatcagtgcccaatcaaatctccctgcttccagattttttaaaaaatgttatttattttgagaaatgatgccaggactttaagactaatcataggtacaaatatacctgtgtatttcatgtgaaatactcctgccatgacacacacacacacacacacacacacacacacacacacacttagcccatttgttgaaaagtgcctgtaacctttttatgtataggactcccttgtccaacttattgttttatcctatgtagtgcccttgaattgaattctgcttttcaataacactggcccgcacacatagcgcattcttacatcatttctgatgccattgctctagttgaaatctttattgtttaacacctgtactgatgcgatatactccagaggtgattttggatcggcctctttcgctttccaatcgttctgtgcattttgctttctggcttgcagctccatggcacctctcatctccttagcacaaaacaaaaacacccctagaatatggctctgaccttcctgtccagacttgccttctactattttcccttaccctccacagtctctcctgcttagctatctcttgaatagtggctatgctttcctactgccgtagcgttgttttgccagtactgcttagcatcttctcccttcctgtggaaagaaagaattttgtcacctacaaaagtctttgtatgctgtaaggccgggtctcaaggtaatttactttgtaaacccctttcctgagccaatgacctaaaatctcaccctcagctctaagtcagaatcatatactaccatcttgtttatcaagtacttactattggctgccttattttctagttgtttacacatgcaactttttactagattgcatgcactttgtgggcaaggcctatccctggcctaactttgtatttccgtactgtttatgacaatgtcttgccaatgatatgtgctcagtaaatatttgttcactggttggatatcctttcattatctatactatattttcagcacaatgacagggtagcaacagaggcatctattgcaggaggccatacaaattgtacctcagaaattcatataaccaggaattatagtctgagcaattactttaataagttagaatctctctgtaattataggttacagatggtgacataaaaacactaggaggtcaggaagtttcttccgcactcagcatacttgaactaaaaagagtggacatttcataattctgagcaccttggtctattgcttggtctgtgcctcgtgttattctcaagaaaggagactggatctcaaccatcactcatccacacttgtgttatctttaagcactgtagaggaaaaaactcttttggagtttgaagaataaagttggatacattgcatagtatatgcggtttttaagctaacttaaagggaaagcttcctgaatgaaaataaatcatattagtttaatgatggctgctattaataatgacatatatacccatatatagtatagtgtagtaaaaacttttcatctgttttctggaaatcttgattttcaactctttctaatgtatttttcttttgggggcccactcagaccttacaatatgtcttctagaggcacagagtgaaaagccttgttagtctgctgatgtgccttcagaccttctccggactattccttgaccagaaccatcccttttctagctggcttttctggtagagtctatccacactcctagaactgtctactgtttgcttggcaaggtctacctagatccttccttggcctgcatcctcctgggagctgtggggtcaccatgagccttgttacttctttcttttccccccttccccagcacacacccacacatgccatcattccaccgactggactaattttatcagaaactagacttgtaaattaacagagacatatatgatttcacttacaatttgaaaaaaaaagaacttgattaataagtgtcagcatcaccattcagagtatctataactatcacagcataaagtagctggaaaagaagcacatatatagaatccagtggttttcagattccaatttataaaatggataaaagtgaacctggtttagttaaagaagggagggaaagaggacgctgcctcttaggcctcatcctggtggtggcatgtgtggcatgccatctgcacataagcctatgaacccctaatctgagttacatgaaacactttgcctatgtggaaactgagtctggaatggttaagcgacttgctcacagtcacatacccagtttgtggcagagctgattctcaatctcaagttactaagcacagtttcctttttctgggcttttcccacagcaccaaataactgctagataaagcactctttcctgctcattgcgctggtccagtttatctctgtgcccaagagcagtttagaagaactagcattttccatgcaaaaatctttgttgaaggagattcatgattaactgaaatcacccaaagtaccacaaacaatgcaacaaaccatgaaggacagcacagcgtgtgtttttatctgacccatttgttccaggatgggctctctagttgaacagcctaacagccctgcaaccaacctgtctcataagccctgcacagaacaacccagcagaattcctaagcctgctcacataaacaaccagagaagttaatcataggcatgagagacttttggtggtggccaattagagcagaccccccacagagcttcatcatagggtagccacgtcaatgtcaataccctcctccgtgcaacaatccttgtgattaatgtaattaccataattactgacctctcttctgagagtcttggccacatggaagagttgaatgttttccctgaatgcgttgtctccatacaatgtatgcccttaattatagaacatgatgtcataagttctgattagggggttgccctagaggagctgaggattggccccaaaggcataagggggccagttcaactcatagcccaccctagtcctcccggtcacatgcaggtagccagttacttggtaattaacaaaacaagcttgtggttgttgctgtcgtccattttactcctatgtcttttggggccttcttgggaaataaaggcttcctttttcctcatgtacctcataattattgtgccccagaactgcacataattattattatttttccattcaggagttaatgcttcagccaaacaggtctggacggaaacccagtttgcgttcagaggaaaatagttgactattctcagactagaccacttgagggcggcattgccttaggagagtgtgttttgaccaactaatacataacctaaggaggaaatatgcagcgtgggtgtcacaggcacatcactgtagttcagggaataaaaccacaaaaaatgagaacatacttccagggagtcaactcacatttaggaatgaaggaataaatgtctaattttaaatgtggttgcaaagttttttttttacataacagaattgcttgaggcaggcgcgctgtaaaccatttatatggggagggatttattctgtgaaatgaagtgctattgaaaaaaaagataatgtccagtgcagtgtaggaacaaaaaaggcaaactaaaatatattgcacaatgaagactggggacaaaatcatgagtatgtttgcaggtcttcataaccctctcggatgcacatagttcttcaccatggacatgtccccattataacctcttttaatttggcagggagctgctcctttgcctttccttcatattttgggggtcaatccagatgaatgagagaaaataaaagagggggaagagaagagaaggaggatggtatgcccctctgtacttggagaatcactagcggtggtctcagtcacagggagacagactggttccgctcatctctgatcctgccccagtaaattacttgcagatatctttttggtagttttcacaggatgctaataaactgatcagcctagtatgctagagatatttaagttctctttccaaatatcactgcatacatacctaaataacagaccaatcattgatttccagaaacctgtctggaaggcattctacattctttcctttgcttctttttatgggccacagaaagaacacgatagttcttgaatacatttcccagattgtccaaagaggtcaaactcttaatgttaagcacagttcttttgagactgtggttgtgggggagaaattaaagaaagatctggaagctaatggaagctactcagatgagtagcttctttagtgcaacctcagctggaacgtcagtgactcttgaaaattctttcttccctcccaagtcaatatcctatcaaattgctttctgtatttttttgcaaatctccaaacagaaactcatggaacacagaggtaatcttggctactttgcagagatggccaaggagattaggtgtgaacttctccggttttcttcccttcattgttaactttgcctttattcatccctttcagtcttttccaggatcttgttccatcaaacatctccctacctccacccttttcttttcaaccttttcctctgtacttaatggggaaagttctttacctcatttctctttccagcatctattctctctgcctccattcacactagattccttgaaacaggtctacaccagacacccccatgctctggccttcctttactatttcccttgcattattttctccggaaactaccctttaaaccccacccatgagctactcatctccaggtggctcaatggtttcttctcagctcttcctcttagtgcattacattcctattaccatgatggcagcattgatctaaaatcccctgacctctctccctttgaaatactttcttcatcagaattcaataacaagcatactcactcgctgaacatttctccttagtctctgttggccccacttctacttcctccttgatataagaatttttcagtactcagcccctttatctgctgtgttctttactgagctcatagaatcctacaactttaactaccacctctttgctcataactcctcagtaatatttctaacaagctacgtgcctgcccttccaacaggatatttgtcatttccacatctatgtcctatatcataggcaaacatttccaaaacagaactcatctttcctgcacagcctccccatatcctggtcccaaactgagttcccctccttacctttcctcaactctcaagtcaaaatttcaactatccttgacttcccctttgtcatttgtaagttgactggacatggggagcagaggattatgaaatgtcttttcagaatcccccttctacatgcgttgagagtactctatttccagccttcatttcatcacctagacttctgaaaagatcaccaaactggtgtctctgtcatgaatcccctcttcctcattccagcccaaccaatatttggccattagctattttccaaaacagtcctttccatacaaaagaaactggtaacattagttgcttccaaaataggtgactgggagacgcagatgtaagagagagaaaatttacattatgtaccatcttgttcctttaaaatgctgtgccttataaatacattagctatttagaataataatgtttagtttaaacattagatattatctgtttaattaaaaaaatcctcttcagttattcttctgctcaaaatcctacacacattgcctttggaacaaaatcaaacttcatcatatcgttcaaagcccctaaaatgacccttctacttttccctttactctgctttcagtctgccctctgacacactccacaggccagacacaggccagcactctggattctcaggcttccaaacctttgtttaaaccattccctctgccagtggtgtctttcttcatcccaaattgaagtcctaccttccttccagcttcacctcagatggcaccaattccaaagtacttttccagatcccagcatttagaactactccttcccttctgtaagtttcctggcctaagcacttgatgagtctatcaaagtcagcctggttttgtagttatttatgcacatgactgttcttatctttgtatattttgcactgcttggttcaatgcatttcacatgatggatacttgggaagtgtttctgaatgtcattggtcctcaagacactgagaaatccaaaattagaactgtttggatatgagacccactggcatctttttgtcatttactattgtttgtcattgacattaagaagtacaaagctcaatgggttccctttaggtcaatgcttctcctagtgtggtcctagacctggagcacttgctaatgtgaagattcccaggctccaagaaacctactggttcagagtctctggggtaggatatggcaatctgtagattaaatacgtatcccaagtgctccttacgtacaccgaagcttcagagccactgctctagtaggatgtagcagggtttgggggaaggttgtagaggcagataatccttgaggtttgatcctgcttgtctgctcagtgctccttagcttctgccagtccttcagccctgctcctcagctgggttcatgctcctggctatgcctcgtgctcctggaacatgatttgccgtctgtctctcctttcagaagacagctgagctgtcaagctctgactccctgtggaagctgtctggtgctggcacattttgatggaagagggatgcctcagacttcaacaataatctcatcttttttcagtcttctcttctcccctaaaactgctgtaggcaagtgactatcctctgtgttgtagacaggaggatcctgtgtcaagaaaacattgagacttgcctaagccactgacatattaatagagttaatgtcaaaagccttgtcatccaactgggcattctcagtgacactgtgtcaatcagcaagtcaatcaattaacaagtgtttaatcaatgccaattaggcatctagaagtgtcttgtttaacatctgctggctgggctgggccctgcacagaacttggttcagtgtccttacagtatccctgatcgaggatctaattctgtaccatgtcatccacagttggctgcctttgtggtcacaccaggttgctgggctatatttcatgtgaacaccaccatttactacattattctgtaggccctaatgaagttaagaggagcaggatacgggggccagctatttagccctccgatgtgaacaactcttcagcaatcttagcttgatgttgtacctctcactctgttaggttttccttgcactcccattgaattaaaattagaaattctgtggacaaggatgtgactctatgaaagaaaccttcttcccctctgccaatccatatacatgtaaaatccccaacccccagcataaatgacctttgttctcacaattttaaatccttttataggttacaattaatatttaaacccaccctatggtccccaaacctttctaaaagtaatcagcccataggatgccctcttgcaaaaggctacattttctatacttacattttcatttattttctaatagtcacagtggaaactgtaaccatgaatgtacaactcagtaatccagttaagacttgcttttttctgccaacttactcttttatgagccagagatagtaaaataagtccgacatgtttaaaaatgccaattcaaacttgaatttctatgccaagaatgttctttgggttaggtcactcagagtactacaaaccaaatttcatgtggttttcaaagtagccccgaaactcgaccttcatctcaattggcattggtgataccaaaggtatctatgagaacatcactggcccatcccaagtttgagagatgataataggcacatgtggccatttccactatatctagtctaggatttagtctatgatttagactacccagctgtattttaaactagtccaaaccacgactggccgcagggagcatagaccttttctgagagggattttagctaataattttacttccacattgttccatcctctatttcaggatgcatgatgtacatactcttcctttttccatctcatttcaccattaaataaatgccctggctgggtcagaggaaccaggaaatagactgttattcagtgtgctattgatatggcccctaaagcctccaacaacttccctatagacatcacaaaatggaacagaaaattctagtggatcaccattgtccattcataggcactgcaaatgtgttatatgtctcactcaataaaccaacacagttttgctgaattatgctaagtcaaagttttctttaaatcccattatccttatcattgttcttggtgaaactgcaaataaataaaacctctaatgagttatttttagatatctaaatggacacaggaaaatgttaattgactcctcaaatttacagaacaagttaataaaggtagaataaaagaagaactagtctaataactttcttctaagactacagtgaaatttattttatctcataacatcgaatgtcccagctaaggaacatcaaggagaaatttgatgcttttcattctttagaatttcactttgatgcagataatgttgcattagttattcttaattttactctcttcacttattaaaatgcctaatatgggccaggcatggtggctcacgcctctaaatcccagcactttggaaggctgaggcaggaggattgcttgagcccagaagtttgagatcagcatgggcaacacaggctgatcgacaaaaaataaaacaaagttccctgggtgtggtggtgagtgcctgtggtcccagatatttgggaggctatttgggaggatcacttgagccctggaggttgaggctgcagtgaggaaagatcatacctctgcactgcagcccacatgaaaaaaaaaaaaaaagcctaatgtgaactcgaattactgcttctagattattttcttcacttagtactgatgcatctgaaagtagaatgagaattgtattgctatttaagtatattagcagtgttattactctgctccatttttgtttttaaaacatccatttttataatcacctactctatgtctaggtctttaacataccttttatatattcttcataacatataagatgtgtataatcattataaccttacagaaaaggaaagggactcagaaatattctgtaccatgtgaagtactttagttcagagtctggcaggtaataattctcaataaatattaaaattatcattatttttcccaaagccacagagctattggttgggagaatttgagctcaaattcaaacataacaacatgtttttgctaatctgcacatgtactgcctcaattttcacacttgatttcatgagcaggaaagttattttagtcctgtttatttgaatagctagagcaaatattgcataaactattatttgccagtacttctaacattaatttatgtgaatgtacacctgtgtagcttgttgtatttgttctattttggtttggtttttaggttttaatattgtacactgtcatgtttttatgaaaaccaataatttagtgttttttttttttcctggggatgggaaaaaggtgttaatggagaagcaaataaatgtgaaatgaaacagttctgccccagggaacagcaggaaacttccctaaaagcagaggttcctaacacaaccttatacagcaggttgagcaaaacctaactctaaaaatggtacttgctttcaactacaagacaggacatttggattctgtttagtttccaactgaagttttggaaagtacatccagcatttcctttagaaaagctccaaggagtttctttacctacgagttattctgaaaaacatttgtgaaaatgtgggcttttatttttattaataaatggccacagctttcattttgggaggaattcaattgacattatgatgaggagtttcaggtccagacatcctgtgtgcccttttctctgtaagcacagctgtgagagctacaggagcctcacacttggctttgcccaagcacagtgccggcatctctgcgaaggttggtggccaaggagcctccacaggaaacatgcaccttcccccaccccaaagtcatcgaatcgcttcagacttgagggtctccacatcttgacagaaggctcaactttgatgaaaacttctctggaagaacactcaactggtacttatggtgaccaagcaggtcttacagttcccttcctcagttaaaacaacaaaaaaagaacaaggtggtcacacataaaacaagagtcattgaattaggccagagctaggctttggaaattgaatttaaaggcctggaactagggatcttaactgcatactttaatgtttaaacacagggcagttgacttgggaaagcatctgagcttggttccggctgcactcagctgctttagcctgctgcccttgccagaagaccctgaatacatttgaaagcatcaggccctggctcatgattatgcctgtgggatgttgtgcccatagcttgagaggaggtgttcatcttctgggggagtaaacagcatgtgaagaggtttctggagtgtaactgggaatagctaaggctttggcaagcttaagactgagtgagagtcagagcctgaaactgtgactcaaattggcatatgattctgaacttgtttgcaccattctctaattgtttcatgtgtgatcatatctccctagcaagcctgagggcatctgaagacagagagcatgctatttttgatttcccaaaagaatctgacagagtcacggactcgttttattgactgacagtcagtgctagcagtgacttcagctgcaagtaaaaaaacagtttgtgttctgagtaataaaggaatgtgtcatatagtcatgcttccatggaatatcattgattcatcatgatagaaatatcctgtgaagcaaacataagccaaatgcacacagtaactgggaatcttgtggcacagacagaagaaataagtggatgtactaagagttagggacttggtggaggaggcctaacttgtgttcacgcagggacacagacagaagctctccaaggagacaacaccaagagtccctgagagtaagccctgaggctgcaaagacccccgtccatcagtagaccgatccacttcactcattcatgtactctctaattcagatgttaaatctttcatgaatacagagatgaatatacatggcctctgcccctaaaggtgagacatatttgtaaacagatacattaaaacatcaagcataatcccatatggcagagtgatttaatgagaagacggaaatggggctggctttgcatacaggttttgtgatctattattggctgtatgacttggatttttttttagcctgttttctcctctgcaagtatgggtaataatacctatcatattggattattgaaagaatgaagggagaaacacatagaactgacagctcacatggtgcacaggatggaccctcaggaaatgttctattcctttctctcacaaagaaacgtgcagtgctgtggttgctcagaggcaagagcaatggctgcctgagaaaaggaggagagacttctcccaggaaatacatctttgcttgaccctgaagaatcaataagtcccttattgaattatttattccgcagatgtttacagagcactattatacaccaaatattgtgccagatgctggggataagatggtgaacaaaacagacatggtccttgttctcatggatcttaccttccagacagagtgacagaccagaccaaacaaatagacccagcaattctgagcagggaggctaagctggataattggtttttgtttgtttgtttgtttttgagacagaatctcgctcggtcgcccaggcaggagtgcagtggcgcaatctcagctaactgcaatctctgcctcccgggttcaagcgatgctcgtgcctcagcctcctgagtagctgggactacaggtgcgtgccaccataccccactaatttttgtattcttagtagagatggggttttaccatgttgcccaggctggtctctgttttcctgacctcaagttatctgcccgcctcggcctcccaaagtgctgggattacaggtgtgagccaccatgcccggcctaagctggataattgtaaccctcaaatgcattcaggggcttccggcaagagcaccaggtgaaagcagctccacatgcagcctgaactgggccaacaggcccttccaagtcaactcctttgggtttaaacataaaattgtgcagctaataccatcagttccaggactttaaattcaacttcccgggcctagttctggcctaattaaatgactctttttagtgcgtgaccactttttatttattttttattattttttgagacggagtcttgctctgtcacccaggctggagtgtagtggggccatcttgactcactgcaacctctgcttcccaggttcaagcaattctcctgcctcagcctcctgagtagctgcgattacaggcacgcaccaccgcacctggctaatttttgtatttttagtagagacagggtttcgccatgttggacaggctggtcttgaactcctgacctcaggtgatccacccgcctcagcctcccaaagtgttgggattacaggcatgagccaccgcacccggcctgtttttgtttttttaattaaggaaaggaactgcatgacctactgctcattataactaccagtggaatgctcttcaagagaagtttccatcaaagttgagccttctatcaaagtctaagattgaagtgattagactttgggagacagagcaggggtgggggagaagaagagaaagaagaaagaggtatatgttgcctattgaagctccttaggcactgacttttgcagagatgcctgaatggtgcttggggcagagccaagtagagactcctgtagttctaacaattgtacttagagggaaaggggctgggaggacttctggcctcatatcatcaaagaatcaatgggtaagaaacagcaggcaatgcaaagggtgagaggaggagcattgtaagcagaaacagtacatagaaatgccccgaagcagagaagtgcttggctgaggaagtgaaagtatagaataaaacggggagaggatagtgcttaatggagttcgactggaaaggattcaggggagttcattccagagtgaacagcatgtgcaaaggtgtagagtcttaaaagagtctgacacggtctaagaatagggagaacttcattgtggcctcactttagcctggaggaaaaagagggcggcaggagatggtgctagggaggtaggtggaggtcagattgtgggggatcttgcttgtatgataagtgaagacatttacattttgttctgtttataggcaagactctacacaggttttttatgtggaagggtggatgcatgatttgattatggtagtgtagaggatggattaaaagtgaagagattggaggggagttcaaacaccaggctgctgaaacagtctgaggaaggactgaaataaaactgtgacaaagaggactggattcaagggacaatcctgaagtagaagcaacatgatgtaagaaataatggagtgagggtgtgatgaatcaaggatgacaatgaggtttccaatttcggaagcacacattccaggagccatcacagtgatggtgccatcacttgtcaggtagcctctggaaagctcccctgtatactcataaaagtgaaagtgacaatgccttattattattaggaaatagttttgaccccaaagaccctctgaaagaatctcagggatgcctccaaggtccttggttcacaccataggacctgctgttataggcagtaagttaggactcctctcaccatccctgagccctctccatgacctactcacccaccaacaacctcataaatgcacttgatctggaattatttgcacctggacttgctattgcatcttaggtttggagatcctgacctggctcagcaaagcttctgaggttgactctacttccatttagagtagtttcataagcgcccaccaattttgggaccctgacttctctgcatggctttacctcttgctactcagatgtggggcatcttctgttgtctacaagacagttccactctggctctgcacaaagagaaagcattctctactctggaccctgggtgggtggttgggcaaagctagattcatcttcttaagaaaactactcaaaccaagcagagtcgatctgcaagataataagagtagatatgcgagttaatgggaaaccagtgttagtccttggaaaataaagcagcataagagaattacttacattgtcaattaaatttttaaattaaattctgattttcggaattaattaaagaaggaagagagagaagacaaacaaaatgtgtatttgtgtgtgtttgtgtgcacgtgtgtgtgtttgtagttattctctttaaaaaaaaatagtgccttacaaagtggaaatgaaatagtaagcatgatggacggtgaggattagccattgtagagaaatataattttagtggattgaaatttatttggaaaccttttcctatagacaaacgtatctcattttacgaggcctccttgatttagtttggtttaaaagtcaatggagaaatatattccatttgatcaaattgtcaagtacagcttgttaatgtgtctgtgtgagtttcaacatatcaccactcaagtgttggatttgtccttgtgtgtaagccacagcaatgtccctccttccttctccactttcctcttcaagcacaagtctcttggcctacaagtttcttagactacagactcccatgatggaggttttccccctatatgacctacagcttagtatggtatttctagatgtttgtataagaacctgtttaactgatttcagagtcttttctctcttcccatgtttttcccccaaattactttttactttgtatttgaaatatttttatgaattttctaaattttaaaggactcttgaatgtttacttatattctgacatgttgaaaatatattccattatcatgtttaatcccaggacttatgatgctggaagcacggaatgatttaatgctttgcctagtcttacctagcaagccagaagagacataggcttaagccggaccagctgatcgtcagtcctatgcactgcccctgagctgattaatagttccttttattactgttgaacatttggttcttctagggggcctctgggtcagtcactaccaccatattaggccacactctgacaagtagttttgttcctacaaagaatctaatttctttctccaacgtgtggcctcctaagaccactgtgctccgctggtgatgcttgagttactcagggaaagaggcagatagccaaaaattcaccaattttagcagaaaaccctgccatcagcgacagctggagcatcacaaaatctataaacacacttgttactcatctgctgtgcctgtaggacaagccaggcatgtgaccactgaacatcttgtagaggagaggtttcctaggcgggtctcctgacagaaactgagatgagaaaaatcaaatgagcttggcgttcagaacattgtgtgttattagttgagccctgttttgaaagaggagacctaccacctaaatgtaatttaaagaattgagagatggagtgacaattgggttagatgcatcaatatgagcactgttaattcaatatatgaactggggaatcgctgagtttgagtactaattggttacagaggaattttctttaaaaactcttaaaaggctttgtacctagcattttatcatctagaaaaaggcaaagttttggtaaaatgcaatcctagtgacagagtaaatttacatcacataaccacaagcttggtagaaagtggcatgttattcccataaacatcttggacatctaaagttaaaaatcgtaggtgttatagaaaaagatctttgtttctagtttttgggtatttaatttttaaaattttggcatttgttttcttatccaaatgcctgcccatgcaagaattagattatctgaataggagataagatgtacttagaccctttgattaaattttcttggattttaggcatataaccatagatccttgtctaatgaatattttttatttactatttttcaaatcacaaactaatgaaaggacatacaaacaaacgtgctctcataattcagttcattcttttagactccttgaatgtaagagcaaggtacatatattttacttccagtgcaattctctatggtatctaagtgccatgaacactcaccagtgctgtctcatgatctaatacccatgattatttgagctattgacttaggatgatcccagcctgtaggtctcatttgcaaagttctttaaacatatgcctttgtgatgaatcaaagtcatttcttgaaaaaaacagagctctgaccagatactatgttagatatttgatgggaaatatatattccaacttggatatatattgagctccaagcccaatatatgtgatgatagcaactattatttactatttattgtatacctatcactgtgatgggtatcttatatacattatgtctgttattcctctcaaaaaccccataagataggcatattatttccaattttacaaatgagaaaaaccaaagtttgttaattaaataacttgctccaagttacacagttagtaagtgaaggaggagttatttgaactcaggttgtctgattccacaggctttgcattcagagtggcagtataatgtgttttgtaagcttcagagtcaaattataagctttgactctgaagctagattacccaggtttaaatcttagctctgccccttaataaccaataacttatgagacctgggacaaatgactacaaggaagtttaaaattgaacatgtggcttacatttgaggtccatgttgtatttctattggatagtgctaggtctggacttttccaaatgctgtctttcattctttatctgtccatgtatctatttatcttatctatctatctatctatctatctatctatctatctatctatcatctatctaattttgcttttttctgtcttgcctctttttatttctttgcccacattgatgctaaagatgtcttactaaacacaatccgatccaggctcttttgtactgaaaagcttttgctagctcctatcacctacaatggaaagcctgaactccattatgcggcatacacaaacttttcatcctctctctacctgtccagcctcatctctctcatgactctcttccttgcacttcacatcttggaaacactaagctgtgctttggttcccaggtcatttcacgcttttgcctttgcacttgttgttcccattgctttgaaatctcctcccctttctggttgcagtgactgaagttttactcatctcccaaaatctaactcagacattgcctcctctagaaaggtttcccaaaatgatcagccacccccttcgtccaccacttttgcaatgcttctgttctttatgaatacttttattacctttgccagatgtataacttgtttttctgtctgccacccctactagcctgagtatacggagaatataattgtatatcatttccatattgataaaaaagtgattgaataaacaaaacaataccttctctcaaggagagagatacacttttgtacaataaaaataaatataacgcaagatgtaagatatgtcataaggccaggtgctcacgcccgtaatcccagcactttgggaggccagtgggggtggatcatgaggtcaggagattgagactatcctggctaacatggtgaaaccccatttctattcaaaatacaaaaaataagccaggcgtggtggcacacgcctgtagtcccagttactcgggaggctgaggtaggagaatcgctcgaacctgggaggcagaggttgcggtgagctgagatcgcgccactgcactccagcctgggtgacagagtgagactctgtctcaaaaaaaaaaaaaaaagtgtcataagacagagcaatcaataaatgtccatttgcaagcagaaaagaagtcaattaattttgacaaaaatttaaaagaaaaaaggccgggcgcggtggctcacgcctgtaatcccagcactttgggaggccgaggcgggcggatcacgaggtcaggagatcgagaccatcccggctaaaacggtgaaaccccgtctgtactaaaaatacaaaaaattagcagggcgtagtggcgggcgcctgtagtcccagctacttgggaggctgaggcaggagaatggcgtgaacccgggaggcggagcttgcagtgagccgagatcccgccactgcactccagcctgggcgacagagcgagactccgtctcaaaaaaaaaaaaaaaaaattaaaagaaaatgtaatgaggtagggaaacattgattgactggctgatataagatctctcaagatggccttacctttgtcagtgtagcatagtccccagctgactctcaaatatgcagattctaaaccagttttgtcattgttcaaacaatatctagggatactatactcatgctacctgaagacacgggacactgaggctaaactagaattctagtttcttgcttcagagggagggaaaaaacatattgataagactgaatacctgcatcttctggtcagtgtgatagtttcccttaggaaccaaatttattagtaaagctagatttgtgagtgtgaaatcagaacaaagtctgtgagttgaaagattcaatagtggatgcctgctctgctcacctctgcagttgaatgcacctgttacttgcaccaggcagagcaaatctttagtctggctgccttcttctctgggcagtacttttatgggcactgtttgtctatgactcttttctaatttctatttctagacaacccattcagaaagacacattctttccttagacatgttaatacctcccattagtcagctctgttctgtgctcagtccacttatgaggcaactttaaacatttctgttctcataggcaacctgttgatttagagttaaccctccaaggcaagccctgttatcttatttccaagatcttagatgtccctgactcctgacagtaaaatagctttgggggaattgaggagaaaggagaggggcgcttcctggagaagacagtgttaggattctgacgggggtggtaaggatgggagactaggacttggttaactgcactgcttgataaccgcatttttcaaaaagtatgtgtcagttatttgaggaaaattacaaggccttgaattatgtaaatatatttttaatatgcacacttcactggcttggtcatattctaaattttgcagcctttttgctgtttgaaagtatgaatttaagagagcgctcaaggatgaagcattatttgtattgctaggactgctaagcagtgaaacacactttaagggcaaagtttcctttctggtgaacaaacaaaagagaattatattatcgtgtaatatcatgtaatatcgtgtgtattttaggtattttctatgtgtctgatgatgagaaaattaatcatgaaaactttaaaaaattgtaattcttgcttcttaggagccagagaatttcagtaaaccagagttaaaacaggcaagtttacatgtctattagttgctatcctgttttaaatgagtattaatatcttagtgcctggttcaaaagttacatctcacagagaaagtcaccttagagtgtgactcaagatcactgaggtctgtgctagtttcagctgtgtcagttgctgtgcaacctttaacagggatcttaacttctctggatctcagttgttctgtctgtgaaaaatagagggtaggtgttttaatgttttcaatctttcacaactctgcaactttgtgagtctgtgaagtattattccaataaatggatcaaagtttgagattaactcttcttcctctccatccctcctccccactccctccctccctctctctcttactctgtttttgtttttgtttttgttttgttttttctttctaacttgtactagaatgtgcagagcacaggaggtcctttaaacgtcagcagagctggacacttgttgaccgtgtgatcttgggcaagccatgtaacatctcaaagatttagttttgtcttctggaaaatggatttaacagcctttacctctcagggttattgtgaggattagagataatgtatgtaaagtgaaatgtttagctgttattattactcatttaccatgatggataagtttttttgtttttcgagacagggtctcactctgtcaccccaggctggagtgcagtggcaccaccatggctcaccgcagtctccacctcccaggatcaggtgatcctctcacctcagcctcccaaatagctcagactacaggcacgtgccactgtgcccagctaatttttttttaattttttgtagagacggggtttcatcatgttgtccaggctggtctcaagctcctgggttcaaacgatcctcctgcttcagcctcccaaagcgctggaattataggcgtgaaccatggcacccagcctggataataagattaaaataaggtttctgcttttgtaaagatagtagagataatatattatctaataattacaatataaagtaccagaagagagatacaggtgcataccaccgcacccagctagcttgtatgtatgtatgtatgtatgcatgtatttatttatgtagagatggggtcttgctatgttgccaaggctgcaaagtaatttttactgagtttatagactaataatacctcttcctggggagtacaggagaataatcaggtgaagggcttcattgatctgggctttgcaggataaatcatatttgaagacagaaggacattctggggcacatagggtagattctgaacacagagaacagtttccttctaatctactaccatcttcagggttttgcactattgcctggtactttttaaaggttttgaagtagagatgttcaataccaccgtgtatttgcccaagaagtcatttgttctctgaagaagctggcaaaagaaaagttgaaggagctttagggaaaggccctttaaacagaaagaagctcctgaccatgggtttatctgggaaaaaagcaactctcctttaataagtaaatcagagtctcattctgctacccagactggagtgcagtggcacaatcatggttcaatgtgagccactctctctgttgcaatgtgagcaagacagccttcctgttatcacactatcaatctttttccaccaggtagcaaggtttggcgacttaatgaggtaataaaaagcaagacactgacacaggtaggggatgtgagatgtgaggcattgtttccttgtgaaggaaaaagaccacttgtaacccactgagataacctgtccttcattttcctgggtctgagaggatcattctcctttcactctttctttgcttttaatgtgaaagaccttgctaataataaatgagagcccgcctccctttgatatgtccaagctgaggaagacttcctgatgactgtcatgtaaaacagcagaagacacccacagacacacagagagaaacagacacacacgagtaatacaaccccagggatcaccacccaggattaataaaatagcatgagctatagttgctcacattacacaggcttccttctcggcaatgtggcatggtgctgaaatgttgtttaaaaatttgtgctgccaccttcataccatggccatattttgaagcccatgacctcatcgctatctgagttgccagggctggattccaggagaaaggggaagggaggtggacaggagagagaagaagcaaagattaacaagttgaaataacaaaaacttttaattccacttcttagaattcaattatgtcatttgcagagagggtccatgtcttcctgctgttctttctttctttcttttctttttttctctctcgcaacatctgctgagacataagtctagaaaatctgtaaccacctgaaaccattcactggggcacaaatctattaggcctagagtttcatatgagtgcagtgaagtgaagttatatttgagctctccatcatagaatttctattccacatggctgttctttctaccctcacactttcccctcaagaggtaaaaagtctctccattttcatacccactgttcgttttctccttggctttgtgccccatggggggtgccattaacatgtgtctaatgtggccatgcccccttgaacctgtgcagtgtcctagccctatggcccttccatacatagttaaaagaagaatggatcaattgacagaaaaaaaatggaagagagaaagaaaaattgcttctccacctcaaaatcttaaatcaaacatagccttgtacacgagacacagatacatttatatatatttatatttagatactgacttctagactaaggacagatactgaaataaaaacagcactttaatattgtccttaagtagatactcattgttaactgaagaaataggtaagtagctatttaacccttcatgtccatagcacatagattatttaatattctacagcagaacttttagaaagtcaaggcaacttttatttgtccagagtttaagtttaaattcacaggtcactcaaatccagtataccgggaagccaaaatatcaaaaatgcaaggatttattgaaaagccatgacgctttttaaaatttagttcttattctttatcaaagttacatatacctagtttaaagagtcaaatagttctagaatacgttttatgaaaaaccatcaattttagatttcccaaaagcaaaacatattctttttacctttgtctagttttcttcttatttctaaaatatacatctgtgtttacctttgtctagttttcttcttatttctaaaatatacatctgtgtttacctttgtctagttttcttatttctaaaatatacatctgtgtgatttcttgatttttctcagttgtaaaaattattcattgttatgtcacaacggaagatgaagataaatagttctgttacccttctccagtccctacttcaagctcatatgattacctagtgccccccatcctcccaatataattatattttgattgaatcactattcagtgcttagattattaagcttagccaggtagtatgttaggaatactttttcctttcctgcataaattattttctcctgataattgacaactgtctttctttttaagattttagttttctaagtatttgtcattagttcatccccaaactcactccatctaactgtcctcctggtattttaaaatatatcaggagtgctatcaatgtcattttttttcttctgagatggagtcttgctctgtcacccaggctggagtgcaacggcgtgatctcagctcactgcaacctctgcctccccagttcaagcaattctcctgcctcagcctcccaagtagttgggactacaggtgcttaccaccacgcctggctaatttttgtattgttagtagagatggggtttcaccatgttggccaggctggtctcgatctcctgaccttgtgatccaccggcctcggcctcccaaagtgctgtgagccactgtgctgggccaatgtcattggttttgtagccatctttcctggagtcttctaccctcctctaatttaagttggtgactctctgccaggtgcacagctatcttcctggagtctcttcttaatcatcctggggatttctcttttctctctcaagttggattccctatttctttggtttttcttcctcttttttgtggttcccttcctccatttgcttcctaagaacaagtgatgagagctgaattttttaagactgggtatatttgataccatctttattctaccctcccacctaattgataatttatctgggtatagcattctaggctattgatttgagtatattttcctctattgtataggccctttatatccagcaatgcttgccttcaattataagaaattttcttgaattatttgatgacttattcgttttgttttctgttttctcattctggaatttctgttatttagctgttgaaccatttgtatgcatcctctctaattttcttagctttttccttttatttttatctttttgtcttgctgtattagtccactgctgtattagtcacactgctataaagaaatacccaagactgggtaatttatgaaggaaagagatttaaaggactcacagttccttatggctggggaggcctcaggaaacttacaatcatgatggaaggcaaaggggaagcaagcacttacttcacagggtggcaggagagagaagtgctgtgaaggaggaactgccaaacacataaaaccatcagatctcatgagaactcactatcatgagaacagcatgggggaaaccacccccatgatccaatcacctccctcccttgacacgtggggattacaatttgagatgagatttgggtgggaacacagagccaaaccatatcactgctattcaaacttgttaggtttcaggagactctagaaaattttctcaacattgtcttccaaattctctactcagctattcatttctgctaagagagttttaattgccaaaagtccttctcattctcttttgtatcatcctgtttctgtttcatggtttgatatcattctggagacattagtaataacattttttgacattttcccctcccagtatagtctctatgtttgcattctgcctttttagtatcttttatagtagaggctttcctttagattagaactgatgtccttggctctctgcttactctaggggagtcaggctgggctgtttcttggcaaagtcctaatatcactattttaattgactggctaatcagaatcttccattctcctcctagaaaggtataaattccagctgccagagttccgggagcccagatacgacatggctttaagtgggaatttcaggatccggtagttaatcgttcatttcaccccttattttccaccctcagctgtgcctggtgtcctgtagggtaaataaacgatatttacatggctgtgggaaacaggaaatggcattgagagggtctactgtgtttttagactttcaacaacattcctgttttcggccctacattcacctttactgttccacaaattcctaactcttcaaggaattctgcagagcaaattgtattgtttgtttggctttctctaacttagggttcactattcccaagtctgtccatttgtggaaattgttcaaaattacctttttttaaaaaaaagtatactttaagttttagggtacatgtgcacaatgtgcaggtttgttacatatgtatacatgtgccatgttggtgtgctgcacccattaactcgtcatttagcattaggtatatctcctaatgctatccctaccccctacccccaccccacaacagtccccggtgtgtgatgttccccttcctgtgtccatgtgttctcattgttcaattcccacctatgagtgagaacatgcggtgtttggttttttgtccttgtgatattttgctgagaatggtggtttccagcttcatccatgtccctacaaacgacataaactcatcattttttatggctgcatagtattccatggggtatatgtgccacattttcttaatccagtctatcattgttggacatttgggttggttccaagtctttgctattgtgaatagtgccgcaataaacatacatgtgcatgtgtctttatagcagcatgatttataatcctttgggtatatacccagtaatgggatggctgggtcagatggtatttctagttctagatccctgaggaatcgccacactgacttccacaatgattgaactagtttacagtcccaccaacagtgtaaaagtgttcctatttctccacatcctctccagcacctgttgtttcctgactttttaatgatcaccattctaactggtgtgagatggtatctcattgtggttttgatttgcatttctctgatggccagtgatgatgagcattttttcatgtgttttttggctgcataaatgtcttcttttgagaaatgtctgttcatatccttcgcccacttgttgatggggttgtttgtttttttcttgtaaatttgtttgagttcattgtagattctggatattagccctttgtcagatgagtagattgcgaaaattttctcccattgtgtaggttgcctcttcactctgttggtagtttcttttgctgtgcagaagctctttagtttaattagatcccatttgtcaattttggcttttgttgccattgcttttggcgttttagacatgaagtcctttcccatgcctatgtcctgaatggtattgcctaggttttcttctagggtttttatggttttaggtctaacattatagtctttaatccatcttgaattaatttttgtttaaggtgtaaggaagggatccagtttcagctttctacatatggctagccagttttcccagcaccatttattaaatagggaatcctttccccatttcttgtttttgtcaggtttgtcaaagatcagatagttgtagatatgtggcattatttctgagggctctgttctgttccattggtctatatctctgttttggtaccagtaccatgctgttttggttactgtagccttgtagtatagtttgaagtcagatagcgtgatgcctcctgctttgttcttttggcttaggattgacttggtgatgtgggctcttttttggttccatatgaactttaaagtagttcaaaattaccttttcttataactgagaaagttttaaaatggcaaataaatatctacctttagaaaacagtatgtgcaatcagttgccgagaacaactaaatgattgttttgaaggagcattaacactaagctagtctaggaacattaaaatccagttggagcattcagtaactataattattacattctacaaagatgataaatggtttcctattgaaccactgtgtgtccatgcagagaaactgaggtgtctgagctccagccagaggcacctgggcaacagaaaggcaaagatgtctgcttccttagcaacaggaagctgcagctcacccaggccacactcaccctgacaccgtcagcagtaaacaatacaaaacaactacttacagataagcctgaacatgaaggtgtgaaagttggtgtcctaaccctggcttttcttatactttttataatacatgaagccaaaaggacatgctgatgaagttgttcaagatggaatcagtgtgttggaggaaaagaaagcacaaactaacactcttagggacagaagtggactattcttttacgagaacacaaagtatccagtgaatttgtgtccataacccaaacaccaaagaatcttctagctgtggagaaagaccccaaaactatttccttggctgtcagcaccagaaatattctcatggaagccttggggattactaagagaaattatgtgactatcaagttctcagaatttataaactacagctgccttataaagaaaataaaggaatgcattttgggaacaaaaatatgacagactcataatttgtggtacttatcccatttaaaaatgtcaatatcaaaagcggaaactaataaagatctggtaagcctcactaataattgtatataaaataatgaattaaagttaggtaatccccaaagaagcaggcaggttgtttatttctctgttttctttataacacttgtaaaatttaattttttatggatacatctggaagtagctgctctaacttagctgttgagagcaaggatgatctgtatagccagggtattgcaacatgctgacatggtctctctcattacatttatctttcactctacgtttattagcaaccaagtttttctttgttttatgcttgtaacaatttttgtgaccatcctaaattacctcatatttcttcaggtacacttaatttgttggtttgttgcacctttattttacggttgttttcattacatttcgggacttctaagggttatggacatcacattaggcaatgtacttggctctttgtaccaggtagaaagacatgatctctaacttcaagaggcttacaaacaattctctcccctccccttccctttctctcttctctctctgtctctcacacacacacacgcacacacacacacaagaatgaggagactgaaaattcccaaaacaaaaaagaacaaaggtatatatatatatatatatatatatatatgtatatacatatatatatatatatatatatgtatatacatatatatatatatgtatatacacgcacatataggcatactctattttaccactaacttttttaaaaactggaaggcatgggagaaaaagatcatcctgaaatgttaaaaacaaaaacaaaaaacaaacaaaaaaaaaacataaaacaaaatgatcggatagtttgactttaaaattattgacctagaagcacataaagtacttacttagatttatgtctataagccttatatatggcatgatcgtatgcttatatggcataaatcaaacctatatttcataatactctgttcatcatttatcagccaacaacttcactcttgggaaccaaatccacattgcactcatcagcggcaccagagtcaagccaccttggccttggtcttcatgtttatgtcttagctcctagtgccaggagtgtcatgccacatttcctacaatcacatcctttcctattttaatatggattttaatgtttttttaaccactgatattggcgaaccgacaaaacatttacttatacacttatatgtgaacaacatcatctcatacctttgctgcatgtattttgttttaaggaatatgaacatgtcaagtgtatatgtgttaatagaggaatatatgagaatggatcacacatgtagactcatgaagaatttgtaaggtacattattataagatacattattattttccagaggaggaagggaatacagacaaataaatgaaacacaaatgggagactaaattttgcagcagagagtgcaacagctttccatttctgagaggctttgttcaggaactcggccatattcatcttcatagatttcatagatttcatagtacagtaacttgcacatattaggtgcttaatacttacttgttggattaagtcaatcctgatgagtttagtgcccttctcactgtgggtactggtgattatctgtgattatcaagacatgtcatatatccagtcttttaagatgggagtccaattgccagttcttcctgggtctatcctgggaaaagcaagcctagaacactgcctgctgctggaggtactcagtactaagtgaatgaatgaataccttcaaaactgaggtgaaatgagcagtggacatttgcgagcacactggtttaaattgcacaggcttttttttttttttccttggcaaagcaagctttgaatgaaatgtcttagcaaatataagtgagattaaatagtaacagaaattatgatatgttattataaaagatgaatgccagaacatttatttgaaaagaaagagtaggtgtttgatgttttcattgaaatccaaatggttttgtagcaagatgaggagactcaacattacttacattttgttttacaaacaatttttaagattataaaagttcatctcaagaaattaacatttatttcctttaaaagcataatttatatatgatactgtgtagttgcttgggttaagtaaaattttttttttgctgaactttaactcttactaaacattttaatatatttatgtgccatttaattgctccatttccttcaaatattagaagatgccatattatttacaactaatttaattaatgtggagatcgttttttctataaagcaagcacttagtaatttcatctctttgcttcaggtttatgtaataatagagaggaaatggaaatttcatcatatttggtttcaaatgaaaatcaggaacaaatgaaaacctcttgtcttcagcatgttaaattttgtgatcaggtagagaattaataaaaattatagttaagataaaccagaatttcaatgtgttgttacattccattgtacatctagcacaaatattatcaaatgcttcgtaaagatttttgtatgcttgcaattgatacaaaatatttttgaagagctaattattggcaagcatgatctgcctagggataaaattgggctatagtttttacacataggtagtcagttttcagcagcacaccagcttacattaagtttgcacttctaacccagagagtcttggctttggaacacctttgctttcaaaacaataagaagcatatagtttaaataaaagaacatgccaaaaaatcttaaaataatgatcatagacttatcttctagtctccttgaaaaatatgattatttgaagctcaatagagttaataatatggttccttgtaggaaagtcactcaggcactcaataaagatctgcctgtttcacacacacatacacacacacataaacataattgattgccccccaaaatattttcctaaagtattttatagaaaataacaccatgttctgtcaaataatggaactcagaatcacccggggaagctcattaaaagtgcagatacccaggttcccgcttctaagaactggcttccatggaaggcaggggaataaaagcagggttctgtactttgaaagtcctccctaagaaagcctgatattcgccagaagttattaaccaccatcttataatagaaggccattaatggtttatgagcttttagtacagcccagtctcaaacactagtgtgtatagaaatcacctggggatctcgttaaaatgaagatgttgatttagtaagtctgggttgggggctgagattctgtgcttctcacaagcctccaggtgattccattgctgatggtctgtgagcctcaccttgagtagcaaggatgggtttttctccataaccattttgtaaggttacacctgtcagctcacctacatagtaattgttctgagtactctattagatactatagtattcgtgggaggtggcattgtgttgtgaaaaaataggtcatccagtaagcattgactgagtgtttactatgtgttaggctctatgactttgcctcactggcttcccttgcccctctgcatgaggctaacattaatttgtcttttaggagtgtattagtctgttttcacactgctgataaagacatacccgagactgggaataaaaagaggtttaattggacttacagttccatatggctaggaaggcctcagaatcatggtgggaggcaaaaggtacttcttatgtggcagcggcaagagaaaatgaggaagatgcaaaagcagaaacccctgacaaaaccatcagatacagtgagacttattcactaccatgagaacaatatgggggaactacccccatgactcacattatttcccaccaggtcccccccacaacatgtgggaattatggtagtacaattcaagatgagatttgggtgggaacacagagccaaaccatgtcaaggagaaactgtctcctttgagaagccttgcctgctatgtgctatgtgctatgcacttccattgtatactgtgttcactttgataatataaattatcatgttgggttgtaattatctactctcttacacatgttagaatatgagactctctagggcattattcattatttcaattcagagcccataacactgtttgtcacattaaagacaatcagttaatatatagtataattaactaattaatcaaaagaggtaacataagcaaatctttaagctacaactccatttccttacataagttcaacacagacccctggctgagtgaagagagagagtagctgagggttcttgcctgcctctgcaaggctctccttagctagctctggcccaggatctttttggcaagatggtgacattcatgcaggctctcctcaatctgaaataaataggagaactattagtcaatcgcagcagggagcatgactggctttaaaacgcattaacagaacacttacatggacaccaagggcacttggcatgaccctgatttcccttcttgaagtacaggatttggaaatcactgccacagcccagttcagctcacgtggacctgccaagaccagcagagtgcacaggaggtccagcagagtgcacaggaggtgcagcagcacctggggtagtgcctctgctccagcgcctcactctacttcgatgcatatgtttatctccataaattgcaaccaagcctacacagtgatcatttttaagttttactgattgccttatgaccttacctctctcatggggccagaagaatgatggcgaaatacagtgattggcaggagcagctgtggagttgcttattgagtcatggtgggaccgttgcctttgctggggaagactcaggtatctctgatgtccaacattcaatgggagcaaatcttttccacaaatgccctgggaattctctatgtattacaatgcttttgtaataatctcataccctaaaagagactatgaaaaaagaataaatagaaagtaagaggtttaggagtgcctgttgacccaggtattaagaaaagttgatacagacatttgggtaaaattcaatcttctcatattgtcatttattcggcacatatttattgcaggtctactatgtgcaagacacatgtcaggttgtgggagatacaaagatctttgtgttgcaatcttagctctcaaggaatttcaactagccagtagtttggaagctaaatgggagctatttccaaagtaagcttgatatagtagcttggcaaagattttcttctccccttcctctcctttctatagacttttttttttttttttttttgagatggagtctcactctatcacccagcttggagtgcagtggagccatcttggctcactgcaacctccacatcccggattcaagtaattctcctgcctcagccttctgagtagctaggattacaggtacctgccaccacgtctggctaatttttgtattttcagtagagatggggtttcaccatgttggccaggctggtcttgaactcctgacctcaagtgatctgcctgcctcagcctcccaaagttctgggattataggcatgaaccactgtgcccagccacctctctatagactgaatctacagaactgggctgaaactgtttgcctctccattcctcctgccggcatcaccagagtgatctttagcctgaattggttgttggttttagtcttgctcttttagcacatggttccttttttttcccccttttcttttttttttttttttttattttactttaagttctgggatacatgtgcagaacgtgcaggtttgttacataggtatacatgtgtcatggtggtttgctgcacctatcaacctgtcatctaggctttaagccctgcatggattaggtatttgtcctaatgctctccctccccttgcccacttgactccaacaggttccggtgtgtgatgtttcccctcctgtgtccatgtgttctcattgttcaactcccacttatgagtgagaacatgtggttttggttttccattcctctattagtttgctgacaatggtggtttccagcttcatccacgtcccttcaaaggacattaactccttcttttttagggttgcatagtattccacggtgtatatgtgccacattttctttaccagtctatcactgatgggcacttgggttggttccaagtctttactactgtaaatggcagcacattgttcttaaaaggcagcattttctggtttctgtcagcctttgttccctaggttggaccttacttctacttgcttttgcattgccttcagtggaacttcctcctgtccaactcagatattcaagaatgcttacacatggaatccctgtccctttagatcagttattctcaaagtgtcatctgcagacctctggtggtctctgagatactttcaggccaaaataattttagtaataatactaaggtgttacttgtccttttcaccatgttgacatttgcatggatagtgcaaaaacaatggtggctgaaaccacttgcaccttagcccttagcattcaaggcggtgacacaaatgtaccaggggcctttgtgttccttactgtcatacatttggcttaaaaaacatgatgccagttttacataaggatatcctgatgaagcagttaaagtttgatttttattaaatcttgaatgcatatctttttaatattctgtgtgacaaaatgaaaagtacatataaagcactttggctggatactgaaatgcaatgtttacctcaagggagcatttgtacaaaattgtttgaattgcaagccatactagccattttttaaatttatgggacatcatttttattttaaggaatgacagacaaaatatggttattcagtcttggatattcagcagttattttctagaaaataagcaaagtcaacctgcccatttaaggaaaacaatggacgatatttgaactttcaagggaaaactaaaattttgagaaactctcatctgccactgtgaatatgacagcatcccaatacttaaagacttctctgatgagatcattggtggtattgagagtgattgtttgatattgtataatgaaatgtgtcaacatttgaaagatgtgcataactcagtgaatcaatattttccaaatgatcaacccaaatgtaacaaaatcacacatgcataaaagatgcattcaaaatgcaaaatggaccaatagattttttaaattaacagagtatgaaaaatttatacctatggtttcagattctgcagtacaactttagaaactactgcttgttgagttcattgtgatatcaaagaagaatatccaaaattaccctataagactatcaatgtactcctccttttccaactatataactgtgtgaggctcaattttctttatgcatttcaatcaacccatcacaacagattgaatgcagaagcacatctgagaatccagctgtcttctattgagctcagacattaaagagatttacagaccagacacggtggctcacacctgtaatcccagcactttgggaggccaaggagggtggatcatttgaggtcaggagttcaagaccagcctggtgaaatgttatctctactaaaaatacaaaaattagctgggtgtggcggcacatgcctgtaatcccagctactcgggaggctgaggcaggagaattgcttgaacctgggaggcggaggttgcagcgagccaagattgcgtctctgccctccagcctgggcaacaaagtgagactccatctcaaaaataaataaataaataaatagatttgtagaagtgggaaataataccactattctcactacattacctgttttatacaatacggtttttcataaaaaagtacttatgttaacatgcagtaggtttgctattttaaatttaataaaaatttaaaatttcttatttttgatatctaacatggtaaatatcaatagaccaaactcaaaacagagtatctttgaagtccttaattatttttaagagtctaaacagttcctaagaccaaaatgtttaagaattgcttctatagatcacatactcttaaacaccgatgatggcctaaatgaaattccagttaattaaagccttgaaagtgatcatttaaaccagctcttccccgaaaggctgtctttctgatgtgattaaatccccctggctcctgcaccagacagtttttttgtcaatcaaacctctcaagtatgtgctgtggctgggaaggcagatattatctcagtcatgtgaagacattattggccctgtcttttcccccagtaccctactacagtaaatgttcagtgcagtcaacttaactttcttgaattaaaactatgacaagtatttataaatttgtacagttgatactttttaaatgaaaacttcaatgacaatttgatgtgattctttccaaaatggaagcaccctaatgtatcttatatgtattatagtttgacaaagtatagaattaggaatctggagggaatgccttcattctccaggtgtggaaaatgattccctaatagcttaaatgctttgctcgaaatcacatgagttagtgacagaattaaggcaagatcgccagtttactaataactgcaagtccgcagcaaaataatagaatttataaatttttaaaagtctctactcctgtcatttggagaaaaattttcattttacatatatcttctttatctgtagttttatttatgagaaaactagaagaataaatggattcatctagttgagacaaatgcagacttcatatgtctagagctatagaaaaacagggcactcagacaggtatatttgttgggtacatgagatgtttatatctgaaactaaacagtttcagaaaaaaaagcaatacaagcaaggtatctgggaccttacattatggattccaattcatttcctttactttattaatgcagaaatgcctcaggttcaattatacctttagatatcagaacctcatttagctatttgggatgtactcgttcctaaagatatcacgtgttcttctgcatctaatcagtctgctaaaaatgatataaacattttaaatgtcttgggatcattattattaatgcccattattttactcgaatagagcagaggcattaaatcctattgagcatatgagagttttttacaccttcagtgagtggcccaatcttctgagcctttttgttgttgttaagattttcatgtgtttttaaatttggcttttactccctaactttggcatttgtattaactttgccattttcctttatacaggatacatgattttctccccacttctaattttctaaaccaaataacgatggtaaatagaattgtataaaattgatgaaatagactgaggataggatccatatactttcagtaatgtccagaagttttagtgaactttatttttaactgtattttgaccattcaaaagactgttgagagcttacttgtaagttctttaggtaactaattcttattagcatgttaatttctcagttaaaagttgtatgtccagtatacgaggtcaggagttcgagaccagcctggccaacatggcaaaaccccatctctactaaaaatacaaaaattagctgtgcgtggtggtgggagcctgccagctacttgggaggctgaggcaggagtattgcttgaacctgggaggcagaggttacagtgagcagagattgtgccattgcactccagcctgggcaacaagagcaagactccatttcaaaaaaaaaaaaaaatcaactaaaatttaggaaacccaaatagttctagttctgctctcttttcttagtaattcttattaaaaagagtatttacatagatgcttttaaattttacatgtgcttttattaggagttttttaaaaagtattttttcatattctgcacaaatgtttataaaaataatctgcctgtaattcaaagacctctgtgcaatctttcatgatttatccagcaaaaagtagacaggcacatgtcctgctaggctctgctctatcagtgtttgcctgaaagagctaggatgtttacattcttaggaaagaaagaaaagcagagaataccattccatatttgtacttagttttctagcatcatgatggctgctttataacagctcatagcagttatattgcagcatcgtttctgcctgtggaatcactttggtatgaagattcttaagtatgcagccccacaaattagggctctcattcctgtcaaagatagttattactccaggaacctttccaaggttgctaccatgaatactttttacttttatggtgacttggtctctgagagtaaagacaattatccaaaagaaaacgtttttgtctggatatatcttggtgacaagaggaagaaaggtcatgatcttcaaaccaaaacccaacatgagaacaggttatgagcttgaattgaggtactgagtgtagaataaccaaaaattgtagtgtctgtttgaatttacacctgtcaccagatttgaatacacagttttaactttattttcattatttagacacatgatttgtagaactgaatcccaaggactgaggttggtgtttaggatctggatagcaagccctctgaaaatggaattatgaacttatttccaagatcttagctactatcatcttgctctgcctcctctgaccattcctctggtattagttgaagaatacagacctacctaaggctttggtttaagatccagttggggtaagggaatgcttattaaaccttgtcttacaggtatgaggcagttttgagaaatgcctgaagtggaaaattgaggaaaggcgggagcttccaaaagaactactagaacatgtagtgtacattttctgtcaaaaaaaaaaaaaatctctaaaactttaattgttgcctgagatcacaatcatctctctcatcctctcttagttattgccaggtccctgagacttcatcatatggattgagaatagccccacatgtgataggcaaatgtatgctaattttctctttttcattgatttcaatagattataatagtggatttaaggaagagattgtcttgtttctatcacccactctgacattttccaacagtacttgtcaatgaattatacatgaaaatgcagctcctgagacaaaatttagttctgacagcaagctggcatgattgataggccatatacacaacacaaaataatttatgtactaggtcgatgagaaatcaaatctgagacctgctttctagtcagtcttggaagacctggaaatgaagagagaacaacacaagagaaaaacgaggtttttttaattttgcaaggaattatttattcataaaactaaattagcatagccgaaagtcttctcagatttagtctatgaaatgtaaataatgtcgttaaatttccccgagaagtcttaactttccaatttcacttggtgttggtaaaacaaatctttcctggcatggatcaagaaatggaaatcctcacatgtgagtgagaatgagcaatatttgtctttttgcacatggcttgtttcacttaagataatgccctccacctccatccatgttgttgcaaatgacaggatttcattttttatgactgaataatattccactgtgtatatgtaccgctttttctttatccactcatccactgatggacacttgggttgattccatatcttggctattgtgaatagtgctgcaataaacttgggagtgcagatatcccttcaatatactgatttcctttatattggatatataaccagcaatgggattgctggctagttctagttttaattttctgaggaacctccatatggttctccatagtgactggactaatttgcattcccaccaacagggtatgtgggttcccctttctccacatccttgccagcattcattattacctctctttttgataaaagatagagagtagaatgatggttaccagagactgggaagggtagtagagaggagagggggataaactggagatggttgatgggtacaaaaatacaattagaagaaataagatctggtgttttgtggcatgactatagttaacaataatttattgtatacttcaggataactaaaagagtgcaattgaaatgttcctagcacaaagaaatgataaatatttgaggtgatgaataccctaattacactggtttgatcattagcttgtatcaaaatatcacacataccccataaatatgtataactattatgtatccataataattttaaataaaaagtttttgaagttggtaagctgcatgttctcacttataagtgggagctaaatgataagaactatgaacacaaggaaggaaacaacagatacaggagtttacttgatgggggaggctgggaggagggagaagagcagaaaagataacttttgggtactgggcttaattcctgggtgatgcagtaatgtgtacaacaaccccccgtgacacgtgtttacctctgtaacaaaccttcacatgtacccctaaacctaaaatgaaaattagcaaaccaaaacaaaaaggtggtaagcaatgaaacatagtattgcatttggtaactactgacattaccaatatctcttagttatgtgatctgattaaattgggagatactgaaaaagaatacaggataagaactcactcagggtctaatatattatatgtagaatgaggtctctaaaggaatgttttcaaaggaaaggaattacatgatgtgctcacgcaggtattttgtgtcaaatcacagtttatgaaagataattatactcaattttgaacttataacacattgagtcataatattgtctgttttaatttttaaaaatattttatatgtaactctgtgtgtgtagaaagccaacacgtctgaattcaccagtcccttcttgagcacctctttgagctgtaggtacatcatggaactttacacacattatttctaatcctgattaaacatctagacgataaaatttattagcaccattttacactttagaaaactaaagcttagggtagtagcgtaactcatctaggtttagacaggtagtaagcataggagcaacacagttgaaacccatgtcttgttccctcagagttggtaccctttcccactgctacatgtattttatgaatccaagactagtggcttaaggagactggttgataagttcactgatagagaattggtatcatcagtactaataatttttgtgtctaaatttagttttgtgatgcacagtgtctttcattttcacaaataagaacatttccaagtgttagaatcttcactcacataaacatacacacttatacaattataaaaatacgtaattacgcacaatagaaggtaaggatcttaggtacactaatacatgtttatccttcttgatactactataagaccctgtcataccatgtttttttggttgaagagttctataaaaaatggagaaagagtagtccttcagaaaaacttaagtaagaagaaaagttctcatcatatatagcaaggttcttgagggaaaaatatttcttgttattcagatgaatgtgaaagttcagtgaaacgcaatcacagcagttgattgtgaatgttgacctcagaatgtattctctgaaggaatgctaatgactcttaccatgatgcactggcttatttagataccattaagagctccaacttgacaagcaggatgatgaactgcacttttcctatcatgcaacacatgtttggataacaggcagctctgtaaagttgggagattatttatttttaaagaatcaatttttcatcttcttctgcaatcccagtttaaaactcagacaactcatggctaataaacagaacttctgcctaagattgggtcttggggggcacagagtataatgacacctctgttttatcaacataaaacctctttggtcctccaaaggatgatgttctgttcgaatcctggtatatctgactccattgaatgaatgattttatgcctcaaaagtatcctgtattacctacctaattttttttataaataaatttcagtaactgaaatgtgaacaactctaaccctgacatagatgtttactgttggatattgttgtatcctttacttattaaaaaatttcttgtgatctttcattttaaatatttcatgcaagataaaacaaaacaaatatatttaacagctaaatggatattttcaaaattaggtgaaattctctttctcattgcttttgtgactttcttatagtcttggaatattggttcatttaatattttctaataaattagtgttttccaataaattagtatattccaaaaataaattatattttccaataaattagtatattcttccccaagaggtaatgatattgatgtgtcagcagtggggaaggctttctacagattgtaatttatgacaatagaaggatgggccctcccagaacaaaactaattgaatcacttcaaatttcaataatgccattgttttggctcttaaaggtaatattttgctttcaagagtatcatttaaaatgaacctctagatgtaaactttaaacctatatgagttaatatatgaattatcatttaagactttagcaggaattagtgggcagcttttagagataaattgaaatacattttgtgcccagtcagaaataagcctagccatgaaaacattgttcaagaagtgctgcttacctggtgttcacctctctaggctcagaagctttattttaataaaaaggaataatgcttggtagaaaaaaatctagaaaagtatcttaaagtattcttaaatttgagactgtatggtcatcatacatggttcattgagaacaattgaactcataaaatgaaatctaagcacattagtatcacttagggctccagcaggaaataggtggcatgctcaaagaagaattcaatataatgcaatgcagagactaaaggtagtcttaagggaaccaacaaatgataatgaagcacccagaaatccagagattgagagcaggaaactattatcactcataggcccaaaggtacaaggagataatgtgtgttgttggaacctaacgagttaaggcaatgatagaggggcaggctgacaggagctgcaactctctagactgaagaacagagccactgctaagccatggcccagcaggtccaccaaggagagcatagacctgacctctcatttcccttggtctttgatctcttactggagtaagaatattccagtagattatgacacagtgcttatggcagggctgcttttactttctgcaaagtaatctcttttttctttcttttttgctaaagtttgcttagtaccatgcctggagtagctgatttcaatgaagcatttctctctttgacatattccctaatatccaggctccctggtgccccactatactgggatggtttttatcagtccatttagctatacagctctctcctcaaacaagttgccccgtcctgtacctccttcttatagtcatggcgtttcattcaccttggcaatgggaaggattttaaaatttattgtaatgcaggaggttactttctcactggagtaaaaccttacaatgtggaattatcatcatcataataataatgttttaagacggggtcttgctctgtcccccaggctggagtgcagtggcatgatcttggctcactgcaacctccacctcctggctcaaacaatcctcccacttctcctgtgtggctaggatcacaggcatgcaccaccaagcgggctaatttttgcattttttgtaggttttttttttttttttttttttttttagagacagggtcttaccatattgaccgggctggtctcaaactgctgagctcaagagatccacctgcctcagcttcccgaagtgctgggattataggcatcagccactgtgcctggcctgaattatttattttattttattttattttaattgtattttattttattttatattttattttattttaattttattttattttatgttttattttattttattttatattttattttattttattttattttatttttgagacagagtcttgctctgttgcccaggctggagtacaatggtgcgatattggctcactgcaacctccacctcccgggctcatgcaattctcctgcctcagcctcctgagtagcttggactacaggcgcacaccaccatgcccagctaatttttgtacttgttagtagagacggggtttcaccatgttggccaggctggtctcgaactcctgacctcgtgatccacccgccttggcctcccaaagtgctgggattacaggcataagccaccacgcctggcctgaataattatttttaatgccatcaatgtaagcctttaacatcttttttcactcttctctattttttatttctttaattctgtctggtacctttacattgatttatttactttcttttttcctgtttacttacaatgctatgaattaaatgttcatattatggtacatgataaagtgtgtggctgtgtgtgtgttcataaggtggtaagaagtatttaaatggtcttacaggttaacaggtgaattaaaattcagggctggtgttactgttgacagatttgtttctcagagatggtggcttgctttttacaaattatatcattctactatgtcttctttttttactccactcagattcgaaatcagagcaaagcctctgggtctgggctctgtgagggagatgaagtggtttccatcaatggcaacccttgtgcagatctcacctaccctgaagtcatcaagctcatggaaagcataacagactctctccaaatgctcatcaaaaggtacaacagatttgctggaatatgtattttctcttgaagctacatgggaatgattatagcttttactacatatataacttgtcatttatggagaaattaggggtgctttgtagaaggttaggtatagttaaacagaaacaccactgtgtttgaaaaatagtcaattctagtcaaccaaactttctggttaattgagaattaagttgaaaatgcttgtttcaagcactttgttgaaaatcttaggtattttaggctccttccttagaaagctcagtatattgagcataacttaatatttctttgataggtcaagattttgtgatggatcagaatcactcaattgtaattatcagatgcacagatgaattaaaaatgtttaaatattagaccattaaactgtacaatttttcattaaaaggatgcttaagagacagaaaagagaaacaacaacaaaaacttacaagcagccggatttctccagtaaaaccaatatttgaggatggacaaaagcagatgattagaataaggtttttgcacgaccaacacaggtcatttgggaattcaatctcttcaaataccaccatccccacatagttgtttaacaatataaaagaaacctttaaatgtaaaaaacaaaagaaaacaatgaggacaataacaaggaaaactacagcattgacatttttatggtgtacaaatcacagtacaatccatactgattttgcaacggaagctctggctattgcatgataatgaatccagaaaggaaagctttggcttcctggagagcagcttttaggaagatgtcagaggacatctcaagatgaacctcaaggtcctccaggtttttcctcaactctgcagaaacactacgcacagttacccctctgctaatcattcagtatgattctgttccgggatgaaaatgaactcactatggccaaaatcttgagacaacaatggaaatctagcattattcttataatctaaatatttacccatcaaactcagtgtttaaggccttagaatccttccttcatgttatgaagagaaaataagtttataaaatacataatttactaatacataattaaatttataaaataaaaaaaattacaaagtaagtaactaattggtaggattcaaagtggaatctcaattgaaaatcaagtcaaaagcaattattatcatcaccaccactaccactattttaaatatctgaatattgtttcctgcaataaatatttctgtcactcatatcactgtcatctatcagtagaggacaagtgtttttacttttcctgaactattgcccagagatagctcagtaagactattttaaaataactcctttaacattccatctctattatcttgaatgttcttaaaataagattttaaaaattctataattgtgacacataaattgtggacttgatgaatacctatgtagactgatgggaaatgaatgttttaaggcataaagctttattcgctcatgcttttatgatatttactcatgtctatttattttacttcagctgctgataaatgttaatatttatctggccatttgtctgtattggtctacaaggctggcatgaattgaaactattctcttctcagcttcacaattgattgctaacgttattcaaagtgatttaatctacttccatcccaaggccttcctaaattaaaactctctgaccttttggtaccctcaaattcagtttaacaatgtatttaacattttctacataataatgatctaatttgctaacatcatgcttttttaatacgatattataatgttgtataaatactgtattacagggaagcttttccaattacttgcgtatagagaaaggtgcattttgtttaactgttagtttgttttcattttgtttagttttgttttgccaaatgcagttgaaagcaaaggtaggagtaagtattttgagcattggtcggaaattgcactaccacataaattctaaggtaaattcctttgagtagaatccaagtagaagctcacgcccttcagctgacgtgcctgcatgagtcataactgtcttttaaggaaggaggaaaggggcaaagataattatgctgcttccaaaattaaaaaaaatacaaatataaaaaatgaaggcatttcctacagctgttctgtgaataatacctctaaaaacatttacagtttaaattagagtttcagaaagaagttatttaactcttaaactgacattgcttcttctcagaaacccaaatttgcacagacaactgggaagatcaaaatcaaagagctgtggtgtacagctctaggctccttagctgagagataaaggaacagtttgacttcagatatcctaaaaagaaaatgctccaagaaacagatccaaatagaagaaagggagacatctcagattataaatactccatgacttaatgattcattgcagcacggaaaggatttctctttacgcaagagtactgggctgggtccacttattacgaaacacatgctcactggggcttaaaaaacagcttctatttcattcctttcaagaaagcacagcctctaaaaggactagttgagttatctgtaagttaagattgatctgaaggtgctggatatgtttatgtgacttcataatgtctagaccaaaacttagtcaataagacattgaaatgctttgtcacattctagcaaactcattataagagatacccagattccaagtacttacagataaacgggatccatgtagttttttaaaaataaaagctgaatttaggatggattcaggtttcataatcttgtgtaagagtttctttgtgcttttaaaaaagtttatttggtatctctttaagtaataatatgaacatgttgccaccttctgttttcaaatatgttgcaactgacatttagaagaaaatattttgactatatcacatattagacatcacaaaagtgtcaggaagttctttggcagatgtaacatagtctgatttaagtgtctggaatgatttttctgtgtgcagaccatccagtggaataagtgaggctttgatatctgaaaatgaaaacaaaaacctcgagcatctcacacatgggggttatgtggaaagtaccaccctgcagattcgaccggccacaaagacccagtgcacagaattcttcctcgcccctgtcaagactgaagttcccctagctgagaaccaaagaagtggtcccgactgtgcaggcagcttgaaagaagaaacaggcccgagctaccaaagggctccccaaatgcctgactcccaaagaggacgcgtggcagaagagctgatcttaagggagaaggtagaagcggtacagcctgggcctgtggttgagctgcaactgtccctttcacaggagagacataagggcgctagtggccctttagtggctctcccgggagctgaaaaatctaagtctcctgacccagaccctaacttgtcacatgacaggattgtccacataaattcgatccctactaatgagaaagcagaccctttcctgaggtccagcaagataatccagatctccagtggcagagagttgagagtgatccaggaaagtgaagcaggagatgcgggactgccccgggtggaagtgatcctcgactgctctgacaggcagaagacagaagggtgcaggcttcaggcaggaaaggagtgtgtggattctccagtggaaggagggcagtcagaagcacctccttctctggtatcctttgccgtctcatcagaaggcacagagcagggagaagatccacgctcggaaaaagatcacagcagacctcacaagcaccgagcgcggcatgcacgtaagttctgcctgggctttcagaaggggcttgggagttgggggcattttgctgcttctttgcttgcatgagtttttcagcaagatttttcttatgtttctcattggcttaaagaaatatttaattaatgcacaaaatcacaaatgtgaaattgtggagaataccaatttctaaataggaagcaataagtccgaacttcatatagatttaaacatttttcatgaatttctttttatccccaaaggcacaggaactgttaaagaaaataatattgtcaatgtgcctgttcattttgtttcagacagttgaaatagttcatgttaaaatagcataagaaagcacttgaagtcatgtggactcagtttaaatgtcaaaaactgttgagtctgctactgagaggtgtctttaaaataaaagctctaccattgatatcaaaagcagatccttgttttgaaaaaaaatcattgtgcagcttgatgatgcttgcagaagtgagtttgacagacaaggacatgtgtatactgagcagttacatgatcctctccgttgtgtaagtcttcatttgactgcaaagtgtttcatctaccttctagacacagaagtcagtctccagggccatgtggaggcatttaaatgtctccaaacataaaatatatttaaattcagtgctttgtatggcattttgttttacccaggggagagaagacagaaaggagaattgggataagaattgcagttaggtgttaggatttctattgttttatttcacgtttatttttgtttgtttttttttttttttttactaattttggaattttatttgaggatgtaaaggctgacaggcaaaggcacttgactgtatatatgatacacaatggcaatgaattcggttattcaaagtaggatattaagtcttctaacctattgttattcctttcaaagcatatttttagcataaccatttgtagctttattggcaagtgctgttaatcattccttatactttaagcatctgtaggccatcttcacatttatagcatattaaacaagagtattgagacaccattcacatactttacatgttggcagtgaagttagcagcaactgtgcaactgtgactgtcaatttaataagttgtataacactagtcaaaaaaggaattctatttagtaataaccacagtttcaactatttttctctagaaaattcgatcaccagtaaatgcctgtaatcatattataaaattatttccttggattatattttatttaaaaaaaattaaccattaagtctgtgacaaaaagagctaattttcaatcataaaatagtcaaaaattttttcttaattttccacttaactgttttgaggaattaaaaaatttaggggactcacagtcattatcattgaaaatatgatataactataaattataaatgatagatgctatatgtttagttgctataatttgccacccatttcttttttataatagtaataatgaaagaaaattttaaatatttttatttttataaaataaaaatcatattcttgttttaaatgacttaatttctgcatcagtttttacacagttaagtgggtcacaagtcaatttttaaatttctccaaggtttattcttgctgcaaggaaagtaatattgtatttccaaaatagcaatacatttacaaacaaatctgtctagaaaactttgtagctagagtttcttatatgtatttacaataatgtcatattttgaattttaattattgattcagtaccttcaatgattaattcagtgttttgaatttatattaatccagtagctgtgagtggaaagatttggggtggttgtcagggtaaaaaaagaaaaaagagaaagaagaaaacctaaatagctaaattcattacattaaaacatttagaaaattttaaaacatcttcttgggacgctcctccctttttaagattcctggaaacagttttatattgacactttattttaaaatatggaagtatgagatatgtctcatcttgtttttcagaaaatattatgtctttaaattatgtccttcttaattctaattttatcctattaattgacatttactagccagtttttattattaaagtggaaggatctctagagaaacaaatgtatgaaacatatattctaatcagcatatataaaatatttttatgtaaacaaatagaacagtatattattgtagaaggaaacatgttaagagaaataagaaaaagaaatgtgttggattccttcaaaattctgtactcaatggcaattttttacatatttattttcccccaggagagttcatttctgagttgctgtggtgtcttccttgaactcatcagctcaatataatttttttttttttgctttccctagggctcaggaggagtgaaagcctgtcagaaaaacaagtgaaggaagcaaaatctaaatgcaaaagcattgcccttcttctaacggatgctcccaaccccaactccaagggggtgttgatgtttaagaagcgacgtcggagggccaggaaatacaccctagttagctacggtactggcgagcttgagcgagaggcggacgaggaggaagaaggtgacaaggaggatacatgtgaagtagcatttcttggtgcaagcgaatcagaggtggatgaagagttattgtctgacgttgacgacaacacacaagttgtgaactttgactgggattctggactggtggacattgaaaagaaactgaacagaggggacaagatggagatgttaccagacaccacaggcaagggagccctcatgtttgccaagaggagggagagaatggatcagatcacagcccaaaaagaagaggacaaggtaggtggaacgccaagcagagaacaagatgctgcccagaccgatggcctgagaaccacgacttcttaccaaagaaaggaggaagagtcggtaagaacgcagagctctgtgagcaaaagctacatcgaggtgagtcatggtcttggccatgttccccaacagaatggcttcagtgggacatctgagacagcaaacatccagaggatggtccccatgaatagaacggccaaacccttcccagggtctgtgaatcagccagctacccccttctcgccaacccgaaacatgacgagtcccattgctgactttcctgcacctccaccttactctgcagtcactcctccccctgacgccttctccagaggggtttcaagtccgattgctggcccagcacagccccctccatggccccagcctgccccgtggtcccagccagccttttacgattcgtctgagcgaatagcttcccgagatgagaggatctcagtgccagcaaaaagaacaggaatattgcaggaggccaaaaggagaagcacgacaaaacccatgtttacttttaaagagcccaaagtaagcccaaatcctgaactcttgtcactccttcaaaattcagaaggcaaacggggcactggagctggaggtgattccggaccggaagaagactacctcagcttgggggcagaggcttgtaatttcatgcaaagctcctctgccaaacaaaagacccctcctcctgttgctccaaaacctgcagtcaagtcctcatcctcccaaccagtaactccagtttccccagtctggtctccaggagtggctcccacccaacctcctgccttccccacatccaacccatcaaagggcaccgttgtctcctccatcaaaatagcccagccttcttaccctcctgcccggcctgcaagtactttgaacgtggctggtcccttcaaaggaccacaagcagcagtagccagtcagaattacacacccaaaccaacagtttccacaccaacagtcaatgctgttcagcctggtgcagtgggaccatccaatgagcttccaggaatgagtgggagaggagctcagctctttgctaaaaggcagtcgagaatggagaagtatgtggtcgattcagacacggtgcaggcccacgctgctcgagctcagtctcccactccatctctcccggccagttggaagtactcctccaatgtccgagcacctcctcctgtggcctataatcctatccactcgccgtcttacccactggctgctctcaagtctcagccatcagctgcacagccctccaaaatgggcaagaaaaagggaaagaaacccctcaatgcattagatgtcatgaagcaccaaccgtatcagctcaatgcatccttgtttactttccaacctccagatgcaaaggatggcctcccccagaagtcatcagtcaaggtcaattcagccctggccatgaagcaagctcttcctccccggccagtgaatgctgcctcacctacgaatgtgcaggcttcgtcagtgtactcggtaccagcctatacctctcctccttccttctttgcagaggcctcctcaccagtcagtgcatccccagtgcctgtgggcattcccacctcgccaaagcaagaatcagcctcatcatcttattttgtggcaccaaggccaaagttctcagccaagaaaagtggtgtcacaattcaggtgtggaaaccatctgttgtggaagagtaatcttgtagctgaagctgagtgtccactttgcttgaaatgaattgtttgcagtgtttcttgagtccctgagaatgcctagcaaagtcctcaacttacttaatttcagatatgtcacctcctaatctgggtccaaggagtataatatttttaatgagtcaaaaatccaactcagattgacctaaaatatatttatcttctttgcacacttaaaaaatccaggagcaccccaaaatagacatgtaccgttatattaagtaagcaggagacttaggatttgtgctgtagccacaagaaagacagtgatcagtgatatcaaacatcaggaatcagcctttatgtaacataacagctgtcctcctatggtgaaaggttcaaatgtagtgaaggtataacctatattgactgagatttcccttttaggtagtgccttatctctattactagtgttaaaggaataaggaatctatgaaggacagggagcagctctggtctgtcaatctcagccacctgtttgatatcacagagaagatactcggaggattgttggaatgtatatagtttagtaagaagtgggtaagaaagagggtcttaattactgagcacttattatgtattaggttctttgccagatgtttttacatatataaactcatttcagaaaacttatttaaagtaaatggggccgggtatggtggttcatgcctggaatcctagcactttgggaggctgaggtaggaggactgcttgaggccgggagttggagaccagcctgagcaacatagtgagaccctgtctcaataataataataataatagtaataatgaagtaaatgggataaggaaagaaggataattatctttaaaggttgattcccaccctccctccccagttacttaaggaactaagtgagtacatctccagttgcccatgaaagcataagtttgttttcctcagctgaggcaagtggtagagtatacaggataacgaagtaacatgtaaaaggcaggacgcacataaaggtgtacatggctattgtttcacctggagaaaccacatgattgggacctgaaggtttactgactgactacaggggctgattgtgaagcacgaggaaccccatgtgtgtggagactgtagggtgagagcacacaattattagcatcatttctgagtgatctcacagattttttttcttgtgtttgctttgctttttgacaactgcttctcccacgttccttgcaattctattctctcaccttcactttactatttgtattcgatggaccaggataattcaggcaaggttaccttgtaaactttaattggccacacaccatgttgtcacccagctggctatgaagtgaataatggtactgaaagtaaacctgaagacctttctcagatctattttaagtctgagtctgaccaaccatggaaaatattcgacatgaattaatgtagagaactataaagcatttatgacagctccaagaaaaatcatctactctatgcaggagatatgtttagagacctctcagaaaaacttgcctggtttgagggtacacagtaccattttaatcttctgaaaatatctgtattcctgctctttttctgctgtcactgtcaatctgctatatttttcactatcctattaaaatattactgtctcctttatctgttcaatgtccatattttaaaaaaatcttccttgtatgagctattctgatctaaataatttctctgatatttctctatatggctcccacaacaatttcattgttgttagcatatctatttctccatacattgtaaaactgtaatccttaggtatttctaaaacataaagaggagaattaagtcagctgcagaacaatggggctgattcttctgctttttctctggaaaatctttcattgcttttggtggaaatttacctagaggttacaaccacaggatgtagcttggtctcttatttgcctttttgggaaaccaattaagattaatacaggataaaggaaaaaagcaatctattcattatataacacagttgtttgtattacttgttccctgcaaaggaaatctgttgaatgcttgcattttgaattcttttctaatagaacaaccaaaaaaggcttcttatggtgcagcaggaaaaaagatcatttttatagctttgcattcttaacatagcatttaaagagcggcatgaattagaggaaagacatggaacacacaggtagtcggtttgagatcatcggcttaaaagtatcctaggatggtaatgacccagaagtatttccagttgtctagtggtgtggtatgcaggaatgagaagtgttttctttccatttcctgttggacaggtggcaatcttagcagagccactatttggagttgataactaaagatgcaaataacatgactatgccttctggtcatcctaggactatttggagttctccaaaaccttgtaagaggcatgtcaggcatgcagtaaaagcatctacaacttcagctgggcactggcagcataggtctcatcttggaccatacagtcccactttatagaagagggtggaagttctccaaaacaatatccacaacaaagtctgacctcactctgagggagatgggaagtgggaggaagaaggactaaccagctccctggagtaagaggaatttgctttccctgtctgcccaccaggggctatatgtgccacctttcaggttggggccaaggaagtgatgtcagtgtgacagaagggagagttagacctccagacgtcagcctccctcccatggggtacattttcaatctgagtgttgttgccttagctgtgttggtattagcttgattggttggtccgctggttatgaggtgtagggaggcagtttttgtttagtttttaggactttgcctcttcctttgtccttagcataatttctaggcagagcatccacgaagtcggttttcattgccagctcaagagcgacaatcatttacgagttcctatgttatgttaggtgccttatgtatattatcccaaatccactgcatggtttaaatacaggcactggaatataaatgaaaaaggtcattacagtcactgactttctgcaggaccttaaacatttctctttccacaagtttccccttaatcatgtgtcaaacctctcttcctgacgggaatgttgtgctataatgaatctgcataacgcttgggattctaggaggaaggaaggttccatggacatgtaagtacagcatattcccctcagtcttctaggagggcagagtgaatcccagaactggtaagattgggaatctgagcattgccactttaatcttagaatatttatcattttgacacatcctgttttttagagaggaaaacaaacacagtttctgcattggtagtgtaaagcataccttgttaggaacgtgttttgtaagacacatttgggttgtcactctagagcatgtcaaactttgtacttcaaaatatatttagtatgattgttagtggtaacatatatcaaggctttgaattaactgttttatttaattttcacaagaagcacttattttagccataggaaaaccaatctgagctacaaatagttctttaaaataagcccaggttatttagctattctagaaagtgccgacttctttcaagaagcaggcattgtaggacagctgagaattatcacatagcctaaattctagcctggcagcaagagtcacatctgagatgtccaaaaaaaaaaaaaaaacacctgatctacattgaaagggggtagactaacgtatgtgagaccattttcctatttgcagttacaaggttaaagaactttgaaggtcattcggctgctaagaggcatgtcgaacactctgtgtggctctttcacagtaaaccctcctaagagcagaagacacatggctgttagtgtctgcgtttagatttaatttctcaaataaaggcccttggctgcgtatcatttcatccagttataaactagggctcctgcaagcacccccattctaagggtgaattattgaaatcagttgctatttgatgagtcacaactggcccagcaggcagggcatttgaagtcatggtcatcaaaaagaaatgattgttttttgaaaagctaaatgcttaaaatgcttctagagggaagtcgtggggcgtgtgctcattctctttaaaatcagggttgttgagtttgtttttaaacatttttataagttcatgagaaaaaatatataaattctaagaaccaacactgtattcccagaaacatgaccctcgctggtcttgggtccacatatcattggactctgggggacacaaagatgcctgtgacactttggtgttgccgagttagtcaacaattattctgggaaaaagcagaattgaattcttctctagatgtcctaccagggttggccaagggccacaaagcaggctaataaattcccacaggatccagacaccaggcaaaattgctctaagaagccagttactgtcatccctctatggttctagaaaaaatagtacaaaaatgacaggtcatcctatgagcgtcatgccaatgaaaccccatcttctggagaagcccttgaatcagaattatcttttttcttgatgtcgtcagatgcagccagtttcttaatttttttaaaaactgtatgtttctgtggtatgtatatttgtacacctaactacctggcacttggaaatcacagcactactcagaggcaattgaataaagagaaatttaattttaaatatcaagtcctgtcaaacatttctcaaacttctgattttatcaaaggtttgccagccaataaagtgcatcccaagtatacaggggagaaagctagactcctacagggtcctagagtttaagtaatttttttgttattaatataggtaataatttttctaatttttattttttggttccaaatgtaaagctccttgtgtttacctctgtttatgtcattcttgacatgtttatctaaattatgtgtgctctgtgacaggtgaaatgtaaatctgggatccatagtcaagatatcataaggacctacttcccagcctacctttcttcctctacctgataatgataatactcaaaataacaacattcaaaggaaacacaaagaaatcctgctttcacatctcctatttcttgggctccttaataactactgatggtttgttcatgaaaaaaaatttttaaatcaaaagattgtacttggccctgagttgaaaaaatttcaaaaatcaaaagtttgtacttggccctgagttgaaaaaaaaaattcacattctaagaataaacagaaaaatgttcttcttggaagtaaataacaaaagccatagtgttttcatttgtcttttcttcaggatacacggtagaagtcagagaatctttgatacttttatttggtgcaataatcaaggccatgcaacaacccaaaatcaagcattttggttcaagtcaggatgacatgagtggggacagaagctgtggcagtcattcaaataatctcatgggtcctgaggaaaagacaggagttaatgtattaagtttctactatatgcaggaactgtgttaaatattttacataagttttgataatagctaacattagctgagcacaaaatttgggccctgatttgtgctgagtatctttcacagattactgcttttaatcagcagtccttgtgagctaggtatgatcattatccccattttatagattacagatgagattctgaggcacaaagaggctaagtaacttgccaaagatcatacgatgttaagtaatggcccctggattcagtctgcagcctgaattcttaaccaattatactgtgatttcattattcttcagaattacactaaaaagaaggtattattcccattttacagatgaggtatctaagctcagagaagctaaacaacttgtgcaacaatcactaagcttataagcagtggattagggttagatttagatatttgtctggcatccaaacctgtgctctccctacagtaccacatggtttccacagtctcatcagaccccggaatttcactccctgagactgcttaattgtgaatttcccaaactgattcaccaagagcctactgtctctgctttgtagatagctttgaccacattcaatgacattaggaaagactccatttcccaagatggctcagaaaatcagatgctatgacgcatgttgaaagtgaaaacccatctctgagaaagaagcatctgttttattagtaaaaaaaaaaaatgaaatttacagcaatgttgtgtgacttctcaaaattctttcattttcttatttcagaatgaatagtgttgttcgttggctgggaatggggaagaatgtgatttttaaaaataaagcataatcaaactctgcataaaaggaagtgctccctttggctttctgccattttaactaaatgtaactcagggaactttcttattaagtagtgaatcagcacctagcatggcttgctactaaaccaataataacttaaggcatttcaacaagaataattctaaacagaataacgctgagggagtcacaagttttcagtatttcagactacactctgaaaaagagttacccctggaatcttagagtgtcacggtgccaatcccagtcaggacagcagtcaagtgcatgaggcagcaaacccttcccacctcaaagattcctcagtggaagatttctcaacaattatttctgtcaaaggcttcccagcaaggacacttttaaaccttacattttttccagtggttttttttttttccttttatatatcattgttattttgaaaacatctcctgaggaactagtgtgatagattctaaacatgggtttggaacagtcccatcaccaacttcaaaaaaagaagatgtgagcttctaggttaattgtaaaaactcattacatttgcagagctttattgacttaatttaaaatcatagaaccactaataaggtaacaattatgggggcttaagatgtgctaggtaccactctaagcacttttttggtcaccacaaaatgatgaaagtatgatgtaggtactattatcatcccactttaagatgagaaaattgaggtaaagaaaacttaaggaacttgtgtaacatggtagggctaagcctcgggacccaacagtcaaactctatggccatcatctaatcacaaggctatactacctcccctgattgcaagaagactcaggtcacaggtaaaaggaactgctcatcagaagtgatgagttttacatgtctcagagataactccaaagttacactaaaccttctaaatcaaaataagaaatagtgcaacatcttagagtttggtagctccaagcaatagacatttttaaacagggtgcatggggaaaagctgtagtttttatctccatcagcctatttgcttattacaactcaataatggcgaagggaagctcaacattttgctggtttctgttgaacaaattcccacagtgcactagaccacacgcctcaaacacctaccgcttccagccaaccagcatcacatattaccagagttatggtaatttatacctggcaaataaaggaagaacagaatagtgatgagagaaaccctcaaatttcagtaacaataatgcagagaataaggttccttccaatttttaaattaaaaagaagacaagacttttttttaatttaggaaaagcaaaaggtaatcatgtcttaaatgaacttcacatactattagatgagataaggtgtgtaaaccttgagcccacaagaagtacattggtagtgattaagagtgtgggctctagggccgcgctgcctgcctctgagtcccaggcctgcctcctgctggttgggagactttaaacaaaggattcagtcgccctgtgcttcaatacctcagctgtgaaacgaagacaataataggtgtacctcacaagttgttatgaagattaaatgaaacaatatgcattttgtatataaaacactgcctggcacagagaaagtattcaacacatgttagctattattattcttctaaggggcactcaataaacaatagctactattttaaaaacttccaatgaggaaaacacaattaaacaagttcttttgtgttctctgttaatatgaatcccagtttgagacccacaactaaaataggaaaagtagaaggagtgtcgctataaatttcacattgacacaagaaatctattcccaggagtcgttgagagatctttgtttcttctcttttttcttcttactgaagtttatatgtttacattcctctgtattcagcctgtttgtccattttttcctgctttgtgttcatctattgtgccagcattcttttcgtggtatacaaagatgagatcagattcaaaaagactggttcaatatttttataaaataacatcagctttgagcctctactataaagacactgttttcagttcaaagtaccaatgttaaatagaatgaatgtagtggacttagtaatatgaagagagctcttctggggaaatgtttgtaaaccaaacatattctctaaacaggatagttggtatcctgagtaacctggtagcatagttgaagcttaaataggcctattacactgaaagtggagcagttggcaaccctatccctgagactaccccacttcagacctgcaacagttgggctgacctaggagggcgcagctcacagctgtccttatccctcctttccacactgtcctaggacaaagggtcagcaacctggcctttttagagtaattgatccccttgcctgagaggcatgatcactttccaaaaacagaaagagtgaaacctcggcctgaacagagcaaactcccagctcagggcaagtgatgaaaaacaattctaagaagctgagccactgacatagggaggaacttaatattccagctgcctttcaaacccagggaatttttgtgggttttctggtacttctagaatccttctgagtcagaagcagaagtcaagactcatcttgaagataaaaaatcaaaacaagctgagattctgaaaatgttatctgaatccagaatagcttttgtttcaaatgcaattgaattgatttagtcttgctttccttttgtgccatttaattacatttaaaaataaagcaaaactaggcctcttactgtactaaaaacccctttgttcttttttcacctagcatatctaacactgataaagaaatgttcacaaaaccattttctagagctaagaatctctaaggaattggttgaactaatataatgtactaatttaaggtttcattgcaatccttccacaattagatctttggtttggagttttttttttaattcacactcagagtctgttggttgtggttggattacttattactgtttaacaaatggtgcagatcataattcttcacgtaagtccaatatgggctagattttgaattctgcattatgaaatactcactgaaatgtcacaactcattgtgggtggtattactgaaataaacagcaacactaaatatattacttagaacttttaattttaattttacattgaatgaactaatatgatttcctttatatacagcactttagtatgagcaaactattcccttcgtagtgtaacatatagctttccactttttgttcctagtgtaaaattaagatttccccaccttagagatagccccaccttagagattctgatttactaggtttgggtgggacctaggaatttgtttttgtaacatacaacccaggtgattctgatgctaatgggctgtgaactacactttgaataacacttttctaacatgcaaaccacttaaatcaactttattctttaaaacccataaatagttttcctgtttatccagtcagggacagccagacttgtaaactgcacctgcttccacagtcttagtgccccgtctaaaaggaacaggcaggcgctgaagcactcatcttgccgattttatttcaaacgtccaggagatggcagcaaactctccttccctctcagtgcttcacaggcagccattctaaagctcgttgcattacaatttgctttgaatattctttttttaaaaaagacaaaagactaaagggggccttgagacgtgatttttatctgaccccctgcttctaatcaagaatgagtataaatatttctagggatagaatagaatgatacaattttattatctagaaaagagattgaatttccttggctattttttcttatctctggggaaaaagattgtatgacttcccttggctgttgggccctagactctgttatctccaaatccaaaatattcttactaataactagcttaaatctatctggcagtaatctaaacattcttattttgggatctaggctaatggaaaattttgaagcactttgaatgcttattagctttttaaaatgaaaataaatacgattataaaattttcaaaagaaaaaggaagttcatgcactttatgcatcatagggaaagagcccaatatttttgtttaactttaacattaatcttggcaaatagagtagtatgtcaacaaaatgcaaaatcagtcagaggctgcttatatgttacaagagtgtacggaacaaagaaacaggcagacccacttggtgacggctttgatcctaacaagcacattgttttcaaaactttgaggcactaaagtttatttctaaaacagaaaagatggtgacgtgttggaagttctgtgatgtgaaatatatgtttgtacatttaccagtgggaggagaaaagactaatgggagagctggatattataaatgatgggttaatgctggagcctaggtcactgcacaggtttgatgccatgtggtcaatgaatgactgatctgttcattgtattttgtttgtttggttggttgttttttttcttttgtttttgttttgttttgttttgtttttagacagagtctcgctctgtcgcccaggctagagtgcagtggcaccatctcggcttactgccatgtttttttttgttttgttttttgtttttgttttggataattgcttaagaatttagacacacatactactaaaggatctctcttttcctctctttctctcaaatgtgtattgatgagggcctatccattttagtctccccagaagttactttttatcttaggctaagattacatatccatagcagttaagagggctgatgtagtattttagctaattcataatatttttgtaaattcatcaatgcatttgcatgaattaatactaaaagtgaaaaaattgtttaacaattgtaatagtcaataaatacctaacatcaaatcaaaatgaaggcaaactttgggatggggagaagtcaggagaatactaaagaatgagatccttttaataaatgtgtggtctacatggcaaaatttgctgtagtattaacatacaatgttatctcaagacaattatacattgcagcttcatgaatgcattaagaaagctatgccggccaggcgcagtggctcacgcctgtaatcccagcactttgggaagctgaggtgggtggatcacttgaggtcaggagtttaagaccagcctggtcgacatggtgaaaccccacctctattaaaaacacaaaaattagctgggcgtggtggcacatgcctgtaatcccaggtacccggcagggtgaggcaggagaattacttgaacctggggagcagaggttgcagtgagcccatatcgtactgctgcagtccagcctgggtgacagagacagactccgtctcaaaaaaaaaaaaaaaaaaaaaaaaaaagctatgcaaataaaaaccagctgtaatagcagctatagccatgggcaaaattaagtatttgatctctaatttcgtatgtctgataagtagacacacattccaataactcccgagacatcctttcagtgattaatgacagactacaactatatctggaattagtgttttcaatggaagtaaatgctgcttattctgaagaaatgtaactgggatacttctgataaaagatgtttcctaagtttcccatttgtatttgaaaagcacatgatcgtgaccatcattgtatacttctctttaacccatgtttctcctccagcaaaacaatcacacatttgaaaatcccacatagtttatggcatctccatgtctctaaaatgaaatgacatacatgaaattattgtgtaaattccctcaaacaggaaagatatcattaaataaaacttatcacttggaccagagatgtgataaaggaattgagcataatttttttctattctgtgcttaagaaaacaagctgttgatgcctttcctgatgaagagctggatttatgattcctaattttatttttatttattttatttttgagatggagtctcactctgtcgcccaggctggagtgcagtggcgtgatctcagctcactgcaacctccacctcccaagttcaagtgattaagattcctaattttaaacctcactctggggtcatgtttttgaccaggaaaacataaatatgatagggagtaaatcttacatttctcaaagaacagtaggttaaacaatttccccagggcccaggatattaatcaaaggttccatttaataagcttagaaacatagtggacagaaaagcagttacaaaggccaactcagtcattttcctcatcctgtattctccacatctttgtgaaattatgttgtcacacactgtatagttgctgtgtcttcgtcattgccattaactcgctttgaattgtcagagatttttaatgtaattagaagtcgtgacagaggatgcttctaaacacatcagtgggaagttttgggaatgttattgtgcagaggccaaatcaagtttgttacatggtatgcacacatttcttaagaatccttgttgttaacatcataactgataagatttttctctaaaaaagcaaaaggcattttaattgggaaataattttgcttaagggctattagctccacttcaaatagcagtcacataattataactgaatacaatacaaaacatgttagttttctgtactgataatcattactctcataataaattaagtgcttaccatgtgccaggtaccaacatttttctctacaaaaacttcccacatgctggatgcagtggctcactggaagcaacttgagagcctgaggtgagaggatgtcttgagcccgggaggttaaggctgcaatgagctatgataacaccactgctctctagccggggtgatagagcaagaccctgtctcaaaaaaacaaaaacccaaaaaactcccacaaggtcaaaagattgtttattttaaacaagatcaacattctttgtttattatgaaaattacttgtttctccatagaaactgacgaagtctgaactttttatatatactattcactttttctaccgtgggaatctaaatgaatgacgtttactatttaaatcttttgaggaaagagagaacttcagaaaatattttgaaatgtgtttaacatttattttttatgtttgaaccaattaaactagacttttatgaaaataaacttaaataaggctgttcctcaagaattataaaaaattaaaacagcaatcccaactacttaaatagaacacagtctatattaatacaagtattgtcacaggctctaacttgtagagtgacatacttcttttttgagaataaagaaaggtaagagggtaaaaattgctggtatagtagttttttctgttaacagagttaatgccttaacatacattatttaaataaaattttattacctatagctttacttctccaacttccctatacaagccagtatgtgcttgtatagggaaaattaccaatttagggtaatattagggtaaattacctaatttacatgcctcactttccttatttgcaaaatggaggccataaggttgttgagaggattaattgaggtaacaaatacagtgtttagaactgtagctagtacatagtaaaagttttgtacattttagttattattatcattgcttcaaagatgaaagagacaacaaaagtatatgcacacattcctccttcatgttggtcttctcgaccttaaactgtgtatcattacttttattcttttataacagaaggtttaaaaaaaatcaagaagtgtatattttggcccacttagacctagcaggaagatgaggtcagtggcaatgtttctggccaacccagctgcctgcattctgatgacaggagggcagccggggttggcacagcagcctcggaggcgtgcactgctaatgccacttcaaaggcaagtctccctcctatttttgtcctgggtcagcagcctgcctatgcagttgcctcttgaacaaaaggtcctgccaggtctctgacacctttagggccacacagtctcttcccacaataacaaaaataatcaccatttgttgagctacatggcattccatttataaacacaatctttactctgcccataatcttgaaactgtagccagcaatactcccatcttacaattaaggaaaataagactgggagaagttgaattgcgtggataacaaaagacaaaggcagaactttcaggtcaatgtgacatccaagtttccattccttccaatataagatgctggcctccattgtcatttacaagccttacgctttctcacaaacagatttcctagaagcagaaagtaaaactttttgtttaaaagtctgttgttttggaagagaaaatttaatctaaaagttaatctaagatgactggtgagtaacagaaccaagatgatatgctacatacaagaccctatctcttattttgatgtcagagtatgtccattgcattcatgaaactatttattttgtttatttattttttttttagatgaagtttcactcttgttgcccaggctagagtgcaatggcacaatctcagctcactgcaacctctgcctcccgggttccagcgattctcttgctttagcttcccaagcagctgagattacaggcatgagccaccatgcccgactaattttgtatttttagcagagacagggtttcaccatgttggccaggctgatcatgaactccttacctcagatgatccacccactcgacttcccaaagtgctgggattacaggcgtaagccactgtgcccagcccatgaaactatttaaacaacatgtgattacttggccacttttctattcaaaaatatggtttattagtcctgattatgtgcccttcttggcagacagaatgatactgtgtacttctgctgaaagaaatagaaactctcttccattttctagataagagagtcctaaaacagaatttccaaaaactccagttagtggaggtaaacttaaaatcctctttaagaaggcaagtgttagggaatgaggaaaagactattttattgagactagaacaaaatgaccttcaaagtgtttttatcctctaacttcaagcttgattgtatctaaaccacctcaagggagcgtttgttttatatttaaagacctttaggtaaagggattctatatctctatgcagaaattttttccagtgttgaactgtttctactgtcaagaaaattttcactgagggctcattagagctgggagggactctaggagattagttagtagaggctgccatttcctaacacgtacttgcagtctcatgataaacggtaaatcaactttcagcttgctcttcttcaaccctaactaattccaatctcttttatcgttttcttcttaggtctgatttatttaatcttgcaaatgtatttcaggttctctttagggtttatgcataattttctaagacttttctcaattgtgaaatcaaagccgtttgaaactcttaaacttccactgacctgaatgcaaatcatttatttgaaccttaaaaatcttccacctgtttagaaaaattggtttgttcataaatattgactagtcctgtctgtcttgttgaacatgacttggggtgcatattggtttgcatatattgaaggtggtggggatagttctgtttgtgtcccttgtcacatgtaactgatgtgtgagaggggctacatcttgtgaactgacgtaaaattctggtgaagataaccacattttcagtttatgacagcctgatgtagaaattatcattcattcaacaaatatttactaagcacctactattctggtgccaagtactgttctagggaagccttaaggaaacaaaaacctttacccttagatggaccttaatttctagtggagagagaaaaataaacaaatgattaagtagaatatttattatgttagatgagtgtaagtctaagggaaggattaaagcaggggagaaaggtaaggaattttgagagagggagggaattgccaagctgagtgatcatgtaatatttgagtaagtcctgaagaaaacaaggtaggagtcatgctggtacctggggtgagcaagtacaaaaatccagaggattggaaagtacaaaaatcctgaggcatgagtgtacctggtgtgttcaaggttcaaggccagtgtggctggaggaaagggagaggaagagaacatgaagaagatgaagtcagataatgcaaggagctagttggcagattttgtggggtcttgtaggtcaatgaaaggactttggtttttccttttttgaaatgaaaagccatgggaagtttttaaacagtagactgaataacataatctgacttgagttttaactgggtagttttggctagcatattaagaataaactaaaggaagcaagaatgaaactagggaaatcaattaggagacagtagcaataatccaggtgagaatttgtgatagcttagtccaggatgctaccagtggaggttgagaagacttggtcagatagtggatgtattttgaagtcagtgctgacagatcaggtgtggagtgtgagatggagagcagtcaacactgattcccaaaatttcaacttgagcaaatggaaaaatggagaatatctgtggtttcttctatttgtgtatcccttctaggacctctgcttttcagaaattctaatccatgattaaaaaggcaaaagaaatactttttattcctcttcacttttcttggacctcccagaatctgtgtatgataaagtatatgtttgtgatgatcatttactgatcatgtgtttaagagagaaaagagtcaaaggaattgaaatcatatttatcagttgacgcccctttccctacagtgcatgtgtaagcagggtttcagccaagagaattgtatcactttcaaggtttatggtataaaatagtttaaactttgactcacgacacatacatcagatttatcttctttggcttctaggacagtttacattgctttaaaattcacttctttgtgctaagtaaacctcagattacactttctttttgcatgtcaagtgttccctgccagttaaattggttactagacagctagacagtttaacaaggaagctaactaagctgttttattaacaagctgtgtggataaaccaacatttaattgacatgagaagatggtttatgttaagctgagaaaggccctcagctcctctgagcttttctcctgcatgcagagccccggatatctcatcttcatgcagcagaagtgcatctaaatgcgatgcactgtattccctacggcccggtcacctgcctgttcttgtgacaaatgccaagatgccagtattctttaatccaaatttaatccaaatttaaatgaccttttccaaaatttctaagatcttactccatttagtttgcatggttttgaatcttttttttaaaaaaaagatgttctcaggctgggtgcagtggctcacacatgtaatcccagcactttaggaggttgaggcaggcagatcacctgaggtcaggagttcaaggccagcctggccaacatggcaaaactccatctctactaaaagtacaaaaattagccaaccatagtggtaggcacctgtaatgccagctactcaggaggctgaggcaggagaatcacttcaacccgggaggcagaggttgcagtgagccaggatcgccccactgtactccaacctgggtgacaagagcgagattctgtctcaaaaaaaaaaaaagatattctctcaaaacaatatcattgcaagtatagtccaattagatttaggaactctggtatgagactgcctgcctgggttcaattttccaccccaacacttactagctttctacccttggggaaattacttactttcttcaaatctcactatcctctggaaaaatagggataataatagtgcctctacttcacggggttgtgacgattacgtgaaacactccacataaagaaatcagcccccactgcctggcatacaataagcaatctattaatgttggctatttttaaaggcagaggtagaaaaatgcctccttagtgttaagcccttttgtgggactatataacaccagatgactcatgagttcagtgggagtcttgcatgcattatattgggccagctaaagattggcgtgtgctctcgtgggttgaataatcaaagaacagaatactctaaatgcacacagactgaatgttccatatgcagtattaactataccatctgccagatgacatggtcccgcagtcattttgaatgatgtcttcactcagcacgtggccttgtgtttatgtacacacatctacttaagaagatcaagatattatacctgcattagccttgcccaacaaactggagggagaaggatgtggagaacttgagggagtgaatgacatagatattatttctccttagtttgaaaaataacagatagcaacaggatagtaaagatattcaaggagggtggaagaaactgggaatgtatgaaggaatggctgcatagaagtacaagtagatgtaatccatgttagcagaatcactggggtaaagccatgggaagcaatttttttttttttttttttttgagacggagtctcgctctgtcgcccaggctggagtgcagtggcgggatctcggctcactgcaagctccgcctcccgggttcacgccattctcctgcctcagcctcccgagtagctgggactacaagcgcccgccactacgcccggctaattttttgtatttttagtagagacggggtttcaccgttttttagccgggatggtctcgatctcctgacctcgtgatccgcccgcctcggcctcccaaagtgctgggattacaggcgtgagccaccgcgcccggccgggaagcaatgtttgattcaatgtaagaaagaagttcccaaaatctagagcctaaggattgaccaagatgctctggaaacaagtaacccctcttctctagagagaagactcagtgaggtataagctttcaactttattcgaagttattagagaaatttcttggaattgatttgtagaaaaatatttccaattttagcttatattttactttaaaaagaaaaataggagagagggagctttgtactgtactgaaaatgagatgacaggatgttgaagttttacccaaggcccccagatacaacagatgctgcccactgaagtgagattccagattcaaatgcagactctacaaagaatatagtagcaaatgacttccacaattcttgaaaccttcagccaggtccaagtgattaaaaggggttgattatggcaaggagagaggattctgtgagaaggaattccagagtgctgaagatgtgtgtgtttggagtgggtggcgtggagggggtttcacctttttacctcaagctgtgtgcaagaagagtttcaaagtgtcttcttagagaacttcatgggagatacttgcatgaggatgggtaggaggtcagagtggggtctgagtgccactcaggaaatttggagggaaagggacaggctgacaaactgttctggcacagaaccaggacattttcttctgcatccccacaggcaaatgatgtgagtgttccccatggaccaggccagtccaggctaggagcaagggagagctggctggggtcaacctggggcctctctgagggggcagatggatcctagtagctacacactgtaggtagacagcttcctaagggagcatataggatgagtccaaagtcactccctagaacagagaagaattagcatgaatcaaggactagaggtaagatgtccccagtgatgggaatctttcaatatcccataaaaatgtccctctctgggcctgtctggccccaagagtaagaggccagaacatgatgttgccaaatcaagtaaaaactttcttctcctcttttattctactcctttttttcctccaaccccagggggccagaaggcagagttagcgacctgagagaagaagtggaagtagagtgaagaagtcaaccacactccttccctgaaggaaggcagcctttctgaagcaggccccagctggggaaggagaggagatttaactctaataaagttgaaattggagtttgttatttcaggggatggcatcatctatttcaaaataaaactggtttgagtaacttaaggtaaccattgaactcttcctaaaagtaagcaaaatgtcccaggatctgctaagttttcttccagtggcagcagaaaacttttttttattaaataaagtttaaaaggtagtgggagacagaaagaagcaatttgatgggtaaagctaatttaacatcttggttacagttaagtgctctcatataaaaatattaaattcccttgatgatgatataacccatggtggaagtgacaacccaggacctaatccatgctatgctaggattccagcgtcagacattcaaactccaaaacaaaagaaacacctctgttactttcaggttcctttggtcgtttctggctcagggtatatcacatggcttcattcagccagccaaacagagaacagcctgagccttgaaactgtgatggacagaaggaaacagcaccaaaaaacactgtgaaaattgctttggggaaatacattaaaattagaagtatgggtgccagtagaggctagaggcttgcaatattttggacacaaacagaaactacattgtacctatggaatgatttatttatatcccagttggatctctaacctaaaatggtttatcatcttatcctctattactagcacttgaaagaatgtgaaggcatgttcgtcagtctggggaaatgtagaagagccatggtcattttgctcattgagctggttgctcttctttcctcactgctgttacatttgtcatatgcatgtttggcgtgagatttttgctttcagcttcaatcctaggttttaatttcccttcagaaagccctggcttactctttcaataccatacctcaatattttagttttctccctgcatattcatctctttgttaataggatatcactgaacaatattttgaactttataaattctgtcaagtttcaattcttctgaatattttcaaactcagtgcataagagaaacaccaaaaaataattcctctctttcatgtaatgttttggatgtcttatcactgcaatgtatgctttcacatagtacttaatactcccaagtatattgataattatttctttttccagttattagccagtaaattaaacacctgtatatatgttcaggggcctcaccgagatttctgtaaagtcttagctccctttatctattgccatcccctcagccttctatcttttaaaatacctaaataactgactaaagcagtccctcaaggtgctacatctaattgatgcaggattttttttagcctctttgccagacttgcaacaggggtgccctgtttactcagctcactgtgctcaaccccttgagggagggagcacatgagtgagtgagtgtgggatctggctggccactccgggcgccagcaggagcagacttcatgtgtggcccacagcggtgcccaggtgggggtgcttgcgaccccaaagccccagagggagcgttacagtgctctcttagttctgccgtccacagacggtggtttgttagcagctcagttggcctcttgcctcattgtgtggggtggctgcccttcatccgtgagggcaaagggccggtgtgatggcctttttgggtacctgcactcggtgggtcccaagctcttgtccggcgtccaggaagaatgaggtcacacagacaactgaagggcagagaattttactaagctacgaaaatggctctcagtggagagaggagctagacagcgaagaggatgggcaggttgtcttcccctgaagtcaggtcatctcttctgtagtctgtccatctccctcgaagtccagctgtctctctgaagtctggccgtctcctctaaggtccggccatctctccctctaccgactgagtctggggtctttataataggcacacggtgtgggtggggtgggccgcaggtagttttggaaaaagcaacattccactggtaaaaagacactattcacaaagaaccaatcaggagagaatgggcaaacaggaatagaagttctcactttgggctgtaagtttcagactattttggcttgaaggtggggtttcaccagggatccacctctgtctgcctagaatttgtctgcctcctgcctctatcataatcaaagaccacacaaagcaaaatcatgggactctgaaaactctcccagggcctctgtagaccactgttgttctaattcttccacagaaaggacaaaagtgatatacagacacacaccacaacagacagctacatttctctttatcacactgagtcttaccacttctcacagtttagaaaacttcctattttttcctgtcaagacagttaaagagtctcttctctatcttctctaaactgatcttgtttcttattatttatttatttattttttttttttgagacagagtcttgctctgtcacccaggctggagtgcagtggtgtgatctcagctcactacaacttctgcctcctgggttcaagtgattcttgtgcctcagcctcctgagtagcagggattacaggcctatgccatcacaccttggagaattcttttgtatttttagtagagatggggtttcaccatgttggccaggctggtcttgaactcctgatctcaagtgatccatctgcctcagcctccccaagagttgggattacaggcgtgagccactgcactggcccaaactggtcttctgtaattgacttaattcagctactgtggggctaaaactagtactggattgtgtgcttattgagggcaaggactttatcatctttaagtcttcagcttatagaagaatacctggaaatattaggtgtacaatatgttaatttatgttaaatgagtctatgaaatgaacacatacataatgtgaaatagaaactaaggccttaaaggtgactaaaagtcaggattccccacacctcacccaaatatagagtaaggagaattatgagtggttctgaattaagacaagattagtgaaagcaagtttttgctaagattcaaccattgtaagtaaaatttaaatgattaaaatgagagaatcaagatttattatattggaccccttattcttcagatagaaaccaggaatgaaccatctaccttctttgtgtacctaataataaaaaaaaaacgaaacatttgaatctgagatattttgcctaaatccaggtattgatattcactttaaagttaagaacttgattaagagaaaagctgttgaaactgtttatgaaattagagcacatttttaagcatggtaatgttttttgttaggaaacaggatgttttgatactttcaaagttgatactcctgtcccctaggtgtaccctttctgcgtttttgccaagagcttatctcacacagcctcatgcatattggaatgtgtgaagatgtaatgtggatagccagccatcagcattcctagaaatgcagaggagtaaaaggagagaatgagaacacaagaggtttcattaaattatattgctgtagccaggcaccggggctcatgtctgtaagcccagcaacttgggaggctgaggtgggaggatggcttgaggccaggagtctaataccaccagcctgggcaacagggagatcctgtctgtaaaaaagatttttaaaaatttagccaggcatagtggtgtgcacctgtagtcccaattacttgggaggctgaggcaggaggattgcttgagcccaggagtttgaggctgcagtgagccatgatcatgctctgcactccagcctgggcaacagaatgagaccccaactctatataataataattaataatattcctgtgttattagtcaagctgaatattaagtatacacagaggaatgttgcagggatacaaactctcaaagaaataggaatgtaatacacatgaaaggaagcaaaatgcaaattaaacaagaggcaggagtaattccctcagagacaaaggcaatacactccactcaggaaataaaaatccatgtgatcgtcaccatataaatagattttgagcggaaaagggccaggcagttaatcataccagtaatgttaactacatctaagaagctctggtttgtttttgctatattcattcactagaccaacattagataacagattaaaagtcacttgggaagagtaaaaagctcagtaatgtacagcttgtttctgaggttatcaataggttttgtttattttgtaccagcaaagcaggataggaataaggttgggatgtgaattcacatatgcttatgtggagggcagagagaaggaaaggtggttcctagtgatgacagagcccccgccctgcccctagtgactatgcctaagaaagatgatagcaactggggctatgcgttcacagatggggagcaactaggagggccaagtgcaaaaggtaagatcaagtggcagcccaccatttgcacttggcccacttttgcaaaggtggggacaggcagcatgtcctggctttaagactaagcattctggggggttaatttatttttatttttattttttatttttgcagtgcttggtaatggtgctaggaatactttggagtaacaatcagcacaaaccaaaatgaatgagatatattaatattttcattgtttttaggagagtgggcgctccctttctcttcctggaagatcagtcccaccccccatttctacatctccttgggtataccagcctacttatagttactctagtaaaccaaccgatggactagagaaagcaaacaagagaccaactccttgggaagcagcagcaaagtctcctctcggtctagtggatgatgctttccaacccagaaacatccaggaatccattgtggcaaatgtggtttcagcagctcggaggaaggtgcttccagggcctccagaggattggaatgaaagactgtcctatattcctcaaacccagaaggcctatatgggctcatgtggaaggcaagagtataatgtcacagccaataataatatgtccaccacctcccaatatggttcacagttgccatatgcatattataggcaggcttcaagaaatgattctgcaatcatgtccatggaaaccaggtctgattactgtcttccagtagctgattacaactacaacccacacccaaggggatggagacgccaaacatgaaagttagaagaacggatcatgtgccaactgtagttttttaaaaaaaacgctcctttgtagggttttaaacttttctaatagatttagattcacttttggtcttggcttgttctcataagtcatttatctaagtttgtgtttctgtgtgtgtgtgtgtgtgtgtatgtatgtgaatatacacacacacacacacacaggtgagtgtgaatacttccttgttggctgatccatagagcattacttggaagaaaatttcactatttgcattgatgtgctggcatttatatgtaattcataattttgattccattaataggtagtctatgcaacaaactctactcaattaaagtaaaactaagtatttcttcattgtaccttagtccaggaagaaattaatggaatatggtgtgctaattatcactacctataacatgaggaatataacattgcagaaatttctcataggggcatgccagtgagcaattactttataaaaatattttccttggtgttaagtatttctctgcaacttttttttttttttttttttttttttgagatggagtcttgctctgtcccacccagtctggagtgcaatggtgcgatcttggctcactgcaacctgcgcctcctgggttcaagcaattctcctgcctcagcctcctgagtagctgggattacaggcatgaaccaccacacctggataatttttgtatttttagtagacacaaagtttcaccatgttggtcagactggtcttgaactcctgacctcgtgatctgcccgcctcagcctcccaaagtgctgggattacaggcgtgagccaccacacctggcctttctgcaacatttttttaaaaaaatctaataaatcttagatttttaaaaaagaattaaaatgtgggagttctcagaaagaaataaacacatgagaataagattattacacattttggaaggacttttgaggaatgatgtgatgtgtagagaatagaaagatttagatatatgcctgtgacaggaatagattctgggttcaggggtccccatctgtcaaatgagaagattggattatctaatcttttagatccttaacaactctgatattctgagattctctcatttgtagaatgcccgctgatgcattgtttattttttttgctcataatataaatatcagattatgtttaggagtggattaggtaattagtgtcactacatgtatcattaaaggtcctaaaaggaattgttaggcggcaggctttgtgttacgtgttacatggagtgagggtagatgtgaagatttaaaacgattgatggatttaaggaagtggtacataaatatgtctgttattatgcaatcgtaggtcatgataatttattcagttatagaaaacatgccacagaagcctatgtaacaagtggtgcttctttagaaagttgtcattagaatgttctgaggaagttaagcagctgcttcatcaatcccatgacacatgccttgttagcatgcccatcaaataatcagatcaaacacctgctccttattgccatacccacgaactgttaaatataaaaaaattcaaagtatttgacatcttaagcaaatatccagaatatttttaagtaaaaaaccatcttaagtattcaaaatttccttggttttttaaaggtgataattttgctttgtgttacttttttgctcttgaatgtatcgttatgatggtctcttataatcatggtatctttcacagaataaaaattaaaaataatgccagggtgcaagtgaccaaggccttatcttgaaagttaaaaaaaaaaagtaaagaaatcacagtaagttctattagtgatgatagaaccagatataaaattgttcagtgatggagaaaagaaacgataaatactttccaaggttatattgttaaattatcttaaattatcaaggtgtaagatgtaatgatcccaagagtttttatagaatcctaaaaaataacgcctgatgtatagattagttagcaaattctcagaaatcccccacataaaagccttactttgttcaaaatttattatagtggtttaatcattttagatttgaatgttttaagataggagagacttagcagaaaatacttggcttgccagggccacgttctacttcattgctttcttttataagtgcaaggagttatttccatcagttgacatagatattattcactaaaattttcagcagactcaaaatagagaggagactttaaacttacatgttagcataaaacagacttctctctcattgcatgcactagatcaatattatcatctgtattaagctatctgaatttattcgagacattaagaaaaagacagtacatggtgggaaagctgcacatttctcacaaggaaaaaaacattctatatttgtagcagaaatcagtggtttgaaaagtcatactttgcagatatgaacctgaaaatcaaagtgccattgttaaatcatcctaaagtgtactgtgggtattctccagcatacttgaaaatgaataaagttagattgctcacattgaagctaatggttgagacaagacacctgccagagtgaagtttgattcctatgggtgagaagatgtagatgactattgttctcactaaagttctaaaataatagcaagtgtagagaagagccgttgctttgaaaatacataccacatttgttataaagcatttgtttgttagtatcaatcacataggtagaaagagtttgagttttactgtggattaaaaagccttccctaaaaagagagcatgccagtcatagagacactaatttggcacttttcctccttcttaggtttaaatgttataccaatgcatgtgtttgaaatatccattaagatgatttaaaatttgtcttgtattttgagtttcttaaatgcgtggattcttgttcatttatctctgaatatgtctcttttatattttggcacaattatacacattggaaagggccaacctattagggctcaagtatgtatatgcaaaaaaaaaaagttatatcaaacaggcacagttattacaactagagagaaattccagaaatatttgtttttttaagagaaagtaaattttcacattagatttctattcaaagtactaatatctacatggtccacacttttctattttaaaaaattgtgttctcttgttaaatagattaacatttccacttctgtttatcacaaaagactgtatttgaaatatgcatacggaaaattgaaattatattagtaataaatgtaacttgaaaaatcaa

SEQ ID NO: 33 - DNA, 194292 bp, Homo sapiens
aggttacttgactgggagttctcagacctccagtttcagccctgccctcagcctccaatccgtaagagacacccagccccagcaattggattgggcagcccgtcttgacacaccactgtgctgagtgcttgaggacgtgtttcaacagatggttggggttagtgtgtgtcatcacattcgagtggggattaagagaaggaaggctgccttgctggagctgtgtggtcttctccaagtgagagtcgcaggcaatagaactactttgcttttggaggaaaaggaggaattcattttcagcagacacaagaaaagcagtttttttttcaggtaaagtaaaagacattgaatgcttctctccccctctctcttttagcatagttttgaatggaatgctagcacggcacacttgtcaaagccagttgttgctgtcctatcaatgctgctattgtacggctgacagatgacggtgagcatagcttgatgcttggctgtctttgtagaactaacactcctcatgccttgcttttgaaggtgtagctaagaaaatacctttgggagccgcgtttgtaccttttcatatccccgttgtatactcaaaacaggagctataacttgcttgtagaggatagataaggctgagaaaggatttattttagctttcaaaattaaaattcactttcaaactgttgcattttactgctcaatttataaagattctttgaagggtctattactgagttgctggcagaggtggaagtgctttcttcaccgatttgtgcaaggtagattatgtctgatttatgacagagcaaagggtgttttaaaatatttttggagattgactctgaagtttggaaactcctgaagagaaggggctaccctctgaacagccactaggtcggctttaaaacaaaaatgcttagagctggaagaaaagcagagaaggaagaaggaggaaaatgctctttaacatagccctcttgcagctgcagggaaagcagatggaggtaattgatttgcagatctgtttgtgaaagttttacaagtcatggaaaactaaagtagcatctctgtaatggatcattaagagtcactacatttataggttttagaccggctaagtgaagtgttaattaaacgtaaatagattttcaggtttggttataaacagacaaacagaaaggatttaattataaactagtcattggaaattaatagtcatctggtgcctgagcaacacaaaatgagttgtcatcatatatgcgagtagccgtaacggctctaccaaaagcacccaccaatattgaattgaactatttataaatataagaagggggtttatatgctatgtttaatttatagtattaaaaaaaaggcctttcaattcaggctctattttcacagggatcaaaacataaaattttttattttccaaattttctagcaagataggtgagccaatgagacttctgctaccctaatatacttgccctccgatagcaacattcatatacctgtggtatgcagagcttctggctcctactggactttcacatttggcagagaaatccagcattatcctcaccctttgcaggtgagagattctatgaataatattgtatataagctgttctgaaataagagctgtttggtaggttgaataacaggatttatggctagtgctttgtgattttagtattcgattgcataaagatgcctgtaaaattatgtttcaagttgcattatacatatttttgcaaccatgcagataatttttttaaaatcctttttttaaaaaagttaagattaaaacaatattttaatatggtctttaatttttattcaaaatgttctccagttatactctcaaacttctccttcaatgagaaattatcctcataaatacccaggcagttattccgactgagtattatctgattcccaatattacataaccaaaatagatccaagttcataagctgaagtctttcggagttccagtcattccattttggctttacaatggaaatgaggttttaaaaaataaagacagaaaggcaagctaatatctcgtgttgtatcaggattagaactacatggacagcatatagcatgcatggtgctaactaccaataccatttttcactactgcagaaatatttcacaagaaagtcaagtgcctcctcacagatcggattttcctccctgagatgtggcatgatggcatctaacagaggcaaggtgctatttagcaacaggtgccccaccagcatacatccctgatgttgcagatcgatcacagggctgcctggacaggactttgacagtatgggacaattcccctgaaaaaaacaattgtacacaggattaggcaggatagaaacaagaaaggaagtgtggagagataataaattcacaccttgaaacggcagccgtgtttttgtccccctaacagggtaatgtgaagttacttcgtgaactgaaagggcttgcttgaaacacagtgtccacagggcaatcccagcttcttgtcaaaatcaaaatctactgtcccaggtggtaaacatgcagagacatatttatggcgacctctacatacctcagtttgacatttggtttcttcctgacagcacttgtgctggtaatacacatgaagttcccatcagcattctaccagctgtgaaagtgtttgagcacacgggatatcccttccagagaagcgaaaaataatggaggttgaggagatctgaaatgtgcactcggtatgcattaaggtgacagatcttagaggtgaaaagtgatctgaaagcttgatttgtgaaagtgacaaaattcatttttatggtggtgtgcaataccaaaatacattagtccaggtattcactgaatccatggtaggttatgagtaggaacctccatcaggaaactagaagggttctactctgttttccttctaagaaaatgtaagtgacttcatgcagattgttgtagccatttccatcataatagtagagacaagtggcaaatgggacatttcctatttccttccctaattatgtatccatattggaagggttagaggtttgtttcttctgtgttttatattgaaaatgggtttattctttaaaaatcctaggaccgggcacagtggctcacgcctgtaatcccaacattttgggaggccgaggcgggtggatcacctgagatcaggagttcaagtccagcctggccaacatggtgaaaccccaagtctactaaaaatacaaaaattagccaggcacggtggtgggcacctgtaatcccagctacttgggagtctgaggcaggagaattgcttgaacccgaaaggcggaggttgcagtgagccgagatcgtgtcattgcactgcagcctgggtgacaagagtgaaactccgtctaaaaaacaaaaaaaaccataaagcaagatttctgatactgagctatatatagtattgagatttccccaaccatcgccacatagatgaggccaaccaaagagtcagctcaggacatccggttttttttcccctgtgcaatatttttgtgtggagaacataaagtaaatttaaggggattaaaatttttaaaaccagactctaaatagatggtcgcttttatcattattgactttggggagaaggaggctcatgtatgaaactaagtctatgatcatgtggtaaattcagcttttatttaggttagaaccatgaaaatttttgaaaggagatatcttatggaaaaaaattgtcctgaaatatgtttcctatttaaattctttttaatctatcttaatatcctgaggaggtggggaattcgccagttagcctttttttcccctctcatattttcctctcccctatagccagtctgtcatcaaattctgtgagtccttcctttaaaatatctcccacatgtggcccatagctaccatcccagcgcaatgatcatctcacatgtgggccattgcaacagcctcctaaatggtccacttgcctccatttccctcttctgtctactactgcagactcagcttcctaaaatgtcagtttcatcaaagctcttctagtctgaaaattaccacataaacccttactacccataaaatgaatttcagtcctattctaatgtgctggccttctattatttggcccgaactttccaaccatttctccccgccaaatccccacaacctcagaagtctacccttccttccagctaaagtgggcagcacagcatctctactttctagccttttctttcagccctaaccactctagttttctatcttgtctttaaaatgagtttgtcatcatgtgcacggttccttctaagtctacattcataagcctgtgtgtaaaatgccccactcagttcatccttatcacctctatatattcatccttcaaagtttcagcttaagttccaccgcctttgagaagcctctctgaccgctacctcttccagcaatgcttttcttcccttcatgttgaccactggttatctatggattgcacttaaaacaattgctttattttttattctgctctatagtttgcttctttattccttgacttctcaggtggagtgacagggactggcctggtccactttaatgacccacagaagaccctaataagtgtgcttactaaactcaccaggacattcgaacactcaagacactttcctctctagagttaccccaatttagagccattcactggctccggtagcttcctccccacccaggacaggaaacgaaaaaaaaaaaaatgaaactcagtgggttttatttgggggaaacttaaggaaaatgcccctaaggcagaaagtgaaataattgccccagattaagcttgagtattatatgaaaaatccctatgaagttcagctttaactgtagtagaaattacatgtattggctgctgctctatcataaaatcccaaatatggctttggagcaggagagtacaggctctgggttcaaacagacctgtgttctaatccagggaccacctctctagctgtgtggccttggacagcgaactgacccattctgagattcagctccttcctctgtaaaatacagataggagtacttatcttgggaacattttaaagaaaacacataaatcacctagctcagtgcatatccaatattgtatgttcaataaatggaagtgagagagggttgattggtgcatatgtagatccagacctaggatgcaggaatgacaaacgttcagctatgtcagtcattaatcctatgtatctatgatgtgccttcctttagcattttcttctgccaccaaaggcaggggaataaggaaaggagggagagagcaagggagagaaagtgagagagagagagagagagaaggagggaggtgctcttggcatttagggatttggagcaactgagctaatggctctgtagggacagtagtgacagttaaatacacgttgagggagaaatgaagcatgaagccctgggtcctgcaccaaggataataaagagcaggccctgggccactgtgctatgctgttggggaacaaaggaccccatccctgtaccatagcagggatttggattctctaagggtcatgtgcttcccttctttcctcctggctcaccatctagaaagaaatattaataaaaacttggcaaaacattgtagagagtcagatcgagcttccagaagtaattgataaagcaagataccatttagacttcaccttcaaaccaaatttaacaaaaaagctgaaagcaatcagcttgagccccttaccattcccaaactctgcacccatcatcaaacattgaaccttctatttctgccttttccctggaagggcagctgactgtgaaattctctaacaaggcactgaatgccacttagcaaatatgtccttagacattggatattcagttctagctttctgatcatctggtctgcacctgccctcagccagggagaggaaagaaactggaactgcctgggatgatgggtaaggcagtatttctggagatccctccctctccctagcaaacatatctatcaaattttcaaagagaggcattaacaatcacatttgacaccatcgtcacctgtagccgctaagctagtcttcgttgccctctaaatatgtggtccatgtactcctgcacagtagtgtattaaactttttaaattttaatttaatttaattttttgagacaatgtctcactctctcatccaggctggagggcaattgcaagatcatagcttacagcagcctccgtcttctgggctcaagtgatcctcctgcctcagtctcatgagtagctaggattgccagcatgcaccaccatacccagctattttttatttttaattttttagagactgggtctcactatggtacccaggctggtctcaaactcttagcctcaagtggtcctcccagttcagcctcccaaagtgctggtattacaggtgtgagcaaccacaccggccctaagccacttttaattaaaaaaaaaaatgtagctcttcgctttaccttcaaaggttaaatttttcttttgctgttttatttttgtttttgtttactacacaggtacaaacctgtaggaaactatgtctacgttttctaaaatatgaatctaagggacttggacatgctactgtttaactgctgtcggtgagattaatactaaatctctgtgcggaataaatgaacagacagattgtgtttctcaatcaaaagttttaattgtaaaaggtagactctctcaaaataaatctataaattttgggtcgtactaatcaaattctaaaataaagttagaaggcttgtgatgggagtggagtttgggaactggcaagagtccacatggctcttgttgaatataaactaaaaaacattctaaagctggatggacaatcaattcatgagcaagcctagacattttcataaaacagtatccttgtaagatggggatttgtcttattacatatccaatcacattataccataacaattgaattgtctgttcttaagcaatggactctgatgtagatttcatctactgtcatgtagttttcctcttgctcttctttgttttgctctattcttttgttggcattgaccaaatcttcagctgagcaacaaactgctgtaaccagatgctagttctgttgctagaattaatggaaactctgaactaatttttttattttgtcctatgatctttccaatcagtaaatagtgttactaatacatgcaactttttccacttcatagtacgcaaataatttctgagacaggtttgtttcaagaactcaggaaaatctccttgtattcctttgatgacagaggctcaaagattattcagtctaagtgtcttcccattttcctgaacaacactggcacatttagcccattcttaaaaaccaaaatggaaatctgaaatacaaagagttctgtttattgtccagtttttttggtatgatgttacaggcataatctgctatattaatttaaagtaaaactaaaggttacacaattaaaagatattagctataccagaattatggtgggaaaagactaattgcattccaatgtacatttattgatcagttactttagaagtgtgcacctctagatattatcttcaaactcctatcacaaatatgcctttgcttcccaatcacctttctgtcatataacatgtgttctgaatagacttcttgccaatttaaagtttcacccttaaccttcacctgccaataatcaatcttctcctgaatagaatgtccctgtaaacagatgtgctttaccgtgcatccagaaattcttgaaaccagcttttaactttcatcttataaaaagtgcatcccacaaaagacaggccccctacaaatcatgttctctttttttcttctgagaactttatgctggtaaaagaaaagaaagttttccgaatataacagataaataaaagcataggacatgtaatattttttacttgggatgcctagaggctttacatgtgttatcacattctttttcatatgtgatattgagatttagtaaaggagatttatgatatggacccaatatcaaacagattaaatctttttattttactttgactcagtttccttctctgtaaaatggagttaagtttatcacaaaaggttgttataaagattagatgagataataaaataagatgcttaacacagaatatagaacagagaaactgcacaaacacaaaacacaaaagctacatttttgttccaagatggcaaaagacatggcttgagctgaggcttggtgataaagtgagtatgtccttttcaaataaaaatagcccttcttaatctcatgatctgtatgacacaatttggaaatataatgaaggtggccacttggcaaagaagagaaagaggaagagggagggaaagaggatagaggcaaagaagagaaaaaaaggaatggaagaggaggggaaacattgtgatcctctcttgcctctgctctgtgccttgctataataagcatttcatgtcatagctaagtcaggccagattctagagtgtcctaacacatcaggtagagaggttggacttgatagctaaacagatgccttaggaagttcaagcagtaggtttttaagaataaagagagattaaggaaaaatgagagtgacagtgagtgagcagagacagagagagaaagagagagggggataacaagacaattgatccccagagttcaaataaattaaaaaaaaaatgttgtctattcccatcgacgcagtgggaataaggaaaggatgggtgtaagaaacatggtgaagaaataaataacaataatgcaacttggtgattagtcaaatagaggacaaaagagagaaaaatactgaggtatcaagcccaggacacagggaaatggtggctcaatctaaagctactgaaaatggaatttcattcggcaacacaatacattcccaaagtgacaatggtcattatggaacaaatgtttatctgttatctgtgaacagactacactcaatagaactttataatgcaaacatatgtaaatatatgtgtatatcaatgtttaataatatatgtgctgctgaagcaagcactcaatgtttaataatataatttaaatagatacaatctaatgttctgatcattggtgggcattagacagaatacacaactgtgattttcataaggcatatgccgccttagatttaaaaaaaaattttctcagattaagaaaatggttggccaagtaacaatctagcatttctataactttggggaagttacggatattcgagtcaaaatactcaactacatctgcataacacctatataattctcttcttttgactaagagactgttagtggagcggaacatgaaatttaaaaagtctagaggcaagaagagatgaaatatttaagttgcctatgctcacaaaccttcatattctaccttggaggaggctgattgacatcctttcacagaatgtaccaatgacttattcacaaatgaaatacacgttcccttcttcactacaaagacaaatcatccttaattttatgatttgggaatggtttccccattcccctgcttttctttctatccccttttgttttgtccttttttgttttatttgtttcaaccatttcctattcaaaataagagggccattctctagtcaagtcttcctactaaatcaatgggcagttttcagaactaggtatagatttcttagaagtagaagattgtgtttgccttttcaaactcgtgcattatatgttggaggcagcatgactgaaagaatacagagcttgagtcagcaaaatctggaactgaaatgtagccctgttactgaaaatttgtgggaatagcattgaccatggagacttgacagcattttcgttcctcaaaagagacttgggtcccattcaagtttttaatgaagactttggcctgttctatgttacccaactgggttttctgaaccatattccctagttcccctggaagaaacgccagcctaagtatcagcacctgtaatctatttctcactcagggttgccagacatgagggattaattgacatgagccagtttatatttggaagccattaatggctagcaactgaattgttgagacatccagtgcaacgaaccagagaggaaagaataacacacaagtgccatagttagatcaataaacatcatcttcggcaagcacaaacgttgggtttagctgccaaacttaaaactaggtctcttcatctagtacccacttaggtcaatgggccagggtcctggtatagagattagggactgaaacatgagttgatatttccaaacttcttaattttggattgtctaagttcagatttcaattcaagattctactcctacatgttacgcttttagatctgtcttggaggtacaaagacttctggaattagagaagtttggtccttctaagaagagaaaaatgaataagtagagaagtcagaaaaaagaatacaatgcagtcaaaacatgttctgtcatacagagtcaccttaccttttcgatgtaaaaaccaggacagaaaacggggggaaaaataagctatatgaaaaacttcatgtatagcaattgttattctcattagcctttcttctacaaaaatagctgtctattcatctaacattctggtgaactactacagtagtctcagaagtgaaattaaaagtgttcctacaattgcttctaccactgtcataacccctttggaagcttagaatactccacttaacttcctcatctgcttcaggcaaatcatatttcttgttgcgcaaataaaattaaaatgtatattttattattcccctggtaacttttcaagtctgaaaaaataattaagcacactattagcaatgaaataaaatttgctgaataatgacagcagtgttggagccaggaaaaagaggcagggtggtacagtggaaagatattagaaatctggattctagaacttggctactattaatagtgtgattttgagcaaattagttaagatttcaggagcatgccatcatctctttgcctgcattctgccattcccttcacctagatggcattattctccttctttactggcaaactctgctcttcctttaagacaagcttaaataaataaagcattctcctttgtttttttttgagaaagtgtctcgctctgtcactcaggcagggtgcagtggtgtgatcatggctcattgcagtgttgacctcctgggcttaatagatcctcccacctcagcctcccaagtagctgggacctccagcacacaccagcctggctaaatttttcctattttctatagagatgggttctccctatgttgcccaactggtctcaaaccgctgggctaaagcaatcccctgcctcagcattccaaagtgctaggattacaggtgcaagccactgtacccagcctaagcattctccttgaaactaaaaagaatggttggaggaaagaggaaggacttcaatccagttctgcatcacctcgtgcatctgaaataagctctgtaccttatctctttcttatctccactcatcttacctactgccattaaactcatcttatttctacactgtttcatcatatcactccactactctaaaacacctgtctcccaattttctgcagcatccagtctaaataaatgaccagcaattaagaacctccatgatcttttccactatgaccatcccactccccctatacactttctgctctttcctaaagtggttcaacatgtcctgaatttacatctttacttctgctacaaggcacgtgctcacactgttttctgggctaggactgcctcccatcatggttctgcatgtccaaattccatccatccttgaaaagaaagactcaagcctcattacctccatggaactttcttttcctaactcttccaaccatcaataatctctctctcatctgtgctctttttccacttaaaatcttgtcacataattttagctcttaattatgtacaattttgcatttattcttattctcatcatttttttaaattgccttctctctcttatattttgagaaacagtaagacaagttgagttttgagcctctgcatctatcaagcatagcttcaaggtggtagagccagtacatcctaaaggccttcattacacattcacagttagaatgatcaaggactactgggatagaacattatattttagtcattgagaattttaggaaactaatcagcagcacattcacaactaccccgggcattcttttgacaatgtggaaggcaccatctcatgcactgattctctggctcagattttttgtttccatcttctgcccacatcactctccagggctgcatttgcgccagctggattccatccagaaacagattcaaatagacaataggccaactagaattcccatcttccttgattagatgtgaaattgtatagctgggtgtcactcacatgccagccactcaggattctatgttatcaattaatttctcttgagagctgaactgaggagattgtgacaattctgttttcaaggacctgtaaaataacagctagaccagatttttatggatagtgctagatatataggcctgtccactatctgccgcatagcataaattaaaacaccctgttaatttcatagtaaatcgtattgggtgtttttttcttctgcagtgtgaatggattgtaaaaattttgtctaggaatggcattctcatttgtaggacaattagcaactgaggtaaaaggtttatattacttagaagaaagacgaacttattgcacactgtcaaaactactgaatcttatttgttgttgttgcttcaataacttagaatttgcagtggattttccaggaaaggatatcatagaaacacagaatgttggaggcgtacctccaacaatctaagctaaatctaagcagaatgttggaggcataccttagagatcatctaagcagaatctctcagtttacatctgaggaaacacaggactgggtttgttgggagacctgcctaaaatcacaaaactcattcttacaaggcagagttctaaatccaggctttatctttctaaaaagtatgagtcggtaaattctaccgggatgaaaatgagttcatgtgtccactttacattgggacccgacaaggaaaagagatgagtccagctcccttttcgaccatggactttcttgctgagggctaccgtgagtaatcaggcagtgtaaatgatgattgggactggaacaaatacaagaaaaagctttttttttttcagatgtactccttatggaaaatctgttctaattgagatcaccaagcaccgttgctatggatgatctgtgcaaacatgcagctttatcatagagaaacttctttgtaaaagcattttttaacatacacttaaagaacacactatccactgttgatgatgacaatattaaccattacgacttcaaaacaattttcacttgcactaaaccactggaacttgtaatatttgagtaaggaaagcagtgtgtcatttctgtacaccagaaaactgaagctgagggacagcatgccatttgcctgagtctaaacacctgagtgaggtaattagtgttagaactcatgtcttctggatcccacttcactgcctaatacttcaaatgatttcaaatataccatatttggtcaatattagggatacctattgcattagaacagttgaactgtccccttagtaatgtcaccttactgggaaataaacatttgaatacttcctcaagtactggaactttcccaagagaagtatatgagcaatattcttcatagcttaataaattacatgattgtatatacaattatgcatctatataatttgcatttgaagctgatttatttgtaaaagaagtagcagtattcattattagattataaatgtatttcctagtcataacttccatttgttattttgtactataaggaataacaatttaataactcaaaataaaaagattaatttagaatatcctaagtatgattctgactttttaaaaaagttttgtttttcactgcatgttctcactcataggtgggaattgaacaatgagaacacatggacacaggaaggggaacatcacactctggggactgttgtgggatgggggaggggggagggatagcattaggagatatacctaatgctaaatgatgagttaatgggtgcagcacaccagcatggcacatgtatacatatgtaacaaacctgcacattgtgcacatgtaccctaaaacttaaagtataataataataaaataaaaataaaaataaaagttttgtttttaagacatgttctagatttcctttttggtgttgtaagtatctcaagaaagccattatgatttccagagcaatgaaagaaatacgtcataggaaaaagagcattttcgttcatatttttaggttattggtcatatttcaatccactggaaaatgtgattgcaaatctggttagatttataaaaatatcaggcttaccagtattacaacttcttatgaaagtgtgaattctgttgagaatgtgaagataaagtggcagaataattatctttttttatatctaaactttataatagtgaatgctgttgaaaaagggattctatgaaagttattttttgatccataagaatactttgttcatactattttccttttcttaaatttccaatttttattttaagtttagggatacatgagcaggttgtgcaggtgtgttccataggtaaacgtgtgccatggtggtttgctgcacagatcaccccatcacccaggtattaagccaagcttccattagctattcttcctgatgcttttcctcctcccaaccactcaccctatgacaggccccggtgtgtgttgctccccgccattgtgtccatgtgttctcatcattcagctcccacttataagtgagaacatgcggtatttggttttctcttcctgagttagtttgctaaggataatggcctccagctccatccatgtccctgtgaaggacatgatctctttcttttttatattcatactattttcagctaagcctatacattagacacttctataaaacagtgcttccctatttcctatttatatctcagttgttgtttataatgaaaataaagtatgccattttcactactcaaagaaaagaccagaagaaataaagctgagctcttactaaactcttaacagctgtattcttgatcttccattgagtagcaactgctctttagtttctatcaccttgcctcaaacatggtcataacctccaccaaaaagaccacataaaatagcaaactgttgaaatgagaaagagcaccaagaaaagatgtaagtccttgcaggaggaatgcaactcaaaaaggatgacacagagggtgagggcatcagactcttttgctctcaccactgagaaaaatttggcactataaccggctagataatgggctctcttcatttgcactctactaccatttgtaaatcctctgaagttttaagtaatttgattttccccatagtttatgaaatatacaacctttagttttatataacaatttatacttttcaacatgcctttaaacatttcatttggttttgacaaccttatggatcatgccacataactaagtacttgtgcccattttaaagaaatagaaacagaggcacatctttggtgacacatactgaaatattaatgtatagtggtataagatcatgatgtgtgcagtttactgtcaatagttcaagggaggaatatatatatatataattttataaaatctctgtttgtatatatagagagagaggggcagggggagggaatgaaattgataaggcaagacattggggcaagtcgttaaccataaatgactatgggtaactggtatgtaagtgttctttctactattcttccagcttttccgtaagtttgaaattattttcaaatacaaatttttaaaaattaattaaggaaaattaagtaatttgtataaataaacagctgattagaggcaaagtgaacaactaggatccaggtctcctaactataatctatttctgtaaactgaaagtaatttccacttaaattatagtcagcccttcatatccacagttccacctcagtggattaaaccaaccttggatagaaaaactattcaggggaaaaaaatacaacaataaaaaaatacaaattttagaatacagtatattatatttacatagcacttaccttacattgggtattataagtaatctagagaggattcaaagtatatcggaagatgtgtgtagattatatgcaaatattatgtcatcatatatcagggacttgagcacccctgattttggtatctacagtggggctctggaatcaattctccaaggagaccaagggaacgagggagactgtatttataatcacaatcatacgttttgccagtcagtcatcaataatcaataccatagctcacgagaaactcataatgatttattaataacctttatttatatatcatactacttattgcaaactgttttcactgaccttattttatttggtcttcataatgcttccaatgaagtggattggacaggcattgtgggacccattttacagactaagaaacaggctgtgaaggttacttataccattaatgttcacagctactaaacggcagaatttagaaggatgccaagagagaatactggaaagagcactggttctggaatttaggatttaaattccaatatgccttcttagcattctaatgcctttttatactcctactgaccatacctaaaacttctagggctcgtattatatttcgcaatagaaaagcaatgttcttgccggcacggtggctcacacctcacctgtagtcccagctaatcaagaggctgaggcaggaggatcacgtgaaccttagagttccaggctgcaatgagctatgattgtgtccactgcaacccagcctgggcaacagagcaagaccctgtccctaacaaagcaaaaaacaaaaacattctcttaaagaacaaaacaaaatgactgagaaagatgtctgttttacttactaatgttatatgtaacaataacagctaagatttattaaatacatgcttaccatgtacaagtaagtgctatacatacattatctaatttaatttatgcaacatctctatgacatagaattatcttggtcccagtcttacaagcaaggaaataggctctgagagtttgactgacttggccaagtttacagacttgcaggggccaaggttggatatggacccagaaatctgactccatacccgctaccattaactagtccttattccacattttcctttttttcctttaagctcagttgactttttaacgaatgtcttttcctcatatttagtaatttttaaattctgaaattaagataatgctttctagaaacatagtttatatggaaaaatatttgcatgaaaaaatagaccctccttcttatttgcaacctcttgaaagcaggcaccacatcttatctgcatcaacagcagctcctggcacacatggaacattcaataaatgtttgttaaatgaatgaataatgttcagagttctctattaaaaagttcttacatgatctaaatacttaaagacaggacctaaaaattaagttggctcaattcaccaaatctcaactttatagtaaagcacacagttttggtcccagaaaaacaaataaatgaaagcagaaaacaaatttcacttttaagaaatttttaattctgcccttggaaagttgaactgctctgtggatgtttcaacaaatgtggcctttaactatctggataatcttttttagattataatctatagtctgcatgacaaaaagtgatgcccaggctcactaatgtctgcatttcattattttccttttgctgtaaccagataggatttaaaaaaggagaaacagtcaagcaaggaccatggtctcaggaaaggaggagaaccacctccaggatatacagcttgctttcatcttcctcttcttcttcttcttcttcttcttcttcttcttcttttcttcctcctcctcctcctcttcgagacaggagtcacaccatgttgctcagtctgatctggaactcctgagctcaagctactgtcctgcctcagcctcctgagtatctgggactacaggtgcatgtcacagcacccggctacagccagctttccaaggtgcccatcacagctgccctctgagcaatgactcaggaagggaccagttggagggaagatgggagctcaggaaaagtgtcaggatacaccttgcaacctccttcttctaacccgtgctttcagcccttccttttgtggtttcttcccactccaaaatttcccataatatttatttgcataaattttccccaaaataggaatgactaggcatattgagaggaccacatttacctaccgcccttcccactttagtaatagcatcattgttctaccctgtgcattccagtatagcacacagacatcttaagtgcagaacttaactttattgcaacataagggaatttcggggtaaaaactgcattcgtgaaatcaatcacacatggggctcaggttactcagcctggcatggttcaaagccttatagcaattcctcgtaggcgctgcctgttgtcactcccttggctgtctgtcacccttgcctcaggctccagccttagcctcagcttcttcttcctaatgcacctgccagccccagacatgggtactttccagattctgcagaatgaggctttttcctgtctaagtctcagcacatccttatcagcatctcacacagactgcaacctctgcagtcggcttgtgtccagggtcctagtccccatcactgcttcctctttatactctccgcccaatgcctgctcctgtgcgttcccacactcctgccctctggcatgtacagtttcacatttgtaatctatgcctctacgtacttacaagaagaggaggtgaaaaactggatttggcacatattgaatttcttggaccgtgttcatttttttctgtgtctggaatccactgttttctagcaaaaactttcttaagatttcaaacaccaaccctaacactctgagtttacctgcttgaatgactgcctgtccctcgggctgaagtcacaacattcaggttattattaatgattgtcaatcaccatctttttgggtccctgttgttttgccttcatataatttaatatttctatttaaacacagaaacttgggcaactgtcagagtcactcctcagctaatgctccctggaaagggcatatgctttttgctcactcaaggcagataatactgaacaagtgcttaagaacgttcatgccataaaagactctcagaaaaggaaggagaaactgaacgataccgagtccttacacatgcaggacacggctatttcctttcagattttgtaattcctatactggtcattctagttctaagtaaagaaaccaggctttttttaaaaaaaaaaaatcacaaatctgtagagctaggatttggacccaagtcagtttgtctccaaaaattcatgcgttttctcaaaagaaagttctatataaatgctaaacagaaaacccagtcattaattacatggaggcagtttacattttcctgcaatttacacctttttttttccagactaattaaatttcctacgctggtaaagtgcttcttcccacagtttactagagtttttggtaaagagctaaaagaaggtttgctgtgaagctggcgaggaagagaagactgagattccaataaaaacttgttaactggcgtgcaacaccgtgcctattaagagtagaacaactctcctacagaacacacagccgagtctatacattgcttgttaagtactggcccaagtgctcatgtctcagacttgtcccttggacccatgcccaagccagccctgagagggttggaacaactcccccgcccctgcagaaaacacgactggttatttagaatctagggcatcacaatgaacatggctcagtattttcataaggtattactactgttgttctgaaaaagcaaggcatgcgcgcacttacttaatatgttctttgttgatttacacgtccttgatttttaaatcacttccagaaattcctagtaaatgggaaaagaatttctcaaataaatatgttatcttttcctccaacagaatgccagatcacttcttgaaagatcgtttccagattcttcttcagttcaaactgattttcacaaacttgaatctgcacgccataattaggaagctactgcaggccaatttatttggttaatttgcatcagtctaaataatttttcctgacagattacttccgttctaagtaccaagtactttttaatcctagtcaggttattgctaaggataaatgatttcacatttctcataaagatgcctgtcattaagaatattaacacaaattccttccccttgaatagaaatgagctgtcattttagcaatcttgctgtgtcagcctttctattgtcaaacacaacaaatgatgggaaaatcaatttactctttagaattagtcaagtgaggaatcctttgaagtgggggtgcagagtttcgcctgaattctataatcacgtaacagcgagtactgtatgtatgttggtaaaatgttgtgaaatttaatgaggactatttgttgccataagaccttccagacagaatctatctctgaaaaagaattccccactcctaaaatagaggtctgatgagcaacagatgtggtttaaatgaacccttgttcaactgaaccaagaatatattgtgatctgtatgaggcacaattcagaagagaggggaggtggctacagcacagcctcagtgttgagtttggttgtggggtttaaacatatttatttatttcataaagtttctctcataaggcacaatgcaaatgagcttttaattaatacaatctaatgttcagaggatggtcttcatgctgtttataaaacaatttacatttttattttgtagtctaagaacgtgtgtcgaaaagcatgtcagtgagtagccataaccttcagagtgatctatgtcctggcaatgatttgtaagttccacaactcagtttctccacccataaagagaagattagatcgttgttcaagaatgacaactatttaatatttggaaatgactaaataatgaagtgcctggattctatagaaatgccgaggagaaaagaagattaatttcaaaccaaagtctagtgcaaacatgaccttcctattgtaaatctcatgaataggagaagaaataacatctaaagctttgtttctagggctgagactctggaaatatattaattttaggttgtttctgatggcaaaaaaaaagatccgtctattacaatctcttgcctgtggagatgagaaaaaattcttcctgctacctttgactgaaataatgcagttagcaaagatttaaatgacaagagtagaagtgtcatctttttgtccctttgcctctaggcaggactacagttaagccatctcaggaaagagaagagtgctattgctcccaaaactctccaggtgagaatgataaaaattaaaaacagcaagtgagaaaactcaggggccctgaaattaataaaggtcagttccagctcacatcgtttcagttaaaatttatttctatttggaaatagcctaacagcaaaactccaacggatgggctgtttggcactagttctcggtgaaaattccatttagtattactactactgtctgatctttttctattcagcctcctcttcaccctgttggtgagggagggaggccatcctagggatctggggatggccaaatacacagcacccaacagtggacagatgacagccacagcagcttaaaagtcacataaactcacagcccagggaaggaggatcagggaaggaggataacacataccatgcagggcacacaggggttgcaccgggaacagagtggacaagcagaggctgcaggaggcagtagtaacaagagaatgcggtgccctgaggctccccggggaaggtgtaattggcttgtttgaataattgtgtgggctggtaaggaagtaaaacccataaggttgaagacctggtggagtgaggctggcccagctgacagaggaatgagccaggtgggcgtcctttcttgctggaggggacatatctatgaaagcaggggagctcacagttaggccttggggggtcctgatgaggctcaaagataataaataccaaggtaacacgtgagattttaggcgttacaagccgatccatacaaactaaaccgacttatatgagactcatgttcccttgaccatgcctgatctctctaaggtcttttccacacctattttgtctcacaggaaaagagccacttttgactagattgataaaatgggagtttaagcaatttttctagcaggaggactctcaggccaagaccatgtaattagctaaatgactcatgcagaagtatcctacactcctccctttggtttgaatgaaaagagtaggagagccctaaatcatccagacaaattacatctttaactctttacttaattttagtctgtcacaaggtaaatattgacaaactttagacttatagccagagggctaaaaaaaaaaaataagtctagcttgccactgtggctgttttctgccctccatttttctttctttctctttttttttttttttttttttttgagatggagtcttgctctgtcgcccaggctggagtgcagaggggcgatcttggctcactgcaagctccgcctcccaggttcaggccattctcctacctcagcctcccaagtagctgggactacaggtgcctgccaccatgcccagctaatttcttgtattttcagtagagacggggtttcaccatgttagccaggatggtctccatttcctgaccttgtgatcaggagcatgagccactgcgcccggcccccgccttccgtttttcaagaatactgtcgggacacacacaggtcagggaaatgtagattctctcatttcccctggtttttaacaaatgtcctttatataaaagacaaaacttgagatgttcaggctctgtctgaaactactggcctcttgcatcctttagataaaggacatttgaagttaatgctgggcctgtcatccttagttataccacgttggacaaggcattttatcttctggatcccaagttccatacttttcttttttttttttttttttgagatggggtctcactgtgttgcccaggctggaatgcagtggcacaatctgggctcactgcaacctctgcctcctgggctcaagtgatcctcccacttcagcctcccaagtagctgggactacaggtatgcgccaccacacctggctaatttttttattttttgcagagacggggtttcatcatgttgcccatgctagtctcgaacttctggctcaagcaatccacccgccttggcctccaaagcactggcattataggcatgagccaccatgcatggctatactctttaatgaggaagttaaacaagagtttaaaaatttttttttagcaacaaaaccattgtctcaaacaaagtcttaagtcactctataaaacagatggagataatatttctccatttgactccaactgagtaaagtccaagccagattgcctggcctccctcacattcgtccccttcccacacactgccaaggttcctgaagtaccccttgaaagcctaaagcttgttggaacccagtttgaaaaccaccagatgagataatatctcaggtttcttccagctttcagtagaatagaaaaatcattgactatggaatcagacctagattcaaatcctagttctgtcactttctaagctgtatgaccagactcaatttacccatctgtaaacgaaaacaaaaatagttctgctaggttaaaaagacatgtaaagcatctaggccagttcctgaaacccaggagggatttgtaaatagtagctataataaaggttatggtcctcacctgagcataacaaaatgagagatgatcctacacttgaactacaaatttgcagtaagatcgctgtcattcctgaagccgaatcctcaggaacttgaggccaaaattctttaaaacctgaattggttttaattgttccaaattagtagaggggggaaaattcttctaattcactgaacaatctgtatgcgtggagagcatgtactgcatagacacaccccaagtctcttaaatgacaccacggtcgatccaactagcacaggtggaatttgaagcatgttacttttaccaaaaaataacaggggaaatgtcattaagaacactttaatacaaagccacaagaaattcagtatctgacagctcatgttctatatttcaccccatatcataaaacaattcaccagagagcagttgttcatttgctgagctgctgttgtgatagcacatattatttcaataatggaggagttcctccataaaatcagtcccagaagccagtgatgtctgaaaaatctcacctttggagaattttcctggcattctgtaaaggaagttgcacttacaggtcctctaatgtgcagcagcaaaggaacaacagatgccaacattcttgtttgcctcatgaacttaagccctaaagtaagctgacttgagtaaagtttagaggctccccttcaagttttagaaaagctttcttgtttaacttatgcaaatttacacaccctcatgaacctattgcatatatccgacaaccgtccatattttagtaccatgtggtggctctcacctatgcccatatagctggcgacaatgcaggtaagatctggtcagctgtcagtttcattcagtgaatactcactgagcacctgctttatgcagggccctgtcctgggccaccagggagaacaacgcaaggttccaaacctatggagacagacaacgcatgcggaatgacaacagagaaacagagtcacacggagaaaagaggggaaattggggaaggcttttgtgggggaggcgggatttgaactgagccttgaaggaagtgggtgtgaggatgggggtatgagtaaagatgggaaatggagaattgaaaggccgtctttagagaatgattcacattataacgtgctggggagtaggtgaggcgggagggcgggatgggaagtgggaaattagtgtggagacagaaattgtgggctttgagtgccaggatgaggaatttctttgcgtgttgggaagcagtggcaggcgcaggacaggataataataatttaaagaaaatatgagtagcaagttgtgggagcggggagggaagcttggtgctcagaataatcagaactttctcagtggacccaggctcagtggaaagagcgctctggttccgtttattgctcccacagagaagagaggagagacccagagaggtttaaaattagaggggtcgacagggcacagggaactcctggccaaccatccttaggaaaacaagagaccaggaataaagagaaccagcagaagcacctggtctgagtctaagaaacatcagtgtttactaagcacttggtctctggaacgcctggctttccaaataccacatcttcccatccactccatcctgccacaggcagctactgtgtcgggtgctcagggagccggaaccacatgcctggaaaccctgagcccctgcccgccgccgtccaagccggccggctgcagcgcagtttgtttgccgaggtttgcatgcacatattcagttgcccttttttttcccccagtcctttcagccgtgtcccgaaattcacccttagtgtaacttctgcctctgctcctcctcttcttggaactgccttttgtttgtctggcagcgttggttctatgggggtgtgtgatgataataatacgcgggcttatataaccgtcttcatcttgcgagcacttcgcagaccgtcgctaatgaatcttggggccggtgtcgggccggggcggcttgatcggcaactaggaaaccccaggcgcagaggccaggagcgagggcagcgaggatcagaggccaggccttcccggctgccggcgctcctcggaggtcagggcagatgaggaacatgactctcccccttcggaggaggaaggaagtcccgctgccaccttatctctgctcctctgcctcctccctgttcccagagctttttctctagagaagattttgaaggcggcttttgtaagtatcgtgctctgcttttactttaaaaagaaagaagacaaactttccttcctgtccctgtccttttcgtattatttattcattattcatcatattattattcattatattctcagatgatggaaagtatgtttctggccaaagtcttccacccaaatttggtcccttgtaatgataataagaggggaaagaggtttctgttgataattaattcacttaacaaaatagtacccaggcgaggtactgaaattggccactttcacagcattctggtgatgtctggctgttgatacacaccacacacacacacacacaacactacacacacacacacacacacacacacacacacacacacacactcctttttgcccttaagaggagccctagtcacctggcttgttagacaaggagaaatgatgccactttggtcttcagtttctctgccttgggtactcacaatttcaatcagttgtaattgttgaaagtttcttttcacactacgaaataaatcccatctttcagtgcaggcttgaaacttgcactggcttgggtaaactgtacaaaacactgtagctatagtggacatgtgaatttttattaaatttttcactgcataaccgaaggttctaatattaaagaaacatggacactaactttttaagcacaggcaaaactcaaagccctgttatcaaactatgtgtcttaaagagtgctgaattaacagagtactcttctcagagattatgctcactgctttgagaaactgcttttcaacaagaggtgaatttaaaactctagaataacatgaagaaagacacaacttctgaatacttagcaactctgacttgctatttgaacaagccaaaaaacaaagggtctattttgggcaattgtacaatttgcatttataaaaccgtgattataacttggtatgctatgagatacagagatttattgttttaataagatttcaggtaagaaaactaagaactataaattggtaataatgtagaaaagcaaggcctctcacttttaatgctgtaagtgctgtgattcatttgtaaggctttatcatctttacctctagatgaatagatgtgaaaaccatgtatagtatgtatgtatatgttagtgtgtatatgtgtctttatcttaaattcttacatttgttgtatctatctagtgctcagtatgttatatgatagtacaacatccaaaatggatcaagtggagaaatttatttcacatcaactttcagattgcaatgtttattcagtatttattaacacacatgggaaatattataaaattatgtctttttttagattctctttaaatgatattttcccttagaattctctgtggctcccatgaaattctaaggtataattaaagtcaaaaataagattggattctagttgcttttacccctaaatttaaaagtgatatttcaacactaaattctatactttacctaatttgattacaaagatgaaccacataatctcagcattagcctcaaaggcaaactcaatcataatagaaggaacacaagctttgatgagatctggatttcaggcttagtttggtcaaactgaattaactgagccttgtgacacacacctgtagtcttagctactccggtgactgaggcaagaggatcgcttgagcctagaaggtggagactagagtgagttgcgtttgtgccactgcacctcagcctgggtgacaaagtgagatcctatctcaaaggaaaaaaaaaaaaaaaaagagagagactattgtagtgttccagtgagaactgctgggggcactgagcagtgtaggtggacaatagggcgcagattccagaaatatttagaaggtagaacattcttgactcagggctggatgaagggaatggaggaaaaggaaacttttataatattagttttgggcctgggctactgggtagttgtaatagaataccatagaacaagaggaggtactggtttatgaagaaaattgagttagttggagtaatatcaggttgagatatcactaagaggttagactgcaacgctgagtaaaaataaaaagcaatttttttaagcataaaattatcatctggatgtggtggcatgtgtctgtagtcccagctactcaggaggctgaagcaggaggatctcatgagcccagaggttcaaggctatggtgcactataatcaagcttgtgaatagatactgcactccagcctgagcaacatagtgagaccctggctctttaaaaaaaaaatgctagatttttgtctttgaaattttgaggagatacataaagactgagctctccctactatgttctaatgccccccaagaaatggtcactatctggactcaatgaaatcagagctttaatcttgtgtccctgctgccaaatgaatttttttctcattaacttttcaataggaagcccatgtctagggcagtcttgcctgtagctatgtgtatcctcaaagagagtaatttttacttcttcagagacttcagaaatgagcagagactaaagatctatgagctagtagaatacttattcataaaaagcacatatgcatgaagaagtaatacttatcaaaaacaaaccctttccttaacagggattcttcacttctcttgaacaaggaactcactcagagactaacacaaaggaagtaatttcttacctggtcattatttagtctacaataagttcatccttcttcagtgtgaccagtaaattcttcccatactcttgaagagagcataattggaatggagaggtgggtaacattcgcaaattttttaaagatgacaactggaagaattttaacattttgaatgaatagaaatcaatctgattagcaggcaggaagctgtgactttttaaatcttgaggtctgattacttgataaccctggttttcttataccctttcaccctttctgtgctcagcacttaatcttctaggcaaagcctctatcggatttcctggatttcagagctgttaccctacctgagcacttcagagcaaatgccatttcttataaaaggggcttagccccagactttatggctagtcttgcaaagtggtataatatttctttctggtacgtgaactgtatcaacacatttaaaaacagatttaaaaagctatttccacctctaaatataaagagccttaccacttattagaaagatagcatttgataacaatctgaatttcttccacttctgatggctcacttaattcaccaaactttggaaatcatctttgacttttgaaatggtgaaaaacatttctatttttgctaaaatgcttttgccataaaaaaagaagtgtcccaaaaaggaaccgttaacatctcagctatgcaaaataatcaccaaatatatacttttgaataagatgactgcatcatgggaaagttcattatttaaggaaggaacaagatatatttggggaaattcccattagcacaattgaagtatgaagaatatactgagcttccatatatggtgctggtcattccacatttaggttactcaagccatttaaacttggcttcataagcaagtactacaccctcacaatctttttaggttagccgacataatgatttactcccaactgggtgctgcctgagccactgtgctttgcctctgcagtgtttaaagagtggatagttcgcagctgtgaagttccccagacacctgagtccaaactgttgctggattttgcttctttctgtgctccatggaaagctggaagctcctcaactttctcttgggtttggcttcctgttcacatgttttctggccccatgtcaattgtgtatgaagtaatagtcccacatgcgtgcaccatccacgatggcaagatttgtgtggttcagcatgagttttctaatgagcacactttggaccttccaacaaccctttaggaaaagcagtttggaaccagttattactttccaaggtgacggaagctaaaacagaatgttcttttctcttttttttttttttttttttgagacagagtcttgatctgtcacctaggctggagtgccgtggtacaatctcagctcattgcaacctctgtctcctggattcaagcaattctcctgcctcagcctcctgagtagctgggattacaggcacctgccaccacgcctggctaatttttgtatttttagtagagacggggtttcaccatgttggtcaggctgatctcaaactcctgatctcatgatccacccacctcaccctcccaaagtgctgggattacaggcatgagccaccaggcccggcccagaatgttcttaagcaacaagactaaagccacttttaagagacaattaaaggacaactgcataggaaaaatgaacatttaccttacacatctgtctaaatgtgtgtatgtgtaaagtatataaaaatgcctccaattcacagtttaaaaatatcagttactgtttcagcattttgctactgatgaatggtgctagtgttttccactaaggactgttattttaatgacatttctctgcagcaaaatttgatgagtttacaaagtttcagagccaggaaatgcagcttgatttctgaacaacggggacaaccaagagagttaagttcaatcatctagttgctttatagcatggattcctaagtgctaactgcagtaacacactgacacagagagcaaagccaaaccaaactcttaaagtacagctgttaaactatcaagcttaacttctcgatatattctcaacaggtgaaattctggcacacacccacacttacttgaagatggtaatgtcaaattaatcaccatatgtccaacattttatagaattttagagtaagaagagatattggaggtcttccagttttaccttatcctttcattataggaacagaaaaactgagactcatgagtgctctctctctctgtctctctctctctccacacacacacacacacacacacacacacacacactcacaagcacacacacatcagagctgtactgagtcatgacttacagaaaacatcctaagtctgacttaagcaaaagaaagggatgcaatgatccacagctaggccactggcttcctggtcctttcaagtttgtgtggccagcttcagcactgtgggctgacaatttattattgcttgagaaaacattcagagtcttggagtctatatttttaaccaaaacttgaataaactctaaaacaaaccaaggatccatcggtgactcagatcctgactgtcctttacagtgaggctcagccaccttccaatagttactggggccacactgtgatcccataagatggagacaaagcccaagacacaaccctcactctgagggatcctgaaacctgaccagagagatgagaccatcctgcatgcaggccatagagacggtaaactaagtaccacactatgtggcacaggttttaaatgttatgagttctagtgacagggattaatgaaaatagaggctgtcagaaaatgagattttagctgatcccagaggggagattagagttttaatatgtggaggagagaaaagtggacttttccagataaagaacagaggagtgaaagcagagagaggactgtttatgggtgggaccccaaagaagctggcctgaggaaacatttctccacccacgcaatggaccatggagctccagtacagacttaaaattatttattttgagacagagtcttactttattacccaggttggagtgcagtggcacaatcttggctcactgcagccttgacttcctgggctgaagccatcctcccacctaagcctccctaggagctgggatcacaggcatgtgcaaccatgcccagctaatttttgtatttttagtagagacagggtttcacaatgttgcccaggctggtcttgaactcctgacttcaagcaatctgcccgcctcggcctcccaaactgctgggattacaggcatgagccactgcaacgggtcccagacttacattattatctattaaaatgttactgaaatatgtacccaaaaagctatgtataagttgttttatgtttgtatagctataaatacacattagcataattctatttatactattaaaatttcaaaataagtctctaaggataaacgaaacccatacaccaataatactctaattcatattaatcctctttgccagatgatgctgttttgctgaaactaaagaataaatttgttttaactaagtattcattaatgaaattggaaaaaacattttaacaaaaggaatttctattgcatattaagaattacacctgtttataaggaactgttacaagatggcacctatagagaagaaaggatccaggcaatcagtcctctggggtggagattttggagctgagaactgtgagggccaagtcatcctatcacccttctctattctgggaaacaaacaaaccttcatacaacacagcaggaagtatttgactctcacgtgcatacacatatcagcaggaacttaggctgcctctgttctttcttcaatagcccataacaattaaattattatatgattataccacacattattattatttatttttttaaagacattctagctctgtttcctagactggagagcagtggtgtgatcatagttcactgcagcctcaaacacctgggctcaagtaatcctaccgcctcagcctcccaagtagctgatattacaggtgcacaccaccacacccagctagtttttaaattttttggttgagatgagggtcccactgtgttgcccaggctggtcttgaactcctggcctcaagcaatcctcccatctcagcctcccaaagtgctgggattataggcatgagccacctcacctggcctacacattatcattttaatgatgagaaatcaaagtctacatttataaaatttaagaaaattctggtctcatttcatgaaaatgtcttttgattgcaaatatgcaaggaaggttgtatctttattactggtctaaaaaaaatcagtccaagtaataatgattgccgatgtttattgaacccttattttgtgctaggtcgtcttgcaagtttttcacatgaatgttttcatgtaatcctcacatcaaccctatggggtagataccattttaaattcccatttgtcagaggagaatactgaggcatagagaaattaagtaatgtgctcaaggccacatagccagtgaatgccatagcctggtattccggcatctcattccagactcagctgcccggtagcatattcagaacagtctcagaaaaggtattctttgacatcagactgtgccagcctaaccacagccagatacttttgacatcacattcagatgtaaactttcactgtaggagatcatgaggtgcacatacaattataagcacaaacatgtatatgtcctctcagaacatattttacaagtgggcatctgcatgatgcttctaataatttgtgatatcagcaccatggagacaggatggaaaagttcttctagaactccccaacccccaggaggagaagcacagtgaagcgagtgatctagaggcctaatgggtgaggtgggccacattgcagagggtggcataaaactagcggcggcggagtttcactgctgtttggagtggaaagaggggtgatgagagtcgtgtgggaggaaagtgaatcctgcagcaccaggccagctccaaggaggcactgctgcagcaatcttgtggtaggagtgatccatccagagcaaagcaaaggacctggggcttaacctgactcgccaaggccagctcaggataaaaagagattccaggcctatggagggaaaaaatctgcacccattacctctgagatccccccatatgtatacgaaggtacaactgtagtcaccagtggaaaagtatgaagactttaaatgaaatgctttattaaacattaatatttacatgggcatgatcaatattttttaaatgtgaaggaaattctgagttgttaaataagaggtctcatttccttattctatcttatattatgttctcttttatatcatatgcacatttacatacagtatgtatatgtcagatgttcatggcagcaagattgcttcatttgatacttaaaacattaaaatgggaatttcctcatattcaaagtgttcaaatttattttaatcacttacatttttcagctgtcaaaaatgtggaatataaacaaattttaccacttggaaatgcttactttgctagtcatcaaataatagcttgctgcaactttaaaagattccatgattcagcgcgttttcctttaaaataggtctcccaacctgaaattagacagcactcaacctttaaacttggaacactttgtaaacttttaaaaggaaactcttctttaatggttctatgaaatccagtcaaagaatgatatgaaatgaatctaatggaaagtcttttccttgttggagaagcagtcaaaatagaaacttctacaaaaggaccgaatcacccacaatgcttcaaagactcttgcgagtgattgtaagaaaatcggtctggatgaaatttagagaatattgttcctaatgatcaccccctttgaggctgtgaaagggcaacatctgaaagatgagaggaattgctgataaaacgtaactgatggcaattttgctcttttccatcgtaggtgctgacggccacccaccatcatctaaagaagataaacttggcaaatgacatgcaggttcttcaaggcagaataattgcagaaaatcttcaaaggtattcatcaaatttttatctctagcttaaaccaaggaccacctgggcactctatgtcacttgaagaggggaacatttcacggttggggaattgttaagaactggcagaaactgaaaagtcaatggtcctctaccttcccatcacattctcattcttgttgactgagagagctaaaaggggccttccacgtggtagagccatgtcacgaaatcagtcctaagaaatgtcagaagaaccatctgaaaaatgggaatctaaacaatcatatgactattgacatattatgagctgctcaggaaggaagctcaggggaattagggggcagtgtggtaggcccgccatgcacagccatccacaacatactccacagtgtcaggagtgaaagctgtacagatatctgatttattcacagctcgtcttcacagtttctttccttggccagataaacattagtgccaagagctttcatggagccagggagagttgtggcaacccatctcagcaatttcaccttggtggcaaaaacatttctagggtttgggttcatatgagggtacaacctcatgaggctttttcaaatgtcaactttgagagttgctccctttcacccctaaaaactaatgcaatgaaaatgttcagttcctctctatttcattagtcactcttcagaatcattgctatttgcttgattttttttttcttttctttttctttttttttctttttttttttttttgagaggaagtcttgctctgttacgcaggctggagtgtagtggtgtgatcttggctcactgcaacctccgcctcctgggttcaagcaattctcctgcctcagcctcccgattagctgggattacaggcgcctgccaccacgcccagctaatttttgtattttagcagagatggggtttcaccatgttggccaggctggtcttgaactcctgacctcaagtgatccacctacctcagcctcctaaatggccgggattataggcgtgagccaccacaaccagcctgcttgatttttattctaagccttccgttggcccaaggtggcttggaataagtcctgtaatcaccaaaactttcatgaacctcacctaaaaagcaacgtcttcaagtctggcccgaatttcaggtttgccttttgagggttgttttatccagcttctctttctaatacttatcgaattaaacatttttgccttcattctacaagtattacgtgaagaaagtgaatggttcaaagtgtataagacaggttagttctttgacataaagttataagcatcagcagtttttctagaattcttggagctttgtctgaagatggcatggggtattaacccccatggctgattacagcactgtatcagatgcttgtcataaacgagctgaatccacagtaagagaagataagttgaaagttaggtctccttacttcaaagctctaacgtaagaaggaaatattctaaaacagtaacttcaaaagataaatgtttaataattcaatgaacaagttcattgaataactaataagttcaatgaacagaactggaacttctcaagagttatttatctcttgaatcaggttgtgaacaattttctttgtgaaactctagcctgatgcatcaatttttatgttggaaaaaacaaggttggccttcagtgccataccattcaaaattaaccgtagaagagactggaaaacccctgatactacaagagcacccttcatcttctgaagaggtccctgaggatctgatttctcaaagtatctttcttagtttctcttatgctatgaagaagccacttttctttctttccttttttttttcttttcaaaacgaacagagtcttcctttgttgccaggctggaatgcagtggcacgatcttagctcactgcaacctccgacccctgagttcaagcaattctcctgcctcagcctcccaagtagctggaactacagacacgtgccaccacgcctggttaatttttgtatttttagtagagacagggattcaccatgttggccaggatggtctcgatctcttgacctcgtgatctgccagcctcagcctcccaaagtgctgggattacaggcgtgagccactgcgcccatgaaaaggccacttttctacaatgccatgttgtttgttatctagctggtaatctttcatgttgcacttttctccccctaatgtgtgatttcaccactgtgttatgtcttcttcacttctcagcacatctttattatgggaaaatacaagtaagtgtctaggctgggcacagtggctcacgcctatagtcccagcactttgggaggccgaggtgggtgaatcagctgaggtcagtggatcacctgaggtcaggagttcgagaccagcctggccaatatggtgaaaccccatctctactaaaaatacaaaaaattagccgggcgtggtggtgcgcgcctgtaatcccagcttatcaagaggctaaggcaggagaattgtttgaacctgggaggcggaggttgcagtgagccaagattgtgccattgtactccagcctgggcaacagagcaagactctgtctctgaataaataaataaataaaataagtgtctaatgttggatcatttagattcacttgctcaaatttaacatacagaacatttttcttgaaaatctatggattctgtatgagacctggcttcaatctacttttttttaatcttggggctggaaaattcaaatttaatgtttggcttcagagatctctgccccttttcaaccaactccaggatttgagctgaattagataagcagacgagtcacttcccaccactacctctgtatttatatatccacaatcctccttctagtcaattttatggaaagaaatggatgtttttgggtatgtgcttggacaatcatgtttataaaatagggaccactttactggaccttagagtttcaaaatgctgccctgtgcatttttgattgcctctctgctcatatcatttgggtataaagttctttcatttaatattcagaactgcttacctgtagctcattgaacttggcatcacctctaaattacataacccaagagaaagttcaaggagatactataagcaaatctcagaagctgcccaagcatttcctgtctttcagattgccagattgtcccttgttccaaggagagataggttgtattcacatatgagaagacaccaaaaggacaattaaatttcacagcttgggggagattttgagggttctcatcaaaaatgtttacacctatggaacagattgcttttgtgtatgtgtgtgaagcctggttttcagcttaaaatacacctgccaaaatatgaatggcctttattgtaccttctggacactaatattgcactgttggacaaggtttggtgcgcacagatgggataacttagaacagcaactatgttgtttttgagaaaattaagatttttcctagccttgttaatacctatttgggatggaaaattttattataaggatggcttagctgtgcctggcactttatttttaatattattttaattattaagttaaatttagtatattaatctaaatgtaggtggtttttaaaattgcccgtagactgtaacagtaaactaaaccttttcaaggaatcaatatcagatgtggaccctaaaacttatccttgtcttgctttaagtgcatattggataccaagacaatgataatttgtcttgctgcagaatatagagacctatatttgggggtgctaaaaagtagactcttttcctttgtgattccccttacatattttgaaacatttctcattgaagaggacaatttattacacagaatatcaactcatttaaaattaggtatttgttgtaaaaaccatataacagtcgcttaagagttttttttttttaaatcacacacttaacccaaatcagttggtcttttctttataagtatatactaagtagaatcatagaaaattgcttctatttaactattgttggcctacaaaagcagtgatttcatagggtattatctaatattttataaaattggaaacatggagaatgtacaatgtttattgttttgttttcacctacctttgtgtcaaaacggttcatacaatttctgcattgtctttttagttcttttaaatttgtgcattgtgttccattacatggatgtgggacatataagttgctcatgctttttctttataagagagataacactaaacatacacacacacacacacacacacacaatcaatacctcccttcacgtagccattctgtttagttgcattttaatgatggtttttaaattgtcttctcctgcaccatcctcttatccctttgagactaatcactttcacatgtgagacttcaatgcaaatctaagtgataagcaaatgttagtatgtacaagcacacagatttgcacccatgtatgtacatagctaaatggatctgcttagaccacagtcctcaaagccagtgagcttatgtttaaagaaaatgccaaactccaattggatgagaaacattgtgcccatcaggctgtgccatcttttgcaggctcctctctcctcccatctgactgagacctgtcccagcaggtggctctgtcagtatgcttcggctgccagtaaaattgtgctttgcctgataatggtgaggaagcaaactccagagatgttgaccaacccaaggaaaactctttgctcttgccataatgatacattcaggcaggaagttaagagaaaaatagctcttcccctggcaaggaaaggagtttaattacgatgagggtggggactgggggacattcacaagtggatattaaggaaaaagaatgggatgatgtcattctttactgaggcagtcactaaaatgaaatcagctcacacaacaatggtcttgttctatgctcaaaagcgcaagttggtatgagacattactttgcggtgatgctctcaggaagggcctaaggggccgtgctcacatgaaactatttccccaaacatcttgaagacaggtcaagaagtgcagaatcattccatccagtgctgaaatggcccacactggaccatcatttgtttcagatcaccatgccacagtttaggatagaaaaagtgtctggattcttacaacaccatgaattcaaagaggcagaatatagtggttcaatctggtatcaggccagatgttttaaattggttccttttttgcaggataattttaaatggcatactgaaattaacatggaatatattcctcagtggaaggtttcaggaagtcacttcccaagaagaaatactgccttgtatcgtgctagagaatttgtagggctgattaattccacttacagaggaagcatttgatctatgttgatcttgagtccttagttccaatggcaaatattcaattttaggttccttttctcaatggtgtcctaatttgaccgcatttatctgcttagatttcacaagagtgcatcataattataaatgaagagtagactttctaagaagccattcctggaataattaggtggtggggtcaaatcctgttattaagattctgtcattattgcattaaatagggcttaaaacaaataagccattggctgaggccttttttgaggatatttttactgcaggaatatttataataggagaattgaagtactataggctttttacattggtatctgcagtttagagaatttgcaaaaaaaatattttttagtaagccactggtcttcaggtgtacgaacatattgagatatgaggtccttctctctcttgcagattacatgaaaatgtaaaaaaaaatggattacagtggaaattcatatttgttttatgattttgctctcaaattattcaagaaccttgtgtcataatctggcatgtaggggaagctgagatgtgtatgggacaaatatatttgaagactgctttggatcgtggccatcagaatgaaaagaggcacattttgaaggagtccttttttggcagacactaaagtaaacctcagggattcctgctacccttatttttaaaaagaaggtaattcagctgtggggtttttgagagaagataattattatttttttttttttgagatggagttttgctcttgttgcccaggctgaagtgcaatggcacgatgtcagctcacatcaacctccgcctcctgggttcaagcgattctcctgcctcagcctcccgaatagctgggattataggcatgcgccaccacgcccagctaattttgtatttttggtagagacggggtttctccatgtttatcaagctggtctcgaactcccaacctcaggtgatccacccaccttggccttccaaaatgctgaggttacaggcatgagccaccaggcccggccaggtaattatttaaaaataaaaagtaactaaaatatttccaaacaaattgtcagcaccatcagaagttctcaagtttccaagaaagtgcttaatattcttttctatttgtttattagtagcctttaaagaaatctaagttcattatctgcagtcagttgacactagcactgaaaatacagatggaattttaagcaaattcattatttacaaagcaaataagtgagtcctggtatctgacaatgggattcaccataaaattaattttaaaattactaggttttaaatttttacccgaaaatgatttgatgcatttttgcattaaaaactgtatttattacatgaagtataaataccccaggagattaaatccatcctgccatattcatgggagcctgatctagcccgaggtatgatgcccagcaggacacagtggccataggagaaaggttagcagccattcagagcagtcggtgctgtgctggaggcgttataggtattgtgagtatctctcttcatggtaagtagccataatataatgactcataggattcttctctccaaagaacactgtgctgagagtcaagatatcggctctggttttagtcatctaatttactctataatttcctacaaaattagaatgtacttgtcccatttccctcactaggatgtggtaaagaccaagaacataaaagcacttgtagggggagtagacatatgaagccactcaaacacaaccgattgttattgttgtaatatttaaaggataaggcattacatggtgatcattagttcccatcataactgtgctatttccatcaccttatttctctctcattatccttttagttttatgtctctgcctgccagtaaactaatcccaatgtgtattttttaatggttggcaaaaattcaaaaatgttcttgaaaagaaggaaggccatagaattgccaggattataactatgtattcagtgcattaaaaataaaaaataatataacaaaacaaaatagaatgaaaaatctttactggcttaagccttcaaaataaaagtgaaaaatatagcacatactgtattagatacttgttgttggaattcagctgagggttgacttcaaatcatctttaggattagaaaaaatttctataattaactcacctgggacatgtgctgctgcttttaatatttgttgattggctcctgttgggcactaaagtgactgaaaaattgtcatcatctggattccccaaacagcagccagagacaaaaaatgacatccctctgctcactgtccatacgtgtcatgaggctgcccttctcacagggaaatattcaattttctttttgccttttctacccccaagcactgacttatggaggaattttttcaaatgtcatatacagtatcagcttagtagtctgtaagtgctgaaatgtccctcctgggtaaaaggagaggaatgtagtttacatttctcatttgaaagtccatttaggttaaacagctttctggttgtgaaaatattaagacagagtttgtatgacatgacttgtgcatacatgtttgaacgactgttctagtgatagccaacctctaaatgtgacagacaataattctgactataaaaacattgattttttttctctgtaactcatgtagacagtaataccatgtatgcacctagttataactagctgagctattggcttttgtggatgtctgaaaatatatgcagtgatatatgtcagggtagtgcaagaaagagcccttcctaccttaggaagcctttgggaggcgttcaagagttatcacccacaaaagtgaacttgtcttctcaaaatgggaagctctttcttgtcctaatttagagagacccatgagagaagtatggtttaatggttaggaacacagatttgggagccagactgccagggtttgaatttccactctgccatttgctaactgtgacttaatttctttatgcttcagtatccttattggaaaaataggggccagtaatgccatcaacttcattatgctgttctgaagattagatgatttcaaatgtataaagggcccatacaatgcttaacaattagtaaagtgctttatgcacagtaactatttttatttatagaaattcaaaaatccagtaattcacaaagcagaaaataatgtttttgtgttgggttttttggtgggtttttttttgttttttttttttttgagacaaagtctcactctgtcacccacactgcagtgcagtcgtgtgatcttggctcactgcaacctccgcctcctgggttcaagtgattctcctgcctcagcctcccaggtagctgggattacaggtgggcaccaccatgcctggctaatttttatatttttagtagagatggggttttgccatattggccaggctggtctcgaactcctgacctcaagtgatccacccacctcagactcccaaagtgctgggattacaggcgtgaaccaccatgcccagcctgataataatgttagtccatatcatcattacacacacacacacacacacacacacacacacacacacacatattgtcaatgtatcaggtattctgtagaaacctgtctcaggactctgcacccaccctctggaaaccagtactagacaggagcaggacctatgcatgtgcctcacacataatagtaataacaataccttaatcttacatgtttaaaatgtacatttgcacacttgtgacacttattgagaaaaccaaattaagcaatgaatgggaaactactttgggaatatattatcagcatctgtacagatggaaaaccttttttaaaccagtttttaattttctaatttttgttttctctttggatttgtttaccctttggttcagatttttttctcccattcaatcatgatttgacaaatactaataaataacaactaataatcacgaaaatccgataaaaagatcctcctgatggagacttttaagattcagtgggtccagattctgagccctaactggctggatatttttactctggtctagcatctcccctagtacaacatcacagagctgcatgctgagcttcacgaaagagtaaaatagatctgcctcatcaaaacatctgttgagacttaattttttagagccatttttggttcacagtaagattgagaagaaagtacggagatttcccatatacccctgtcctcacacatgcacagcccctccattctcaacatccaccactagggtggtgcatttgttacaattgaggaacctacactgacacatcattgtcacccagagtccacaatttacattagctttcactcttagtgttgttttttctatgggtttggacaaatgtataataacatatattatcagaacattttttactggtttgcaagttatatacattcgatgacttttttacagctacaactataattagccacactatttaaatgatctaattttaaagctccaggttaaacactgcacagaatagcatcctgcccttctattttgccattattaagattccctcattgaaagatgaaaataaaattcctagagaatgatgaaaaaaagcatcacgaagagaagtttcctaagtattatggagatgtttcacacagcatagagcactaattctgcttgtgttttatatttttgaaaacaacactttatatttaaaattcaaaattcaagtcacatatcaaatgttgccataggatctcaaagtaacaaacatagtgttcggtttccctacttctctttctttgtcattaagtatgtgacagtgccaagggctggcaagtccctgctccaccaaagggagagtagaaaaagtgcctcttgagcgagtattgtagaccccatcagcccaccaacatctaccaagtgaaagttaaaggtgatcatcagcatggcctgaaatgaacaacagggccatggcttcttatatgtacagaatccagttcaaatcttttcaaagccagccaaggaccatcggtatgaggaaagaaatatggtattgtaaaaagacaatggagagactccaccacttaccagcttgtgaatctgggcaagccgcatgttcttttgggtcccagattgcctttctgtaaaatgtggataacagcatttacctcataatatcgttgtgagggactcaaagagaagctgtgtgcagaacgtcaagcctagagctggttggagagcgtataaccgagaagcattcatttttctcctcaccttgtcttagcacgagtgttctttcctccttcacctcccccctcttaacttggccctaacatatctcatcttagctaggttccccaggttccctacacaacaccccagactgctcttgcttcctcagacatacccttcatgggcagagccttgcaactgacataggccagaatacccttgtgccacacttatgaaaagctaaaatgtgataacctttgtaaaatattccttgatttccttaacttattattattaacatccagaatttatttctccctttgacctcttatggactttataccttaattatgattcatatttggtaccctactgtcatttatatatctgtgtttcacattagattctgtgtgtttttagactaggatattatctgtctatttattcttagatttagcacagtacttgcaggtagttaagtacacaataaatgttcattgttaatttaaaaaacaaagttgcaacttaaattttaaaacactgagctttgtgaactgccaaaaagaggcatccatgctttgacttgggccagtccccttgtggtaaatttttaagatcacctacataatttttcttctatttgcttatgtgtttgaatatctaaaagactcctgtggaaatagagccagaaataaatattgagaagaacctctgggctggcatctgtcttagagagtttagtgagaaatacagctacataaagagctgttgtgaaaggcaagaactccatggaataatgaatgaataatccccaaagctctttgccatacaccaatgtctcttaaaagtagcatgttacaaagtattactgtggaagaccatcaacctttggtcataggaacactacatagacaactttaagcctaatggtacaatcattcatggctaggaaataataagatataggcatcagaaaagccacatttgtgatcaggtgcctgaaatgaggtaatttaatttgaacaaagcccttgtgaatcccagggggtgaaaagggcacagccaccacctgttgtttcatcagctcaactggactgaaggacagcctgcccatgcccttggtgtggccagggtttctaattggacttccatcatttcagccacattacagaaaaggaaagaaaagattccaacagatgctaatagttgagagacaaatagtaacacacactcttaataagttttctgtgaaaaggctctaaaatgtatttttgttgttgtctaaaaagataatgaaaaggtaacagtataagggaaagtttcaggaggcctgagctttgtcccagctgcataactgactggttgtgtaaccttggtcaagtcacttaatctttctgggcctccatttctcatctgtaacatggaggtgctcactttcagcactgagattgctgactgaactctaagattatgcttttactgtattctaccccagattgtatcaccttgtattagtccattctcacattgctataaagaactacttgagactgggtaatttataaagaaaagaggtttaattgaccgacagttctgcagactgtacaggaagcatggatggggaagggctcaggaaacttacaatcatggcagaaggtgaaggggcagctgtcctacatggctggagcaggagaaagggagagagaagggggaagtgctacacacttttacacaaccagatctcatgggaactcactcatggaacagcaagggggaaattcacccccatgatttaatcacctcccaccaggttccacctccaacactcaggatcacagttcaatatgagatttgggtgggggtacagagtcaagccacatcattcttcctctggccactctcaaatctcatgtccttgtcacatttcaaaatataatcattccttcccaatagccccctaaagtgggggagtgggaggaggctgttccagcattaactaaaagtccaagtccaaagtctcatctgagacaaggcaagtcccttctgcctatgatcctgtaaaatcaaaaacaagttagttacttccaagatacagccagggtacaggtattgggtaaatgctcatgttccaaaagggagaaatcagccacaacaaaagagttacaagccccatgcaagtctgaaacccaggagtgcagtcattaaatctcaaagctccaaaataatctcctttgattttatatctcatatccaggccacactgctgcaagcagtgggctcccaaggctttgggaagttctgcctctgtggttctgcagggtacaacctcctgggctgctttcacaggctagcattgagtgcctgtggcttttgtaggtgcagagtgcatgtgttggtggatctaccattctggggtctggaggacagtagccatcttctcacagctccactaggcaatgcccctgtgggaactttgtgtggggactccaatcccacatttcccctccatacttccgtagtagaggctctccacagggctccactcctgcagcagacttctgcctggacatccaggcatgtccatttatcctctgtaatcttggtggaagctcccatacctcaacccttgtcttctgcacacctgaaggcccaacaccatgtggaagccaccaaggcttggggcttgcatcctctgaagcaatggtccaagctttatcttggcccctgttagccatggctggagttggagcagctaggatgtggggtgccatgtcccagggctgcatagaacagtggggccctgggcctggcccatgaaaccattttttcctcctaggtctccaggcctgtgattggaggggctgccacaaaggtctctgaaatgccctggaggcattttccccatcgtcttggctattaacattcagctcctccttacttattctgcagccttgaattcctccccagaaaatgggtttttcttttctaccacatggtcagactgcaaattttccaaacttttgtgctgtgcttcccttttaaatataagttctagttttgggttatttcttcgtttatgcaaatgaatatatgcttttagaagcagtcaggccatatcttgaacactttgctgcttagaaatttcttctgccagatatcctaaatcatctctctcaagttcaaagtttcacagatttctagagcaagggtgcaatgccaccagtctctttgctaaagcatagcaagagtggcctttactcaagttctgaatgagttcctcatctccattcgagaccacctcagcctggatttaactatccatatcactatcagcattttggtcacaaccattcagcaagtctccaggaagttccaaactttcactaattttcctgtcttcttctgatccctccaaaactatcttaacctctgcccattacccagttccaaagtcacttccacatgttcaggtatctttaaagccatgccccacttctctgataccaattttctttattagttcattctcacattgctataaagaactacccgagactgagtagtttttaaataaaagagatttaattggctcacaactctgcaggctgtacaggaagcatggttgggggaggcctcaggagacttacaatcatggcagaatggcagaaggtgaaggggaagctggcattgtcctacattgctgaagcaggaggaagggagagtaaagggagaagtgctacacacttaaaaaaaaaaaacagatcttgtgggaacttactcactattatgagaacaacaagagggaaatccacccccatgatcaaattaccgcctaccaggccccagctctaacattcaggatcacaattcaacataagatttgggtggggtcaaagagtcaaaccatatcatacctcttggatgagaattgcacctttcatttaagttttgtcaggaaaatgatgcaatgagaataaaaaatgaaaccataaataatttttactttatgttttcttattcaagctgaccctagatttatttctcaacaactgagatagaatctttgttgatacagatgtttctaaatagaggcaaatcctttgttacaaacaggcaatgttaaggatgataatttgtaaataaactaccagaggttctatattataatattacctagtaatattatcattgatattatatgttttacagatacattaaaaaacaaataccttaacaagcttcctaaaaacctaagcataaagtttaaagttttggtgggaaaagacatttcttgtgatagtctacaataccaaaaacatcttctcacctgtgcttatctctcctttaccctgctgtcttagtccattttctgcttccataataggataccatagattaagtaatttataaagaaaaagggtttacttgactcatgattctggaggctgggaagtccaagagcatggtgccagcatctggtgaaggtcttgtgctgcatcatcccatggcagaagggtggaagggcaagcaagtgtgcaagacatagaaagaatggggcaaaacttcttgctttaataggagcccactctcatgatagccaacacattcccacaataatggaaattatctgtccatgagggcagaactctcatgacctaatcacctcttaaaggtcccactttgtaataccatcacaatggcaactaaatttcaacgtgagttttgaatttaagccatagcacctgctttctcagcttttgtaagaagaataaagagtccttctttccttttaagctaattctgatgacatattcctgcttgaaattctaataagacataaatttaggaaccaggaagtaagggttttaggggagattaaaagacttgaggtagggaaacgatataaggttttatcatttaaaaggcaggtaaatgggtgggggcaaaatgaacattaatagcattgatggaagaggcccagtaagagttgaggttatcaggtcctggggacttcaaacagtaactatggggtgagttaattttaagatatgaatagaaaataagagaaaaagtatccagtaaaaaagaagtcaatagacagcaaagaggaaatagaaaacagtttctctatattttcatttttgttttccttgtgcatttctgcatcttcccttttcattaccacagaccacaatcatgctaacactgatgaaagaggaaggtgggaaactgataaatcctccaagtgattggcagaaggaagaaaaataataaatgcacaaataaatcaaagaaagttatatattttacatttatcataggcatatggtttgtatatttttgttatagaattaatcacattgcatttattaggctttcagttagttgaactttttggatctgtgaatttatattttttaacatatctgcaaacttttaagtcattatttcttcaaatatttttccattaccaccgccatcttctagtactcaagttacactgtatgtcagactagttgatattgaaattgttccactgagacagaattcacttttttattagcctttcatttccaatattgtacttttcagctctagaaattgtatttggttcttctgaatagtttccatttatctcttcattatgttcaccttttcgttaatatgctcgagcatatttgtaatagccacttcaatgttctcatctgccaattccatcatctctgagtctttttctcttgactaatttttctcctggttaggcatcacattttctggcattttcacatgtctagtaatacttaattggctgttggaaattgcaaatattacattgttgaatgcctagattttgttttcttattttatagaatattgggttttgttctggcaggcagttaattcacatgaggattagttgggccagaccttttaaaacttgtttttaagttgtgctaggtcagatctagaatgacctacctctcagactcattgagtcctactcttaaggcttgacctttctaaggtttctgcttatgtgtgttcacataaatgcctcatgtgtgatcaatgagttcttcccactatagttagtcagaacttgagggccgactggctgtgtgaagtgtaagttattcaaggtacagcccccagtaattgttctttggccatctttgtagtcttactctacatatctgtagcttaaatattcagcaaaggacttgaggggaccccatacagatttctggaactctttctctttatgtctctcttctctcaagctctgtcccacaaatttcacttcacttccccaaacacactctatcctcatctctgcttagattctcctctctgtgctatagtctagaaagtgtctctagtggagcatacattacttgtgtcccttctcttggggatcacagcctgttcaatgtctgagagttgcttcatatgtcatttgtccagttttctggctgtttatggcaggaggaccagtctggtaccagttatactatcataactggaaaaataagtcccaccacattcatattcaaactttgtttctgtttcttttctccccgcaaggcagtgagacccttcaaggcagtgacagggactcattcatctctgcattctcagtatctaacatatgaagcatagcatatatcaggcataataaatattattgaataaaagaataattgaccattgttaaaccaatccataatacttatggtatctatatttaagtaatttacatgaatatctaagtgcttctgtaacatgtggggtttttttaagcaactgagaataatctattaaattactgaatatatgtaagctagagatcaatgctagagtcaggttagttctatgctaaccttacataacattccttgtagctgtaagatgccagtgtccagaagcaaatatcatatgtgttcaggtatctctaggacaataatgacacgttattctagaataaaaagtagcagggctgttttcagcattcagtctatgaagttgacaaatagagtatctaccttcagagatttctgcctctatgcaagcaaaagggttaaaaactttcagactatagtttcatttatgttagtcttctaaaggactacggtggcttttaatttaaatagcaagatgcattgagttggtcttttaaaagtctatgcagctatcttctaataattaaaaagtagactcacaaaataagaattacagtcagactgctgtaaactacagaaattgggaaggaaagaagtcttgcattttcacattaaaggtttctttctgaaatcttaatacaacatctgtacaagaggtttcgtataagaaatatctgcatctggaaggatgaagtcttaaaaatctatgacgcttaaaatctgcggatatgggcacatctataattagaatacctgcacttcactgtttaaagagtccctaaaattccagttacacacacacacacacacacacacacacacacacacacacacacatcactgtgtctatttcataggtcaacacagggttcacacaatattgttattatcaatcacacagtcttttaatacataatctcatttgatccacaggattcttaaaattcccttttgttcctttttgactatatttctgtttttttttccaatgaaaagaagacttttttaggttaagaactcagctgtgaatgagatgtcaactctgttggttcattcttctagttaccttcagcaagtcaccttttcatctttgttctttgattacacaacctaccaggtagaaataataatttgatctccacatgagagttaagaactcctgaaattttaagataggataacaaaaaactggtgcatatgaagagaaatttttcaaagtaatgtttgtacttgtttaaaactaagcaaaatgacatttaaagaataatgatttaagttcatggtcccaaaacgatttaaaactaaaggttttatttcactgtgtttttttccaacatttccccctttggtttacatttgccagttaagaatttaaagtgaggctttgccaaagccttaggttccacctggtttggggttgaaaccacatgaagccactgaattttgcatagtttccatttgaaatgatttatcagcttgggttctctttcagtgagagccaggtttacatgaaacttggccaagcattagatgaacctgctctgagttttgattttatatcagaccctaaaatgaggccactcaacctaattctgtctttcaaaaagctcttcttataatgtccccagagtatacatagtagttactagagactgaggcacagcaacactttctttcagtataaaatgggggaaaatttctcggctgcttggaacctattctaatttgaaaactagacagatttaatagaggttctagtgtcaagcataacactttagggaaaaatttccttagaagtctcaacaaaagggttttcaagtaaatagctcagaaagaccaggttaattcattttttcctttattttttcctttatttatgcattcattaatttaataaatatttgttgggcacctactacatgcaatgccaagccctgttctaggcatgggatacattactgcacaaaataattagagatcccaacttttgtaggtcttccattctaatagcaggagacagacaataagactaaccacaatatacgtagtatatttgtactatgaaacaaaagtagagcaaaattagagatcagggtgggttgcagtgttaaagaggatttacaaggaaagactcattgaggtggtaagatttgaacaaagacttgaaggagtgaggaagtagcaaccagatcttgacgaagaatgttctagacagagagaacagctagagcaaaagccccaagaggaaagtgtacctatatattacaggaaccacaagggactattatgtcagaaatggaatgagcaaatgggagagtggtaggaaatgaagtcaggcaagtcacaataggctaacacattacctggaggccatgggaaggattttggctatttctccagatgaaaaggaagccacggcaggattttgtacaaaggaaacatacattccaacttacaagaatatataagttcaaaaggctctatctatcatgttgtgggtagatgatagatgggccaaggtaaaaaaaaaaaaaaaagaaacagtaagaggccattgaaaaagatgagtgctttagatttggtgatagcaatagaagtagcaaaagtagtcagatgctagctatttttttgaagatagagccaacagtattgcctaatcaactagatattaaaaagagagaaagaaaggaagacagagagagagacagggagagagagagatggatcatggacgatttttttttttttgagacagcatcttgctctgttgcccaggctggagtgcagtggaatgatctcagctcactgcaacctccacctcctgggttcaaacaattctcctgcctcagcctcctgagtagctgggactacaggtgcccaccaccacacccggctactttttgtatttttagtagagatggggtttcaccatgttgaccaggctgaactcctgacctcaagtgatccacccgcctcagcctcccaaagtgctggaattacaggcatgagccaccgtgctcagccaaagacgaattcaagatgctgtcccaagcaactgaaaggacagagctgccatcaacagagattagaaaggctgcagttgaaagagtgttggggagatagataaagagttcagtttcggaagttgagtttgagatgtctgttagaccttccagtggaaatatcattaattaggcagttagcttgatgagagcctatatttggaaataaagttttgcatttagaagtcattagcataatgtcaacaagtatgtgagtatagacagggaaaagcactaaagtctaaccgccgaaatactccagcattcaaaagtcaaagagaagaggagagaagagctccagtaaagtaggatgaagacaaatgggtggaggagttttgggtgccttggaagccgaatgaagacagtgtttcaaggaggagaatgttatcaactgcatgtggcagtatgatgaggattgaaaactgatcattggatttatccattggaggtcatcggtgacatgtataaaagcaacaatggtgaagtagagagagagaaagcctgattatttaggcaaagataaaatggaagaagaaaaaaacaagaaatatgacaactctttcagggagtttgctgcaaatggagcagagagaaggacagtagctgataagagaagcacagtaaaatatgtgtttaaataatggaagacataaccacctgtttatatggtaacacgagtgatataattttgaggagaagcatgatcatctgggtaaaaaagaagagtattgctggagctgtggttctgaatagatgagaagaggtagaatctggcccatgggtagaagaatcagcttcagacagagagaatatgcagaacctatctactccgatagaagaacatacgtgtagtggagtagatgctggcgggtgaacaagttgaggagttggggagacctgtggaagttctcctccagttgcttctatttccccagtgaagtataaaccaaggttatgagtgaaggtcagggaagagtatgaggagggatgaggtggtgtgaaacagatatttgagagaatggaagagtcgtgggattagggcaataaagtatgtttgcgaggcagtattaggacctctttgaagttcatggcactgaacataacatgagaccatttaggggattctatgttcttctccaggcacatagagttgcacaggtgcagatacggagcagccagagagctggatttaactcaagtttggggaaaccaagcaaggatggtgaagtgagagagggggaaggaggttgagaatgtttacaaaggactgatgataatgactgtcggtggaattataattcactaccctcccctgataaggaggggaattaagacatcaggggccggtgaaggagtgggaggatcaaggattgaagagccctgccttgtcaaaggattgttggggttggcatactaagagcaatgatcagagagtgggatgcatggaaccaagatgatggagcgggcagttaccagtactcataagggctagggttgattagattggccagggagtggcttggggagaggaggggtgatccagaaaggaagaggcaattgtgttcatgagctcacatccaagagctttgaaatcttcaaaaattcagacaggaagaaatgacagcgaagcaggagctgaaatcatttagaaattaggaacaacgtcctagggtcagtcaataactagggaagtagtaggctatgtaatatgataagattagagataagaaagctaagagatttgaggtggacaatagagagcatggagggagggagaaagggacagagaagaaaagcaggccggcaggctttaagaaagattttggcatgacactgattcaacggtatgttcatccattcttgccttgctataaagaaatacctgaggctgggtaagttataaagtaaagaggttcaattggcttacatttcctcaagcagtacaggaaacatggtgctggcatatacttctggtgaggcttacagtcatggcggaaagcaaagagggagcaagcagttcacatggtgagagaggaagcaagagagtgagcggtgaggtgccgtgctcttttcaatgaccaggtcttgcatgaactcaaagcaagaactcactcattcccatgaggatggcaccaagtattcatgagggatctgcccccatgatctaatcccctccaccatgccccacctccaacacagaatcacatttcaacatgagacttggagggagcaaaaatccaaactacatcaaatggatacactcacatttgcattgaatatcctagagttatgttattcaaagatagtatagttatagacaaacctgaataaatcattgcattttgtataaagttacagtttgccaaaatgagattcttcctccatcagaaagtatcaaggggccaataacatgctgcttcttttttttatagtgaaataaacaagaaaatccttagaaaggtgccaaatgatactgcagaaaaaggaatccaatttacacgtagatggtctaggcttactttatgacaataataaagcaagtattttctctaggaaagagagcttaaatctctgaagggcagtggatagctttataacgtataatactggctttattacccttttatggttttgcatcttctctttactttgacaaaagatcattcagaagtgaacttacttcaatgatacctgcacagactttatgcctacaaaagtaattcatagtatttatcctggtgacaggtcagaggagatgatcaaatttttttattttccctagttaagctatatttcattcttgatgccagagaagttttttttaatttcctgggaatcaggaatggcacttttggcaggttctgcaccaatctgagctcacagatgcccagaaattgctcaatggtactaagtctcctaagtaattccaattttgtagtgaaacaaattctattttcttttggaataaaatagagaaacagggccaggtagaatttccctggagtaagtttccttttcgtgtttatgaattatgtctttgcccatggtgagcagtggcaaggatgacagcaggtggctcattttacaaatcagtaaaccagaggaaaccttggtttgcaaggaagttgagtggggagaaagaatattcaaaaggaaaagaatattaagtagaggatttcaaggaattaagttcttgctcgttctttactacaaatagcaatataataaaaattgcaataaacctcccaggcacctaactctatgcagagtggatttcgtggacttcatctgaaatgacaaatctcaataattaattcaacaaatttcaatgcatgccttacatgtgcaggatattgtctaggcactgagactttaatggtgggatgtggcccacaggttccactctcagggagcttacattctcagatgaccacaatctgcccccgtgtgagccgaagttgtgactgcaagtgacaggcactgaaattcctggtgtgataatcggagactgcctctttagaggttgttggaggagggatgaagcgtctttagcacttggaacaaatttcttgaagctctttggtgtagtaacaccctagctctattctttggataggttttacacaaatttgagaatataatatattctctgaaaatgattagaagttaataatgaaaatgtgcaggatcctaagcagaattgtaaagtttggaaatataaattgctcataaccaaatacctggcttctgcaagaccgtgccagcttaaggacactttgtaccatagaagtatatctcaggaaccttctcactgaccagcatcttgagttcaacgaaacccctctcctatccagtcacagagctcttcttcagtttcctgtaaagataaaggacttctcccaaggccgttagctgtgtcttgatgcaaaagagaatttaaatttaaattctttttatttaaataaagatcattctattcttacattttcttttattagtcaatctgttcaaatgactgactttttattttattagtcaatttttaaaaaatcttccatttcaaaatatttgtctcctaaagcttatagaaaaaggcaggccaggcatagtagctcatgcctataatcccagcactttgggagcccaaggtaggaggattacttaagcccaagaattcgagaccagcctaggcaacatagtgagacagtatctctaccaaaaaaaaaaaaaaagaaagaaagaaagaaagaaaagaaaaattagtcaggcatagtggcatgtgcctgtagtcccagctacttgggaggctgagatgggaggatcgcttgagcccaggaggttgaggctgcaaagagctttgtttacactactgtactctggcatggaagacagagtgagaccctgtgtcaagaaagaaaggaaggaaggaaggaaggaaggaaggaaggaaggaaggaagggaggaaggaaggaaggaaagaaggaggaagggaagggaagggaagaaaggaaggaagaggctacttgagtttcactcgggttacaggattggcttcaagagaaagatagaaaaaataataatagactcttgtaagtgtctgaaagagagaattaatccaaaagtactttaaacactctagaaatgcaaataataaaatgtcggtgtgaacagttcttgtttggctttggctggtatctttttcttaagcactcccttccggtttgctgatagctctctatctgctttgcctaggatgacatccaaggcaggcagagtatacaaggactcttcaggacagataattgcatgtgcaaaagtagcttggattcagagcttcattttaacggttcgtaaccatattatcaatctgtaaaccgcatagaaacaaaagatgtcaagagaaaataacaggaaaaaaataacactagcagacagattcctccctacaaagtcttgtagtagaaaccaaaataatacaaaaacctgacaatagccatgtcattgggggcaagcggaaagacaaggtaaatgaccagtagagccagaggaaagaactagaggtcaggaagcacaaagggctctgcagagaggacgaaagacttcattccagatgctcaaagacagaggatggtggtgtcagcgggggattcctgggcagcttagggactaagcaagcacagggctttggtttacttaaaataccagttatgcgaaaaacagaattgcaggtgtctccacaggatgtatttctgcacaggttcctaagtaaatatagaggacagatagatagagtgaacaaaaaataaacaacccttatccatacagacttaaaggcttaaaaatgaatgagattttcattgtgtggtttctacccatttagtgtgggcaagtgtgtatgtgtgtgtgtgtttctttttctttagaattgcagggaaaatgcatgatgaaaaatgatgtttaaataaccaaattcctatgtgtttcactggctgagagcagagagacaaggagggaggaaatgagaaggagggaatctgtgaagagtttgactaaaaattgtcctcttccctcctccaatataatgcatcaaactaaaagaccagtttggagaggataaagtttaggttaaaaatgtgctatatgcagcccgtttctttctttcccaggaactcttttatgtccaactgcacagtctctatcttcctctaatccttttcagtctccttgccctttgcccccacaggacctttggcacattgcctcttgacctcaaaaaatgaggagttcagagtttcagggagattttgatgaaaccacctgctgttcttctctaccattttccccaccactgaattcaaatagaacggtagagggtataaatatgctaatattctgaaccacaccaaatccccaactcagcaattcctgtgagataggacagttgtagggatgggtttgagttaataattctcccaccactacccaaataggaatgggattggaagagcttgtagacagacgtggattccaatctctctcatatggaaaaagtgcaaaaatccaaattctcaaaagattagtcgacttagtattgtgctttgtagtcgagacacctcttgattttctcttacaaaacttggttttctttaattatgtactggtaaactctgaccagaaaactggaatattttgttatctaaaatttcgcttttataaatccaacttttggacatacaactcttagaagaaagggtcataccagtgtgtcctgagatagggcatcatttagcttggggaatgaaataagacaagcacagcatggcatttaagccattagtcctgatgagacatattcacagttggtcaaagcagggaagaaagcaggcaagatagctgaggaaccacagtgggtttgttgttgttgttgttgttgttgtttcaggtagtagttccctgtctgttttaggtttcaaatttaatttggaaaatgttttagttgactaaataaaagacacatgaattcacggatcatagaaaaagaaggaactatagcagagttaaaatgtttgggttgtgaaaataaattagtaatgaaaaaggaaatgcttattaggaactttctatgtaccagctcttctcctaagtgtattacatatacaaagttatttaaacctcaaaaagtctgtgaggttgatactcttactccagctttactaataaggaaactgagatccggaaagtttaacctgtgccaggtgtcacagctagcaaaggggcagagctcccgtcagaccccaaagcctgtgtttattgtaaaaccattatgctaggtgccaaaacaatgcttggatatatgaaagggaaaagaggtgatgttcttctaagaaagccattaggaaattcctttgaactatcactgatgtagctcctaaatttcagaacccctctactctctattcttatgaatcatcaacggttagcactacgttgatgctctaactacgacctctaactacgaaactgaatcgcaccttcagttgtttatgacattgctcttttttagaaacttattgtattaattatctattgttgcattttaagaaaacaaaatgtaagagacttaataataaacatcaatgctcttacacagcttctgtgaatcaggaatgtgggagcggcttggctggatggttccagtttaaaatcttttatgaggttgcagcctaagatacagagcagaccctacattgttctaagggacttactagagtaggaggatcctctcccaagatggctcactcacaaggctggcaggttggtgctggctgctaattggaggcctcaattccttgccatgtggacctctccatggggctgcttgagtgtcctcaccacatgcatggaaactgagagcaggtgatctgagagaacaaggcagaagctgcaaagtttattaggatctagcctcagaaatcacattctgtcattctgtaatcccattggttacccaggtcagccatattcagtgtgggagggagctgcacaaaggtttggataccaggaggcgagagtcactggagactgtgttggaggctgactaccacacttactgtcagtttattaatgatcctatttggtgactcggtctcatttttctgctttagggcaagaccaacagagagatgaaataaatgcagtaaatgcattcagttataattgcagtggacaatctgcccttgcatcttcccaggagagctagcgcttgaggagtctttctggactctcaactccggtcattctattgccctactgcttgcatcaaatgtaggatttgtcactaaacgtcaggctcaccaggatagtcaaacatcaggctctttgagcaaaaagaaaaagtaatgtctagggctaccctacatattcattcagttatctgaaaaatattttttagatgcctactgatggatagagccattgtctatgtggaatcttaggcataatgtaccattaggagggctcagtctgctaattgtagagattctttgctgaaatgaactttagagatagttaaatatagtcaccactccttattacaaataaaaacattgaagtcctcagaaaactaaaacttgcttttgttacttggttatgcctgttctgctttgacttctctcatcgataaaatcaccatcaaaaccactgcctaaaatgggttttagaggttctctctggatttcattgcttttcctctaccgtagtaaccagatgaactatttgaatgaattgtacctctttccagagttcagtccaagagtcataagttgtttatggacatcactctggtccttctgtcttagaaagaggaaaatctaactaaacctcaatactagcattgacctataactaagtaaccactttctatctggttagccaacatgtcaagttagacaactgtcctttccaaagggattgaagctgttggtgtcctgcacaagtggatgctgagaaggggtagaatggaatgaggtaaacaggtacttattgaggacctactgtactccagacagaatgctagcactttcacacctgggccaaccctttaatttccaaaacgatggcatgaggtgggaggcatgatgattatcccattttacaaaagagaaaactgagggtgatttgtccaagaatggttggggatcaagagacatatttgggatgtaaatccagatctgcctgagcctgtattctgacccactaagctgcccaaacaccactctgaactgacttctcagtgaacatgcctagctcatgcctgtgctctgtctcctctcattgtcccttgttgctttggaacactgaggtttaaaaactcttttagctttatgtttgcatatatgtgtatatgtgtaaatgaacagttttcaaatacattgttatctccttaataacagtatcccttttaaatttccccttccccacccatagggtggagtactatgctctgcccacaatgagctctgaagatagtttttgttcttgtgacagattttcaaccaagccaccacccacctctcctccacctcaactcactaagtgttctcttctgctggtggagaaaaaaataaatcatttcgaattttttaatatcatgttatttccctccaaacatgtatatattgtgcttctgcaaaaagtctttcttaaccagtcaatacatttgtctgctttagagttgtgatgacagtaattaatgtggaagctgaaaagtcagatttattatgactgagagaagtctctgcggataacctgtgtcttcacttaatttcaccacagaagtatttttttattctggaaatgttttttaaatgtaagcacattataatcgatgctgcttctttgtctttctctggaatttccaagacgaccttttcctctttgtttctgcttgtagtggctccacagctcagtatcaacacgggaaagagaggcggctctaagctgattacatacgcggccacccctctaagggcgaaactgcattgctgtcagtcttaggaattcacaaccttaacagcagccatggctcttcagcagaagccctgaggctcagttgccagctgatgacctttgatgggataatttctagctttgctaagactgcaagaggaacaagtgaggggttaggaagcaagagttattcatgaagccactgtgtctttattcaagaacgttgagaaacaaaccttcatggctattcttcgttaaataaagtagcatacccatttaaatttcaaaattgttcaagtcactcataaatcctcgaactttatctttttcatttaaaaatccttttttgcctgatggtcttgtaaggaaacaagtcattctatgtcttaaaatgattgtttcaagccaaaataggcacatgagaacattttaaacttcattgaacctcgaaagaattttcaatatttgaggagagaacccttcaattcttttttttttaaaggaactggacaacaatatgaatgtaatagatccattagcattgtgagaaacaggtcactaaccccccttttcattcccacaacaccaccaaatacttttctggttttaataactgttagaaaggtctgctcaaacacagaaaggagctagtgttttcacaagcctctgaaagaagaggatgcattgcaagatctttaaattcattgtacagcaagagaatgaaaaagaatgtaagaggaaagtggacaactacctgtttgacctatacatataatagatttgttactaattagaatcagtttgttttttgttgttgtttttaccatcttgaactttattaggtttatgattgtgcaatagatctctagaactcttttatcttgcaaaactggaactccacattcattgaacagcaactccgccctttccctcccatccttctctccctcctggagtccctggcaaccaccaattttactttctttcctatgaatttgactattctaggtatctcatataagtgaaatcatacagtaaaattattagaaccaatttggatacaaataagatttagatgtacaaattgactaatctggatgtactaatatcaagacaaacaaatgaaaaccaagtatggccacatgatcaagaacacttgcttggctcttattgcctctaatagttttctgtatgctcacttttgtgcaaaagctgtttaaaatccagcttaccgatacctattatcccagcaaggacagggttgtgttgggcagtggaaaatggtaaaacctaactctgaaggcccttggaccatttgttccaaaagcaaacaagttggaaagaatgtgagttttttatattttattttaagttccagggtacatgtgcaggacgtgcaggtttgttacacaggtacacatgtgccatggtggtttactgcacctatcctcaataacttaggtattaagccctgcaatgcattagctatttatcctgatgttctccctccctccgtccccctcccccagtgggccctggtgtgtgttgttccccttcctgtgtccacgtgttctcattgttcagctcccacttataagtgagaacatgtggtatttggttttctgttcctgcattagtttgctgaggataatggcttccagctccatccgtgtccctgcaaaggacgtgatctcattccgttttatggctgcatagtattccatggtgtatatgtaccatattttctttatccagtctatcattgatgggcatttgggtcgattccatgtttttgctattgtaaatagtgctgcaataaacatactcgtgtatgtatctattgtagatagaatgatttatattcctttgggtatataccccgtaatgggattgttggatcaaatggtatttctggttctagaactctgaggaatcaaaatgtggttacttttttacctccgatctgtctttattgtaatattaaaatcaaagacttgtagagaatagcctaaaatcccttaaacaaagttaaaaggcaaataatagtctagaaaaaaaatttgcaatgttcagtgctaaagtcaactatttttcctggcttaagggagttttattcttagcagttatgataatgacaaaaaacatgatatggaatgggaatgagaaggaagctgtcaatggtttgggaaaatattttgctaatgacttcattgagagtaacataatggaagttcatcctgggggctgagtactgtacattctgcattactgaaccctgaagtttgcttaccgaaaatacttgcaggaagtagctactaattaaataggcattctccaagaattggatgaaaattgaaaaattcagaaagcatttacaaataatttgtttaaatgtctttaatataatattacatctttatagtcaaatagttctttaagaaattctttcattaagatcactacattgtgcatggtggatatttttctgggtgagttagtattaactccgtctttaagagaattatttatatatcataagaaacaagaatcttatagtgcatttgaagaggccaactctgaagaattaggctacatttttagaaacatcaccaatcactgaagttttagaatatataagaacaagtattccttccaggaaggtaggaatattacatttcttctacttacatgttttattaccaattcacacttaacattggtgaagtaagcatgatctttcatgtatcacagacttcatttccttgacaaacgacttaattataatactttattccaccactttttttgagacaagatagcagtatttgaaggcaatttgagaagttggcaagcttacaaatttatgagcttatgaaatttatgtgttacattgatacaactgacgtcatacatattttataagaactgccctaaacatagacgtcatcattcataatgaattaatacttaaaggaaatttaaaaaaaaaaaattcagctaagagagtactgttttgatatgaaataatataagactttataaggattgttgtttaaaaacaagcaagttgtttttaaaattagaattttgcatgatatatcaattagaatgctttgggttgaaatagaaacttcagcctaaactgtcctaggcaagcaacaagacaatgtctgggctcacaaatgataattccagagaataaggaaagcatgctgcagttggggctgtactggagctccattaaggtcacctgttctgtttccttccctatctcgcttggctttgcctgctgtggagagctccatatttaggcatgtttaggcccttgtgtttacaatgtggctgctccagctccagcttcacatcttcacagcctgaagtcaatagacaacagagcactgacttcctccactgctcaaacaacaaaacctctgaagtgagtctcactggccctgagtgacctggcgttgggcattgatcagcctttaaaacaatcactcttgctgaagggaacagaagagaggtgcactccagacagtgtgctctatgggagagaggaggaggtgcaactattcctggaagtacaagggatagcaaagaggaaaaattatttcctcaaaacaaaatcagggacagttacaagaatagggtgcagctcctggaaaggaaaaaggcaaatagggcctctagcgttaggatgtaaggagtaaagctctaaccttttttctggattaatataaaatcttagataagatgagggtgccaactaaggagagccagtggggagcaggtattagaaaatgtatgccacctaccaaggaacaacacaaccaccctcatccaaagcaaagccataagaggccgggtgagatggttcacgcctgtaatcccagcactttgggaagccgaggcgggcagatcaccaggtcaggagtttgagaccagcctgtccaacatagtgaaatcccatctctactgaaaatacaaaaaaattagccaggcctgtaatcccagctactcaggagactgaggcaggagaattgtttgaacccaggaggcagaggttgcagtgagccgagattgtaccattgcactccagccccagcaaaaatacgagactccgactcaaaaaaaaaaagccataaaatccctgcaagcaatcaccagcacctcactctttttcatggtgaatgtcacttagatagtagaaacttcgatcaatttaatttgatcatgtactctttatagtatttacgctcaggtgttttgcgcagatcatttcactagtcttcatggtattgctggttaacaataccacccattgtctgtttggtgtcagtgaaggcttgtgtacctgcttacatgtgtaaattcacctggcagctcctaagaagggcttgtctagttcttattcaaacaatgtgtaaaggatcagaaagtaaatgttgttccctttcatcaaacatgccacagaaattaattttgtttatattttgtgtaaactccatgatcctgagtatcattagcaagttaaatcaaaaatagctgatatcttaccactactactatatatcagaagacatttgggctttctttgcagcctgttgtttgtgtttattaacatctttgattggcaagacattctgcttctaggtacatttggttggagggatggtcagagtgtaatctattagccacatttcccaggctaaagtgggctgcattttaaaataatcacttaacaaacataaaattactaaggatggagccccgaagcacagacacctaagaatattttcctttttcgaggaatccttggtatgttgattcactaatttctactcacttagagcaatgtggtagacatagctgctattttttaggccaatgtgtcgaactcacactctcataagcaagacatggagtggtaactgccaggaagtctggtgagatcatcgaaagccatgttcctgctctttatggccctcccagggaggaagggtggtgtcctgcagaaggacccaggcgcttgactgcctgagttaaatgccagtcccctacctactagttgtaaccttggaaaagctattcaacctctgtactatgatgacttcagctaaaatgggggaatgagtcctacctcctccgttttgtaggcacttaatgcatggttcctggcttatactctgtgcccagcaaacgtaagcttctatcattagcacctctgactcactgcacagcattaggagactctgtgccctggggagagagtgaaaccctccagctgggctttcagaacactctatttgtctctgctggtggaaggagattagctagcaaagggatttctgggcatccctgacagcatctggtacacagtagggcctcttagaggtttgttgaatgaatgccaggaccctggctgaaaggtgcttctcatccccaaggtatcaggcactttaagaatagtttcatacatttctttttaataacctcaaccttgtcttctatgaaatagagttcgattgccagaaactgtcattaaatatgcatgactctgttaagagattttttttgaacagcttttggtttccaagagtataccatattaaatagatataaaaattcttaattctaccctcagcatgagtgtgggcatcttaggggtaccccaagaatgtgaatcattcaaggggattcgtcctcatgactaagccatcttctgacactaaagttcaggtgtttaccatttttaccacaaagggggaaacagcctgcagaaacagttactatcctgccatatgtcaggggacactgaggctaatatctgcacgtttggaatgagagtgtgtgacatgcagtgctttgcacaatacaggatgacggcaacttttgactttcaacttctcgctttcttcactcattttcaaattcctcagagactgtcttttcagggcccttttaactgtgtgtctggaactgaaacagaagaaaaagagaaaacagaaaaataaaaatagaatagaaaattgaaaaaaaagtaattttctcaagttttataacatttcaaatcctttttttttttttttagacggagtctcgctctttcacccaggctgtcgtgcagtggcgccatctcggctcactgcaggctccgccccccggggttcacgccattcccctgcctcagcctcccgcgtagctgggactacaggcaccagccacctcgccctgctaattttttgtacttttagtagagacggggtttcaccgtgttagccaggatgtcaaatacttttatacttttttatatgtatacttttttttcaaggaaaaagcctgctttttgttttgtttgcttattggtttttacatttctgttgcctttttttttttttgagccattaagctcttgctcagacacatgcttctcatcccgtccttctatgcaatgccatgaacattaaacccttcagcagccgcgttcatttgcctgcagtcagtgactatcaatttggcttgagatttctaggttaagtgcagtaatgcactaaggccgggcccctttctggagataccagcctccaggagtctgccccaggtagtccagaagttgagttggtctgaaagcacctgtctggaaggcgagggggagtacttgctaatggtatggagaggtgcttggaaacaaagtgcagggcaaaaattagaccatgagagaaagtagaaagtcctgtcatgtcaaaccttccaacactatagtcttttttctttttgcaaagtttagcttattttcttttttctttttttttgtttttttgagacggagtctccctctgtcacccaggctgaagtgcaatggtgcaatcttggctcactacaacctcctcctcccagattcaagcaattctcctacctcagcctcccgagtagctgggattacaggtgcctgccaccatgcctggctaatttttgtatttttagtggagatggggtttcaccatgttggccaagctggtctcgaactgctgaccttgtgatctgccggcttcggcctcccaaagtgctgggattgcaggcgtaagctaccgtgcccagcctaactcattttcaaaacaaagtgatatatgccaggattgaaccctgtagctggatcccgtctagtgtccagggctgcctttgaaaggacagcagaggtccatctgccagtgaattcttcccactgctcagacactcgcctttgtcattcgacctgctgataggctgagggggctgcctctgagtggaaataccttagccattgttcttggaaagaacaacttaaaagctgagaaatggcttttagactgattgggaataaagttggacttccacaactttttacttttttttagtctaccgaataaaaatgatctttttgagaaaccagggctctgtgaaaaaggaaagtcttttaaagatgaaagatctcatgttatttgaaaaagacatttagatgtcctaatatttctcagattatactatgatgtgcaaatatgaaaagatcttgcgcttggcaattgctaactagatatgtagatatgactgcaaacaccaagggatgaggtagccagttcattttattaaatattttacatttgagttgaagaaatacccatagaagagaacattagcatctagacatccattcttctattccaaagtcaatgactaagcccctatgatgtaccaaattccaggtggcctctagagggaaaataactgtccgatatgcgcagggcattcctcgagtctcggggagggacagggaatttctacgatttctacggaagagaagtaagtgtgttcatggcagtgggagttgaagggaggcttcactgaggtctgaactttcttagggtataaaaatggtgtaaccattttggtggaagtggagttggttgggcagacagctgcaggttcatgagcccacaggtgtttttaataacagggctgttgtggggaacagggaaaagacatggttaggccagcatctaagaagattggtctggtacctgggtgaatttaagggtaatttcaggattaacagacagaaggcaaaaagaccattagaagccattacagtgatctggaaaagtaattataaaggcatgaactgtggtagtgatgaaagcaatggagaaaaggagacagaatcgagaagtattttgatgataaaatcagcaggataggggattaatcagatctcatgagtggagaaagtactgggataaatggaaagagaggatacatatggccaccagattcatctctctattcataaaacgatggttgtgccactgaatgagataaagacactaataagaccctaagtcacttttctttctaacacaatgacacggattattttctacaaatagagaacaaaatactagagtatctaatatttgtaaggcacttttgcatttataaaatgtttcactcattgtaagtcatttggtataattacaatgctgaaagacaggcagggctattatattttatggacgagaaattatgtttcacagaggacatctacttctcaaagtcacacagctagtaagtgggagagcagaaactcagattcagaactcccttccaaatccatccctccttccctgtagcaaggccagttcttttggtgaggagccatctccctgccaggacagagacaagctgtttctgccttggtgacagcgtttcctgccttcttgcccgggtttctgtaactagcactgtgcattggtgaccatggtcaggagtggatgttcttgctgtaggatcatattttagggctccacttgagatacatatgtgttataccttctttttcctcttgccacataaaatccacaaatggaaggccgatgaaaagtccctggagcaaatgtactctttgtaattttcacaagacctgtcaaattctagatgactgcaggcatttcattaaatgaagtcagtagggacttactaatgcctctgttaacttcactctaaactaacccaaattaacctggatctcaaaaatctggggtttcaataagaatttctaatcttgaaagcttatagcctttcctatatggcacagctgaaagattcctgaaaacagaaatttaggaaaagggaaagaaacaagcagaacataagtgtgggtttgggagaagcatgatggagaatggtggagcaggaaggtggtgggatttacagggaagaaaggataatgtctccaggcctatatattaatttcccactaaattcaatcagatgtcacagatggcatccacattacacagaaatatgaggttaaagcaaattgatatggaatggccctgcttgtgagaccggaggacaccccaactagtcttaacctaggcaaaggcaacatggcacttcccctgagaagtatgatggcaggtaagcctgccagtgtcgctgaaggaacatgaaagagcatctaactcccatctgtggcacagctaaaagattcagaaaaaccgaggcagtggaaatagtgaaatgcattctcacatttcatccccttgggtttaccctagcatatgatttgaggatgagggactgtaacaaatgcatcatatgtgaaagagaaggaagagaaagtagaaacgaaagacgtctgcttctaacagtgacatttttaaagcaagcacagtaatctctgaacatgtatttgaaagtacagatttcttgttcaaatagggtaccacagaaacacagaaccctaaaatgctcacaggtagaaaagctcaggaagaatgtctttgttttcaaatatttgttagggacaggaagccattaaataagatatgtgggtattgttagtgtatgacatatgggtaaataatgatgtttgttttctagagtggttactacaaaacttaacttcttaattaaaaaaaggaataaagatggaaatggtttaagctcagaactgtgaaggcaccaatttgtagatcactgaaaatatttgatcttccattctttctcaacacttcatccaagctattgatgggaaggaactggagagggagtggaagaggaatatgaggaaggtgtgtccttacttaaacttgaggcttactgacctggaattatacattttctttacagcgctgtcattcatttaaaggtctggaggataggcatgtcccctaacaccttcttcccagagagctggtgacatacagttatattccattcttcttcccataccttcctcattgacataacttctggaggtcactactgtaagaccttgagagttctgcatatgctgaagaatattggggagggcttcacagtgtttaaatatgtggttatgatggaagcagaagacatttcttcacaacatatgcaacttactcatctgagaaaattccttaacccgagacagaactggcttcagtgaaaatattcacagaacatgaaggaaactgctttgcatcaagtgcaatgtgtgtccccagtgtggtcatgatggagtgttctgtggtgtagcagaaaggtacgagatatggcttccttctccactttgagaaacagtgatttgggcttagccatttcacctctccgaatctgttttgacccccgagaaatggggataccaacagtgctgccgagagttactggaggatccaaattagaacaagtatgtgaaacctttgtacagtgtaagtttgatacaaatgatattatcaattacttgaggcctcagcatcctcaattttaaaataagttgaatacgatgacttctgaagtccattcgtgattcctgaaaacagaaatttaggaaaagggaaagaaatgagcagaatgtaagtgtgggtttgggagaagcgtgatagaaaatgacggagcaggagtgaagaggaaggtggtgaaattaacagggaagagaggataatgtctccaggtctatatattaatttcccatgaaattcaatcaaatgtcatagatggcatccacattacacagaataatgggggtaaagcaaattaatatgaaatggccccgcttgtgagaccagaggacaccccaactagtcttaacctaggcaaaaacaacatgggacttactatgacacgcatgacaaacttctatgagtctgtggttctgtgagatagagatttagcaaccatccaattaatgcttcttattgatcaaatcagactatttgtttttttaattactctaaaaacaccactgtatacattccatacttgcaaatatataaattaagcccctggttttgtttttgttgttgttgttgttgtttatttcttttaaattccagggtacacgtgcaagatatgcaggtttgttacataggtaaacctgtgccatggtggtttgctgcacctatcatccatcaccgaggcattaaacccagcatgcattggctattttccctaatgctctccccaacccccaccctcccctcacagaccttagtgtgtgctgtttccctccctgtatccatgtgttctcattgctcagctcccacttataagtgagaacatgcagtgttttgttttctgttcctgcattagtttgctgaggataatggtttccagcttcatccatgtccctgcaaaggacatgatcttgttcttttttatggctgcgtagtattccacaatgtatatgtaccacatttcctttatccagtctatcactgatgggcatttgggttgattccatgtctttagaagcccctgatttttttaatcatctgtgttcaatacctttacatcttttttttgacaaatagccacatcatttaggaatccttatagcccaattgattctctagactgtagcatcctagcatcactctgtgttggcagtgggccacaaatggatgacagatgtgtcaagatgtgaactacaggtgtaccaagatatctacctgctcagcctcaggatggctgggcagttctgggatggccagagccccttggactgtgagtggcctcatctgcttatcccagtgtgctgtatataatcaatgtcagtattttccatgacaggaaacactttgaggatcatagtctaaactaatcaagtttatcaaattatattcatttcatggtagttatgcataaatcaaattggctaaggtgtttcgatttacacattcatgtttctctttctaaactttgctagtttattaataactttagagtttagtaattactataaaatcagtttcacaagtctaagaatagtgtgttgtaatgtattaatttgagtttttggaatcctaatttgaggtataactgagacatttatacaaaacaaatgtttttttttgtttgtttttttgtttgtttttttttgagatggagtctcgttctgtcacccaggttggagtacagtgccacgatctcggctcactacaacctctacctcccgggttcaggcgattctcctacctcagcctcctgagtagctgggattacaggcatgcgccaccacagctggctaatttttgtatttttagtagagatggagtttcaccatgttggtcaggctggtctcaaactcctgatctcctgatcctcctgcctcagcctccaaaagtgctgggattataggggtgagccaccacacctggcccaacaaatcactttttaaaattcctttaaagcatagaaaccttgtttctttaaaaaatccttgctattcagtgaaggcagaattcctattttcaactgaaaataaaagtcctatttgcatgagtgagaaaggaaatggggaaaatgcctgcagatgaagacagataatcaagtttttcttatgaatagacatgtgccaacattcctgtggagttgtttttagtatcatctttgtatccaacttacaattttacatttaggtaagaaaatatagaatatttttagcaatattttctgaaaatactgaaattcttcttttggatataaaatatgaaaatccatcatttgggggttaccacttaacctctttcaggaaaactcaggtagagtccaggtagattgcatgtgtgaagattctaggcttttcattgttgttgttttttaaagaagctaaagagcaattcatggcataataaaatatacttgaatcctaaaaaattataaaaagataaaggaattctttttttttttttttcatttctatggctcatgagagattcctaatattctttatttgacccagaaaccttaaactgcctaaaatattagttgagtttggagtataatgtctgttaagagaatttcttgttcccacttacctctatcaatttcatagcacttaccatatgttattgtttgtcctatttcaaatataaaccaaactcttctggtctgacgttaaaggccgtgttgtcctaacattttaaatctagaatggttgtagaatgagaaaaaacagtagggttagttaggagatataattgggtatttgactacacatagcaaaaaccaaaatagggccttattgactaaaggttttattctctcaagtaaggaaaattcagagtcagggcatcaagactggaacattagccactagggacctgagcttcttttctctctttactacatgatggagcattccatctgtgagaacttctcgtggtccaagatggctgcagaaacgccagtcatgacatgtgacaaatggacacccacactcttttatttcttttgtctttggttttttgggtttttttgttttgttttgttttgttttttggtttgtttgtttttgttttttctttgagacagagtttcgctcttttcgcccaggctggagtgcaatggcacaatcttggctcactgcaacctccaccttccaggttcaagcaattctcctgccgcagtccacgcccagctgatgttttcttttgttttgttttgttatgttttgtttggtctttttagtagagacagggtttcatcatgttggccaggctggtctccaactcctgacctcaggtgatccgcccacctcggcctcccaaagtgctgagattacaggcgtgagccaccatgtccagcctccacactgttttatagaactgtcccacacaatcctttcattacgtgtcactggaaagaaatcaaccttgtgggcacatagagttgctagggcaactaagaaatatcacctatagctggccactgcaaataaaattgggatcttgttctaaataaagaagacaatgaatgatgaggtaggcaattagcaatttgcatcacatcatttaggactctacaacagcaaaaaaatgaaaatgtaattgttttcaagaaatggtaacagaaatgagatgagttcacagtatggagaaaatagactgctgctatcagacaaaataaagttgtgccttatcattattgtatggaaaactattttgtcctctacatttatccccgtggtcaggcaaagctatgattcaagctgaggtgaatttccaggaatgcagcacattctgctgccctctccccgtgagtcctacctagaaaattacaagctttccagctgctgtccacaggaaagatgctaaattcccataaagcagtccttttctatttaaaattttgcgtttcatgtcaagcacaaatgcattttcagtagtataatcaatctaacttcctaatctgtttttgtaaaaagactttaaaatgttaaaatcaacgtatcttcaaggctttccttaaattattaatccttgagtgatttactctgagctattttgtagacatattgttaccaaaatcttgttcttcacatactcttttaaaacataagagtctattaagagtactctgagcaacatcataatgttgctaaaattattaggaagcagcattaacactttaactcactatattctcattactcgggaagtcattacctctttgtatttttactggttggtgggtttgtgcagaaagaataagtaaacctgaaaccaatattctagttgtgtgagttttgtgaaaagtagcaatgaaaaggtttgaaaccagtgcagacacagctttcctttgcttgtctgtacattatattagcttatatatttttgccatctatatccatgaatgatcaagttgacaattataaaacaacaagataaaaatggaaaataattgatttatcatggaaaatagctaccagccttggagtcagaagacctgagtataatttcaggttatgctttctcaagctactgtggcaggaggaggtggggtggggtgggggaggactaataacacctgctctaatttcccatgtaagttgttgtgaaaagcaaatttgatgatttataccaaaatattttcctgaactgtgatgccttgtgaacacagaaggaatcattttatccatgaaagagcaaatatcttcccctgggatttgagatataagaaaccacctaagcataggaaaaatctggttcacagttcaattattatcaatgtaaggtcaggctttcagaagataactaaatatgtgttagaggaaaatgctagttaggaaatagttgtgcactaaccaagttggaaacgtttgactttcatctaccttgactggcgaaaatggctctgtggggtttgttttcatttgaaaaacatgagcgctgcacaccactgtgttgttcagggtaatatcaactcacagagagtatcacacacaccccaggaagccctggggcctttcaaagtgtgccgtctgctctagctttagagtgaagggagttgccaacacattttgaaagtgtattgtacgtagcatagcatatgactttccattcaaaggcaggactcttttctcattatctcactagtgcctgatgaagtgccttatacaggtgctcaacaaagggttgctgaatcaaaatgtttctcgaagttagaataaatggaattgaacaaattgcaggtagtgttaatgcttagtcaaatatctggaaaaaaatctgttaaatatggaaaatggcaaagcaggagtgcttggaacttaatccagctcaatcttctctaagttcatttatctaacaccctcaaccagccagcaaaaacagggaaacacaagcaaaagcaagcagaattctaataaaccgatgatgcccccctacacaagcatttgctaccatgcccatacacaaaggacttgagagagaccctcacgtcttcattcttattttaaacatggatctaatgaggtctaacaagccacctcctggtgtctccctcatgtattattatagaagggagaaggtgggagaatactctccctagcacgttagaagacaagtgtaaacatgccaatgataactagaaatgatcactgatagcaaaggaggtaaaaacaatactatgagaagcatccataaggaatttcaaacaatgttgatctggtgtcatttatgtattgggcaaactgctttccacatcccagtatcacttagaaaaagtcaaaatcatagcctagagcactttggatgttaactttttttttttttttttgatggagtctcactctgtcgctcaagctagagtgtgcagtggcatgatctcggctcactgcatcctctgcctcctgggttcaaacaatcctcccacctcagcctcccgagtagctaggattacaggcatgcaccaccatgcctcgctgattttttttttttttttttgtatttttagtagagacagggtttcaccatgttggccaggctggtctcaaactcctgacctcaagttatccacccaccttggcctcccaaagtgctgggattacaggcatgagccaccgtgcccagacttggatgttaatattgaggacccagagccaaaacaaaacaaaacaaaacaaaacagtgacatcatctgcagtactctttaaagaccaggaaatgtataattaatgtttgaaagtgcatatgttagattttgccacaatccccaatgattgtcaccacctccccacacacatacacacacacaaaccagagaagtgaagggaaccaacatccccacccagggctcccaggagagcggaacttatacccaccccaccctgggctcgaccctatggcttgctttagccaatggcaggtcagcagatgtgccagatgccctgtgtaagcagatgttttgaacagcactcgcagtttccatcagcaatcctgctcctgccatggcaatgccatgcctcagcccaagtcctggagtgagaagagccacagcttggagcagcatggagccactgccccctccatgaaacagcaggagataacccttttttttgttgtgagctttaaagatttccttgtgcaaattccgtgtgctttaaaatattttatttttatttgcttgttttaagttggaacttttaaatagttcaagtaaggcagcatggaaattcatgtatctagagaccctcttttcccctactgtgatagataattgaggtattactgtgaatagcctcagttaaaattgcacttgagatggtgagaaaacagccacaagcagccaaatgcagtgtgttaactagattgtgcctcctgcaccccacaagccaggatgcctggcctcatctccttgaagttagggagacaagtcctgctgggggtgggttgggagggggatctcagaggatggaattttcatggactggggatattgaagatgatgtcactcattaaggtgtgggttaaggacagctttctgtttctggaaaagcaagcaccccagtactactcggagcctgagaatgactgactgcgtgactatgcacaaattatttcaccttctgccttgtcaccaaggattaattaatcattgcaagttgtctcgcgactccacaatgctaaatacaaatagaggagaccctcgaattcatggagctgtgactcgtggtcttgaatattcatttttaaccatgccagtgcactctctcacccagcaacaactctttgttttactgagttctgagggttccccttctgtttggaaggtgaaaggggggctgtacatggtgtgtggctgcaatactgatggcctgttttgttctcctggggagatactgtaaggcacagtggcagattcacctgaagctcatttttgccccccaaaatttctccccattaatttttccagtttgaaattctctaggcatacaagatcttttagagtgtaaatgcacttcaagagaaaatacaaaaacagaacacttatgaaggaagactttggtgtggtgtcatccccattctgcccttactgtgtaatcttgaacagatccctaaacttccctgaatctcagttttctcatttaaaaagaaaaaaaaatgagtgaaaatagttcctacttcattggtgtgtggctatgataaagtgaactaatgactatgaaatgtttaatattggcacatgatcaatggatattagcaaaaattcttgcttcttgattaagagttgagtgtcatccacgtcttggaaattgtgggaatttggaaactcaggagaacaaaaagaaaaaggtggaatggtgagggacttttggcagtcacggggcagaatggggctgtaggatctgaggaatgaaggaggagctggcgataaaatgagggggcgaggggaaaagggagcaaaaagagagaaggaaagaagaccagacatgaaccctttcggttgtgcccagatcccggcactagtccacgtggtgctggaagttactccctgaagtcaggcaactggaaaactagggctccaaaactgttttcccttctcaactgggtatcagaccacgtgtcccaatttggggttgctgtgataagaattgaggtagataaagtcatttggaaagttgcaaacatgaccttggcccaatttcagcccactgcacctggtccccatgattcatgccccacttttccagctcactttgtgtggccgcatccctttccctactcttccacagtgtgggatgaaggattcagctcagcattcccagaggcacctaatgtcatggtgtctttactatcatggtggtttgatacattttttggatcatattgtttaatcgattcgaagtttgtttcctactgcaactatattcacctgccactgtctcaaagaggaggctataggtgatgaaaggcccacagggggcgattggcagatacggctgaacagaattggtaaactgagtcagggctttatgaaaacaaaagccaagtaactcactctgcctccttaatctctggtgataatttaccttaagatggaaatttcagcctgggagtgttgaacctatctttaagcttagcagttgtttaatgaacataacaaactccagcattgctctggcccctgtcagagtccgttacttcacatatgtcaagaatttgagcaaccttactccttcagacatggaaagagagtacgtagaaagagatgttagctggtcatttgaaagccactcaaaagaacacttctggatacttgttgaaggaggtgaaggctctcccatggaaaactccttcagttgttgatgcctaggatagactgtatgttggcatgtttgccttcttggcaactctgggaagggtgatcgtaaacagtcctgtcagctacaaaataattggcgattattttgtagatagaaaataatcctatcttgtaaatgcttagctgcttcagcccatgcgaaggtctgaggagtcagccttcacggaagagacttgcaacacctacttgtctgggcttcacttttcctttcgttagtgctagtgggttgatcgctgtactctagaccagtactgtcagcatcagcatcacctgggaacttgctagaaatgcaattttaaggccgggtgcggtggctcatgcctgtaatcccagcactttgagaggccaaggcgggtggatcacctgaggccaggagtttgagaccagcctggccaacatgctgaaacctcgtctctcctaaaaatacaaaacttaactggacatggtggtgcacacctgtaatcccagctactcagaaggctgaggcaggagaatcacttgaacccacaaggtggaggttgcagtgagctgagatcgccgccactgcactccagcctgggcaacaagagtgaaactatgtctcaaagaaaaagcaattttataggtctcatcccagaatcaaaaatgctggagtaattaacaagacctctagatgattctgatgaacccctactccacgttatgaattaagtacttgagcctagggcctttatttaagggttgtccttctcttgcgtagctcttttaaagtgtccagtattctgaagttaggagccaagtgtggtaaagatgtttcttttgggaagaaaagcttcctcaaaatctaattgctagaaggaagtcagtaagttgtcaaggaattttaaaaaaatcagtactaagattatgactctagcctggatcttcatctttcttgcctggctttattctccaataaaactaattagcaatttaactatgcaaattttggaagatttctgatttggatttagtccaaatatgaaagtagtggtacataaggacatttttcttagtgaatttggaaagcattgatttacagtagtccagtagtcaaaatccctttgagccagatgggcattaaatatgctggcttgctatttgtgtaactacagttttacaggatttattgatccaatacttaaccaaccaatggccacattaaaaacaatcccttccaactctctcccataattaccagtaaaccaccacataggtatgttctgtaagagatgatttaggagatagatagaaacaatcttgaattatttaaatcgtttgttatgtaaaaaaatgtagaattattttgtgtggctcagaagaatacagcatgactaagcatctagaagagaggggaaggcagatttttgttcaataaaagggagaatttcctaatcttaaatctcaccctaaactaaacaggtggcctagtgagtcccttgttacctacacagggacactattcactgatgagtgagaggttttattcattaaaggttgatggaggtgaacttttaagatccctttcagactcagagattccacaaggtgttttccagaacacctccttcacattagctctccaaagtcaggcttgctaacctcctttctcatatatgatctcttccctgaagccatattccaaggagaaaaagcagaaagcagatggcctgcatgccagagcatcatttttgatgatttcacaaaaacagtttatgatcatttacatttatcctttcgtgtgtacttcaaggatatgctgtatgcaagagatcttgatatggagggccagacgcatgtcaaatccaagcctttgtgttttcaaccctgattgaaactaaatacaattatgaaacagaaacaaagatcagagagaaccagcaaattaagaaaacatctagaagtccaccaggactggaggcctcagtaaactttaggagccctggtaaactttgcaggcagccagacttagtagacttctattaatgatggcaactattaatattttgaaattgacaaatgttgttctatgacacatttcatatttcaccatagcgagccaagggaatgttaggcttcagattcacaactttataaagcattttccaaataaaccaagctcctcactattgttggaaatagttgctgtgtttggctaatccacccatcattgaaaactgttttagtttcccctcaatttttatgcaaattttatatataccctaatcaagagaacatgagtgcagtctttatttttgtttttccttaattaataaacatcatctatcttcctttctatgcaggatgttttagtaagcttgcaaatattattaaagattgcttttctttttgaagactgagatattaaaatcagcccaaccctgttgcactgtaatctctaatatcacatcaggttttaataaacctcctttttgcagcacacatgtgcttgagacttcatggaaaccaagtcagaagagagaagggattactttagatgactttaaaatatgcattgtttgaaatggcctctggtgaccagctttcatgaatggctggctttacttgtggggcccatcatccagtttaattatatcagctcctttgtgtgacaagtgctgttcttgcatatgctgagaaatgaaagtttaaaacaaagtagagtaatgagtgagaaaataaattctggaagtggaacacccctgggtgtttgtacggaagaattctaaggactggtccacctataaacatctatttatagagatactccacagtgacagtaagtgtaaatttgccttaaatgtccctggacctagatcataatatgtgccttttcaggaagatttattttacatataagtaacactttaggatgctaatgtggctcttaaaattttcattctataaattcttatgcataaaacttcataaaggttacttttttgtaacattagaataaaatgctaagtttttattagctaaagtatttcccaacttctgtccagccagtaaactaacacagatgtcataaagtttcaagacactacaggttcattatttgaatctataaatgttaggaaagttatggttttagaaatctcctgttgtatctcttgagttgttagcctttctaaaaaaaaagaaaaagaaaaaaagaaagaaagaaattggtgagtcgccgtggctcacacctgtaatcctagcactttgggaggccgaggcaggaggatcatgaggtcagtagatcgagaccatcctggctaacatggtgaaaccccgtctttactgaaaatacagaaaattagccaggcgtggtggcaggcgcctgtggtcccagctactcgggaggctgaggtaggagaatggcgcgaacctgggaggcggagcttgcggtaagccgagactgcgccactgcactccagcctgggcgacagggcgagattccatctcaaaaaaaaaaaaaaaaaaaacaaaaaaaaaaaacttcatacataaactgatctgcattttaaagtttccttgaaaatgtctccaagcaaaggcattggctttaataggatatttgatttttttaaggttctcctgtaagtaatacattttgaaaaaaaaatacagctaatctccataatttgccttgagctaggaactagaattgtcttttgaaatgtgaatgcctccttcacactgtttcccagagctttctttcctggtcctctatctgcctctgcgggaggccaagggaaggaggaaggaacttgtttccccactctgctgtgtttagccctgcaaagaagttagagagcattatattggcagtgaacttgatggcataggaagtaggccagtgggctgggcgtggtggctcacgcctgtaatcccagcactttgggaggccgggacaggcagatcacttgaggtcaggagttcgagaccagcctgccaatatggtgaaagcccgtctctactaaaaatataaaaattagccgggtgtggtggtgcatacctgtaatcccagctacttgggaggttgagaaaagagaatcacttgaacctgggaggcataagttgcagtgagccaagatcttgccactgcactccagcctaggcaacaggcaagactccatctcaaaaaaaaaaaagtatgccaatggggttctcttgactgcagcttcatttatatagtaaagtcaggtgttcctcttcctacatacgactgtgagatagtatttcgagaaatgattttcagatggtatatttatgtttcgaaaccatttctcgtagtacaagatagtgtttccagaaatgccttcaaaacataaatataccatctaattgtctttttaaaaatatttacttcaacttaaaatgtatctcaagaattgtggaactttaaaaatttttgcattgcgccagattatgtacatcaggaaaacagactaaaacgaaacatgtataaaaaatccccgaatctgtcgaaagtatatttttagtgtctaagaatgattgaactttatactgtgagaaagattatgtttcttcgttacttgagatatgtgtctgtgtgtgggtatatatatttatacacatatcttaagtatgtgtgtgggcatatgcacgtgtatgtgtgtgtgtggtatgtgcatgtagagaaagagaaagaaatggggtactagtgaaatgtaatgtttgtggcatagacattagtgctcagcaaacactttggtccactaaattttccagtgtccttgccgttgagtggggccacaagactagtctcatccaatgaaatgttagaagtgaactgggtcacttccaggttgaagccctgaaaagctcctgcacaattcttgagtttattcttcccttgcttcctggtctagttattgcagcaacaggacaacactgcccccatcagtgtgcatccatgcatggctgggcagagcagagttctctgccattctatgtgtgacttgcagtatgagtgacaaatatgcttttatcatatttggaatttctttgttattgcaacaaactacttctgctgactaatgcaatatctcaaggtacttcagtacaaataagccatagatatataaaaccaaaggcaaatttaatgaaatttaatgtaataaaccttatattttaagacctagctaagatgcccaagaccacattttagttctttttaacaatatcgctgcccttcccccaaacccactttatgttttttcatcaacttttattttaagtccaggggtacatgtgcaggatgtgtaggtttgttacacaggtaaacgtgtgtcatggtggcttgctgcacatgtcatcccattatctaggtattaagcccagcatccattagctattcttcctgatgctgtccctcccccaaccctaaagaacccccaacaggccccagcgtgtgctgttcccccacatgggtccatgtgttctcatcattcacctcccacttataagtgagaacatgtgctgtttggttttctgttcctacgttagtttgctgaggataatggcttccaagttcatccatgtccctgcaaaggacatgatcttgttcctttttatcgctgcatagtatttcatgcaaatccactttacctgaagtttccaatgcctcttcttttggaaatccagttgtctcttcgttctcattctcttggatctcactgccaccattgaaaccattgatcatttggaccacaattggtcaccaatgaccattattagtccctttagacactttgtaacatatgcttcaggaatactgagttcttctggtggttttcataatatctagatcactttgttttcctttgtcttgttaatttcatctgaaagaagctggacaaattttaatttggactttatgcattctctaaaatgcccttcggaagcttgtttttatatggttttagtacctgcttttatgaggcagagtctcaaaggcacatttctcacttcatccttctcactcttcaaccctcacttcatccttcccactcttcaactccatctattttcttcctccctgagaagacagagagaaaacctagaaaacttaagtttatttatttctatgttttgtaatgcaacagattattgaaaaaattcaatatatatatgaattaagccaaaaaataaaatctgtccctctccctcaccatacaccagggataaccagcactcaccactgtgtgaatagatgagctttgaagattccttccaatttcaagattcacagtgttgtgtggcaggaggagaggagaaaggaagatctcatcatttagccaaatatttccccacaggtgttccaggtcataggcatacacttttcagctgtcattgtttgttggaagaggatttattattggaggagaataaaagtgttactacaccaggaggggatgattgtctatcttctttgcttggagttgtagtaaattagaccaggaaacaggctttctggagattaacagtaggtgaacttgccagctgtggggttgttaaaagaagaaattagctttttcgtggattcatgtatcttataaagaagatagcacatcctgaagccttactctaaagaaaagaagtaatctctgggagactcaaaagccaaaattaaggggaaagggccatgttaactgatcctaagaaatgtatgtagacagcaatgtaggatgggaggatgagatgtgggtaccagcttcttgctggtgtaattctacttcgcttgcctctgacaataatctaagcgtgttctggctaaattcagcttcgcataactgcataatctcccctgcccctgctgtttcaactgcttatggtgtcccttttttctctggcctaactataaagtgccattgctttgtactagaaataattcttctgccccatccaagagaggtttatttctgtggcgagtgggttgttctgaccctgtcccttgcatacttcagatgcatgggcattcatttgtaaaattttgtgttatccttgggtaataaaaaacacagaattttatcactcatcaacaacttttatctgagaccaggcatttagaactgaggacagtttcaaggctttaaggaaaaaaagtaaatgagaagcttgtgactagggccagacctacagccttaaatgtgagagtctgggcttaactatagaacaaggtacactctaagccagcaattctcaaaccctttggttgtctcagtatccctttatataattaaaatttattgaagacccttgccccaacagtttttatgtggattataattattaatacttacaagtgaaaactgagaaaattttcaaatatttgattcttttgaaaataataaatctattatatgttaacctaaatgatatattttattaaaaaaaactatactttccaaacaaaaaaattgtgaataaattatgaattcattttacatttttgcaaatctctttaatgtttatctgaaaagaaggaagtcgaattcttatttctgcttctacattcagtctgttgaaatacactgttctggctgaagtacagtaataaaatccagaatcacatgaataagtagttggaaagtagaagcattttaatagctttttcagatacttatagatattttctgatactacaacaaaacttggcaagtgataattcattaaaggttagttgtattaagaaatctgaagccatatcaatgaacttttcattctgttacaatagaatccattggtcatcttgtacttcaaatgcattttttattcatgtaagattttgtagcactgtgattatttgggaaatttggttcactgaactatgcgaatattctaaatgttgactcatttcattttacaatatcaaaaaataacatttgttaacatcactaccattgtcatcagaaaaagttttacttattgggagtctgccaagtgtagtatacaagttttccagaattctaattttaacttgaaaggtagatttctatcattggtaacaaacactgtcaattgtttcccttgaaatgataggctcatttcattcattatttgagaaaatgtctgccaaatatccaagtctaaaaaattcttttaagtaaaagtagtgtttcattttttgtttgtttgtttgtttaaagccactttagcttgcagctcagccaccttcatgcttttcctcaagacagccatcatactcccccagccaccaagggactttgtgtgaacctcttatctcagaaaacacaacagtgaaaagaaaagatgtgtactcaaggtcaaggtttaataaaattagtggttttactgcttcatcttaagtgaagctgggttttttttgttgttgtttttgtttgtttgtttgtttttactatatgtgaagcttctatcattcatgctaagacaaaagcggaaagcggttctacctactattgcttttatgccatctgtagaaatgtcagcgcagtgaagaaagcaaataatgtgtcagtattcttatcaaaatagttctgacctcatgaacctctcaaaagggtcacagggtcctccaaacgtcccaaactatactttggacattgctgctgtggacaaaagcaaggtgcttttgatatattggccaccatcccctctagagacctagcaccaagctgcccagccaaagtggggattggggaagacagaggtccccttaaacctttgggagcaacagggcttcagtttagattggggtattgtggaacaaacatatgtgacctaaacttcctatccagttggctggacatcctgccagtcttttttttttttcttttacatgtgacttgaaacatttaatgccacttttatagtttggcttgacggccctaagccaccctaaacaaagtcttgtaaactttccacaccaattgaccataactacaactgctgttttcattttatggcttggagtaaaagcaacttatatcctggtcttgactggtgaagaatagaacactgttcttcaaactcactctgtatgtataagaaaaacctttctgcatttctttcattttctactctttctcaagataaattgttagtctctaaggactcttgttgtcccccacaaagtatccaattcaaacattgcatccttgtctcttctgtcaagctccgcattttgtctgtcaggacttttttcccttctttacttcttttccttctagagctggaaaccaggcagttaagaggatgacaggctttaaaaggtcatttttgaataaagaattgtctgtgtgcagtgtttctagagtggcatgttttgtgtgttttagtgaaggaaggtgagatagagagaggactcgtgctggccagactagtcaaaaaattcaattttcttgaccacttaatgtatatcgttgtaggtatgaattccctgaattgaatgttggtggtggtgggaagaagctgaccaaaagttccaaagttctagtgagacaggaggaataaacattaaagatctgttgcccagcaaggtgaccacagttaataacaatgaattaattgtatgtttcaaaaatgctaacagaatagattcttaaatgttatcactacaaaaaaaatgataagcatgtgaggagatagacatgttaattagcttgatataatcattccacaatgtacacatatatcaaaacatcaaattgaaccctgtaaatatatacaattatcatttgtcaataaaaataaaaattttaattaaaaaaataagatacactgtggcagaaaaaaatgtagatcttttctgcacctttcattcaccagaaaggaagttcatttcataggaaaaaaccactctctcttttccatattaggaaatgatttttgatgtagtttatacaaaggtatcattaaagctaatttgctttttcctaaaggaagaagtaaagtaaataagataaagaaaagaataactagcaatgttgattgggttccagcaaaggttatcagcatctgaattgtcaagaactttcagcttcttgtattgctgattatttaaactcaaatgccactgtttgtctaacgcagtgagcctgtaactgttcctacctggttgctaccatcagcaggggttcatttacagtatagtggatgcacaaaggccctcttcacaaactctcccttcacacacctctgcaggccttgagaggtgagcaaagtttttgctacttaaggaaccaacctctaagaaatttctgtatttaactatttagcctgacccatgctttgtgagaacaagccattgtttatcattttattactttagttttcctgtcccttcatgcctgtatcaggtttctcacgatttaaaacaaatgcacagaaaccaaacagtcagtgcagaataattgcaggctttcagtgttcagcatgtacagcaatcactgtggaatcaccctgcgttattaagaagaaagcaccaaatcttacattagtgacttctacagggctgcgttatcaattggagctgtcttgtttgttgcagataatgtagtcaggactgcctggctgcagacactagagttttgtttaaaaaccgatttcttcttgtctctttctctctcttgcagtataattacaggctgcagagtgaaaagcattagaactgtttacaaaacagctcataaagtttaaaataatggggatacgtgtgtgtgtttgtgtaaaacaaaataatgtgtatggtaggggtaaacaatatccagtctttcttctttcactaccccctgtcaccttccagaattaagggcatgaagttgagagatggagccctttcctcctgctatgcgatgcttacacttaattagttatgcctacttatccaatgccagtttattgttgcagatcaaaatacagattctcaggtgtatggggactgagtggctgatgaaacagactgctatctaattaattttagggcagcctaaattcccataaagatgttccctcatgacatatgagaggaagattttatttttttaatgagccctttgctatctttccaagagaaaagctttcagcaggttagtgttccaaagtgagaggggcatttttccaaccctttcaaaagcctccttctgtgcagctttgcaaagattttgcagctcgcccttctggattttatttatttattttttaatgcggaagggtagccgctgactccagcctcggggccaatcaatcattttgctttgcaggtttaagatctgtgacaaagcgaaacccctgtgctatctgtgccttaccagtctcaccaacaataagcctggtgactgacaatcgagagggggctctgtccacgtaggtgccggcacaagctgaggacatgagtgggacagaggaaccagccttgcacggaggaagcaccttttccttctggtgattgattgatgggggacagtgaggaggttttcagagactggaaaaaattgtcccagtcacttactatgaagtctttgtcagcagaaaagactctccggggtagagaatgatataatgcagatgacaaatgacaggtgtgtgtttcgttctgcttgctaggtactcagtatcacacgcaggtgagtcagcgctccccaacatgccccttgcgccatctgctccccacatgcaaacactcgttcccaacgctctgtggtttccctggcactgctggctcttcctaatcgatcgtcagctctgttggggatgtgtaaagtactgtcagagtgtgagcagggtgataccttaccacccttttatggagctgattatgaaatgaagatagcatttgaatcatttgttagcagttctgaaagttgtttccttctgttcctcccttttggagcacagaagaaaaaatatatgtaatatatacacatataatatgctgttgcaagagactacttcagatcgaaaatctgtttttaaaatcattgactgatatttcctttgtatttttttctcccccttccaggaccctatctgcagatgttctgaatacctctgagaatagagattgattattcaaccaggatacctaattcaaggtattagctctcgtcagaaagcttttacatttgagctctgtgttggaaattctattttggcaatgaattgaaataggaaaagttggaatgagaataaaggacaaaagtgaatttgcaaaataatcaagtgcttaaaaaactacccagcacttgtgagggtttgctatttctgactcatgtgcaaccctgtctctgccagcttatgtgccaatactgacttatttgtagccctttctctgcaactgtgcttggagtttggatttcattttagtctcaccgtctccgtttttctctgactgcccagaactccagaaatcaggagacggagacattttgtcagttttgcaacattggaccaaatacaatgaagtattcttgctgtgctctggttttggctgtcctgggcacagaattgctgggaagcctctgttcgactgtcagatccccgaggttcagaggacggatacagcaggaacgaaaaaacatccgacccaacattattcttgtgcttaccgatgatcaagatgtggagctgggtgagacactggactcttcacttgttagtctcttttgttcagatgatttctcgagtctcaggattatcaggagacattctgaggctttgcacttaattattgcacattaaccaacaccctagtttacgcaatgaacttgtattgaccataaggcatttggtttgtgtttcagcattacttttctgatgttatgcttttgaaatggtcggggaaggggcctgggggagtaggacaatggagaaagagggtcagcactgaagactgtagaaggaaaggattgaaagccctcagttaagacattgtaaaaatatttgggcaaagttgtttcaaagagtatgaggatgtgactgtaattttatgcaatggatatgaatatagactgatactaaaggaactttcagtggttattagtattagagtggattacttattcacagtttgttatagtaattgttaggtaattcaaagttgcagtgttctatatgtcttttggtagagaatccacttactactaccttagatatgatgcttttttatttagcttgcctaggctaagcgtagagcacccagaaagcctgccaaaatctagtgattctaacttaccttctatatcacctgactgggtttcttaccttctcaccgtcttcaatggcccagccctacggtcttgttcataagccaagggccaattcttctagtccacctagtgcaaggcagatagaaagcttgcccctagaagttgtcactaccactcctcatttcttttcctgaacccaaattccttgctctcaggcatcacccagctgtgcttagccatcacattcaacctgactggtagttgaatcttctagcagagcatgctgggcttctttaccgagctcctgaggctcaggttcttgaggataaaactcttcacgctggcacttggtctccatggaaggggactttgctttcccacttgaaaccagacggtgagatcccagtaaagttaattccttgggttcagctggaagcaaatgcgctaaaaagccagcagatgtcattattgctgacgttggtttgaggagtcaacccaacttttttttttttttaacaagggtattgattttcaggcgacaggccaaaatgaaaggtgtcacacatacatgagtgtgtatttagcacatatgatgttagtatgtatgtaagtggtggtttaaatgttttcattcacttacagagcaagtaattttagcttttttagagccttgtgggtccatttcaagttagtttagtgcctaatgtgttaatagcacagtctctgcatgaggattgcaatgttaaacatatccttgccctctgcttgacctcacacctgaactcaccttccttaatatctcacccatccatcgcttttgctacagctgagatctctggatcctctcatctttcccagtttttccctcaccggtttgtcacctggcctgcctgcctcctctagtcttggcctctcttgcccacccttcactcaattgccagagttatctttcaagtatctctctgatcagatcacttttctgcttaagtcccttctgtggtttccctttgccatgagattatgcccttctcctctgtgggcaaatgagttctgagccttgcggcccctgcctgtccccaaggctgtttccctttcctccactttcactctgtgcttcataaacacaattgccatctccccaaaggtgtctggtggcttcacccccctcgcctctatccatgcctttgcacatctcatcccctctgccttttcctctttccccacctggagaaaccctacctgttcttcataacccagttcatgtcatgcgcttggtgttcccaaaacaaaaccaccctcccctccagcagcattgatggaactttcctttgcaccccgagaacacgactccagcatggtgctcattccaccatagccttccatgcctgtcccttccacttgaccaagatcaaccagagagcaagggtgtgttttatgttgcactcctcatgcactcctagtgcctgggaatatagtgggcactaaactaacttgaaatggacccataaggctctaaacaagctaaaattcccagaaataaatataagtattcatcatcatctacctcttcaatatacagcactgtctttaaaatatattaagaaattgctcataactttcttttttaacagaattcaaattttcagccttgtcctatagttcatttattcatccagtaaatattttctgagcagttaccaagtattgccttctgttggaggcatgtgactatcatggtgaagggttatagaccaggctcagccaacccagatatttcctacatatttgcctttaactccttccttgattttctagccagataacatgctaagaactagctcattggctgggtgtggtcattctcgcctataatcccagcacttcgggaggctgaggcaggcggatcacctgaggtcaggagttcaagaccagcctggccaacatagtgaaaccccgtctgtactaacagtacaaaaattagccaggcatggtggcaggcacctgtaatcccagctactctggaggctgaggcaggagaattgcttgacccgtgaggcagaggttgcagtgagccgagatcacaccattgcactccagcctgggctacagagcgagactccatttcaaaacaaaaaaagaactagcttgtttaactctcacagtaactctaggaagtagttactattctctctttaatttaggtatgagaaaaatgaggctcagagaagtcatgtagcttgtggtgagcaagtaaattgtgaaacccagacctgtattagatctgagtctccacagctacgtatttaaccactgtcccttccattaatcagccatctacaaataattattaagcacctcctaaaaacaatcggcaaattcataatattttaggttctgggagagagggaacagaagcaaaagataggccactggcaaaaacaaaatgactaggaaccacagtgaactgtgggttggaggtccagaaaagacctcctttcttggcagaaaagtcatgctctcggtagtggttcccgcttgatggagacttttcctcatttttctgtaatgtgctcataatccttctagaacattattgctctagattttgggtgttggttgttttgtttttgtttttttaccatcttaaccatttttaagtgtacaattcagtactgttaagtacatttacattggtgtgtaacccatctccagaactctttccatcttacaaaagtaaaaccctatacccattaaacagcaactcccgtttctctctccctcaatcctggcaactatcattctactttctgtctctgtggatttgactactctaggtatcttatatgggtgaaatcatacagcatttatctttttatgactggcttattttacttaccctcatgtcctcaaggctcatccatgttgtaacatgtgtcagagtgtccttcctttttaatgctgaataacttttcattgcatatatgtaccacatttttttaacccattcatccactgttggaaatttgagttgcttcctccttttccctattgtggataatgctgctgtgaacatgggtgtacaaagagctcttcgagaccttgcttttagttattttggagctatacccagaagtggaattgctggatcatatgatactcttatttttattattttgaggaaccaccttactgttctccatagcaactcaccttgttacgttccctccaactgagcacaagtgtcataatttttccacatccatgcccacacttgttattttctggttttgtttttaatagtagccatcctaatgggcatgaagtgttatctcattgtcactttgatatggttaggttttgttttgttttttactccagtgcaattttctttgccaagtgctttaataaatcttcacctaatgcaaacctttttgcacctgtaatgctgtaggcaattttggctactgtgcctccaaaaagaaagtaacagacttagtaaagacttagaagaacaattatgaaaattctaatagaatacttttctcactgggaaagcataaaacaatcctatctgtttatctagaaagatgaaggctgagaagggctataatcaaagtttataaaatcgagccagggaggaaagtactagttcattatgagcaggagcccttcccttcactttcaggacaaataaactattactctgtaaagggagtaagacacataaggaattcattaataaaagtactagaaccttgcatatggataacactttatcttttcccaaagaacattttgttcacattattgtgaatgaatattgccatctcacatgagttgggtgggtaggacaaagatcatcatcccaggaggaaacagcctgtggaaagatgaaatggcttaaccatggtccccttacttctgaatttgcttttcccacaacttaagaagttgttcacgttgtgcctatacccgtaagtacttcagagttttaggctagaataatgggtggaagatttacaattttttaagctaagtaaacacgcaaggaagtgatcaacataaagttcaggataatggctaccactggggaaaaagtgatgaccgagagcatcagtacattcacattctatttcaaaactgaaaaaatatatatctgaaagaatataatcatgttaagttttgttaaagctaggagatgcgttatttattctgttacaccctacacttgaaatattttataaatcagaaggaagaaaataaaaaatgtttgagggactcctaactttctgagcctagcatcaaagaaattgggctctaaatctttcccaaatggcctttggtgctagtctgagaaacaaaatactgagcagattagaccattgatctgactcaacatggcatttcttacattcctaggaaattgacctgacaggaacatctcagtaacattgacccgatgtttctcttagatcatatgtatagggaagctatgagtacatggagatattttgtttctttaaaacaaaagccagaacacaagatattcagaccagagctagcccacagatgtatgttgtttgatgagcatacttttcagaattaagccaatattttaaaatcatattttaaaatatatataacatataaaaaaatcagattctgacgtttcttgaaaattcaaaaaatgaaggcttgtattcccatgaagcagtcatcacttggatgtttgaaggggagctgcagctgctctcggacactgggatcccccactactgtgttgtccctcaataacttatgccaaggtgcaggtgccatttatcattgaccatactgctgtttttcttatagtcaggaaaagctctataaaccatgtctctatcaaaggtaaaacaacaaaaagacacaaaaaccctctgacttttcttatacctggctgccttcacttgcctaccttatctatgtagccctgtaggcatgttaacttccattcctgtaagtagcttttaatggccttgtgctcttttggaggggccaggaggaaatgatgagtcttagtgatctggaaacattccagactaatttattatcttctcttttttcccttcttctcccaactaccttttccccctttggttttaggtaaaaaacatcttttttttttcttgccaattccatagtttgggtagaaaaaaaaataccatttaattttgttattttttatatgcttatgcttttagaattagaatattcaatagatcatacaggcattttaataaaggaaatgtcactgtttcatgtttcatactttactatgaaaataactgttggcatgtgaaaatggcagggaagtacctaatacaaacgacttaaatatttaaagcattagccttacttcatcataaaagaatgacatcgacaaacacccctccacaatcagtaagagctgggtttgcttgttgttgtcaatcttcaaaccatgaatgctctaatccacatggaagtatctctctaggaagccaggtgtatatgaatcccacatgtctgggatttccataagtgataatgacaatatttactgttgaatttctggttctgcgagtttttctggacatgacaaacaggtttgatgaaatttttaatgtttagtaatacaaaatactgtatactcaaatgctaagatatatgtatcgggaaaggtaaagctttgttttgaagtttaaacatgtcaatgaagtaattcaggatctccgtgtgattttagcaaagtcatccaaattagggggacattttctccgatcctttttcatacaaatgatttttgtatgaaatcattctgtatgaaatgattttgggaatcaagtagttggagtatataaagtgatttaaattcctcactatggttctgtctagccacaacctatcacatactccatccaaagcactattcctggagctttgatttttaactgtgccaaaattgccaacatggtggatcttgatggattcctgaagggtggcacttctcccactcccagccaccgctgacctcttcagcatcctggtccacagccgatggctgtcacagcatccgcctgcaggagcaatggaagatgttctcagtcccagcctggaactggggcactgggacagtgtgtcttggcagtcctgtggcctggaccttccctctcatcaagccagcccagtcagcagtgcatgcacaccagctacacagacataatcacggttgcttcagagcatttgtgtctggctcccacttcatgggacaacttaaaataacaatgaagttgggctttttgcttagggtgaggagtcagtgtgtgtagaaaagggaagaattgatatttgtatttgaaaaccaatatcaacattttaagtcttacagcatagaaaaggtagttgacctctgttctctcctccagcttttggacttcagatgtagattacagagaagaagatggaagaggcaggagaaaatttaatgtgatggggttgaggtgagcacatagggcaaccacagccacctcggcacactccttacaggaagtacttgatggcatcctgccgtttgctcagcaacaaccttgtaaactagtcggagtggggagcgctattagaagctccattttacagatgagaaacacaaaccaaaaaaggataaatgacttgctcaggctaagctgtggcaaaatccaaatgttttcccacatgttcaagtctagggctctttcccttctcatctttatcatcctcacccctgccttgtgaatctgattatgagtgttcagctttacaattcatatcattcctatgaaataattgttgtaataactgagaatcagcaccgtttgcatttcaggcacccaaggcctgaaacctacagaagtgaagagcttcagcttaaaacaaaactgagcccttccacttatcggacagacattgtcctgtccactgctctcaacagctgtgaataaataactatgagttttattacagaatcatttttagtaaggtttgccaataaaaaaatcaatggcacaatcacagtgggaatatatacagggtaaggcagtgttattgactgacattaatcattgcacagccattaaaaggtgctcgatgctttccttactggtacacactaacacagtggagtgaagagattcagattcctgcacaccgtcatctgtctctacccagagaatccatagagatcagaggcaacaattaacgccaccatggcagtcagcagctaaagacagacagatccacagcccactcatgcctcatctgtgcctgagccactgagaccatttcagccttgaggggagggtaggagacaggtgttaatgtcagtcagtatctcctctaagaggcgagaagaatcaaaagatgagagtgcagaaagagagacctatcgcgactgcaagcagacgtcaattctgtttctcatcttgaaaatgtcaatgtcacagccagcattcagcctagatagagctcaagagcatggtctctgggaagactgcctgcatttacttctgggttctgctactgagggtctgtgtggccctaggcacagcatgatttagccttctgcacctccatttcattatctgtgatataggaataatagctactagcacccaccacaaaggattattgtctggatcaaattaattgctcatgtgaagcacttagaagagaacctggctgagagtaagtagaaaatcgatgtttctttttcctgtctacaatataccttatagtcttggcagtgatctaagccacctagatcactcaaaattaggcacccactacagtctcttccagctctaggcttccctgattctgtgtccaacctagaatactttttcaggtgagattcactgagaggcagcttcggcttcacccaggtttcattagaaacacaaattctcaggccccatcctggacttactaagccagtatcttggggtgggtacaggattctagggcttattatgcccttcaggtgattttttaaagttggacaagcattgtctcagaatctctttactgagaaccttcaagccagattcccactttttgttttgtttttatgagacagagtctcgctttgtcccccaggctgaagtgcagtggcgcgatcttggctcactgcaacctctgcctcctgggttcaagcaattctcctgcctcagcctcccaagtagctgggtctacaggcgcatgccatcatgctggctaagttttgtattttcagtagggacagggttttaccatgtcggccagactggtcttgaattccccgcctcaggtgatttgcccaccttggcctcccaaagtgccgggattacaggcatgagccactgagcccggcccgagattcgcattttcaaggaccccagtggtggagctgtattcttaacagtgcctatggggatccactgttgtcttggttccttttgacgtgtggactggtgggagccagggcatctggagggattgcttgggagccctacacaatcagctcagttagttaagaaaaggatgatactgagaatgagaggagaatcctagctggggcacttccagcagtgatgaattgggataagttttagcccctgtttttatattattttgactttaaatcagatttctacctcggtcccatatttgtagtctaaatgagtctgtaaactagagattacagtgctgcgattcagaaccttggatgatggcctcagctgcatttttcttttatttgaattctgctaaggctcataaaggaaactgggagcttgttctttgaaatagactactggacactgaaaagccatcaacagggtttgctgttttccccaaaatcaagatactcagtaactaactactgcagagatctaaagaggagcaatgagacatggtagaaatcttcagtgtcacctttcaccctctttccacttctacatctccgttcatccacttatctccaggatattccccctgtgtgatcaaccaacacaaatataaaatgcaacatttctaaaatggggttttaaaatctcccataaggcatattcctttttagttacttcttcaccatcagtgaaacgattggtttccagttttcttctcacggtgaaaacttcaaggtgttagccaactcccagccttctcatgcatcaccacatcacttgggtctgcttcttagggtcgctctgtgtcagaggcatagtcgtccgagttcttctttcctcaggggtagacggcttcagcgacctcatctgcacccttcgtggaccagcagcagtgtgccctcctcaatccacacaccaccattgcaactgcaacgcctctcgaggggattgcaatccactgcagcagcaacaccttacaaagacttttttcttaacatgccgttcgtgtctttgacacagaacataactctacctttgttttttttattctatcacatccagtatctctgcccagccttcaagctatttgctaaatctgctttccacatttcatgaagagaattctccatatttctcttcatgccaggaaatcaatgtgttgttctcatcactctacttgtttcttcccacctccagagcatcacacatgtcactcgctgcaatcccccaatgatatacttcacccatccgacatttacttcctcctttttttccatctgtcctcatctctcatttcagaactcttattaagccatcaatccaagttccctctatttttatatgccctgctactgctgtattcacattgttacgtgtgcattgctttgcaaatatccccaagtgatttttctatgtaggttctcctctagagaatttattactgaagaccagaggcagaaaatttcccatttcttttgtttatgctacacttgggagatcagcccggaatgctgaggttgatagaatgttttgcatgaagtaggcactcaagacatgttattcattgactacaaaaggttgcttgatgccctgaagacaaccagaagagaaagagcagttaggattgctcctagccgaggcatattttagggagctctaatgagacccaattagaaaccctcctcctgttctcatatgcgtcatgtgaacggtaaaagctagtatatgaagacacggggctaactgtggctttttggactgttgcatgcttctcttctgccctgaatgcttgcctggtttgcattacgatttccttccttgctggaaaacatagactttcttcctttctttggaagaagtgggacctgttggaaatctgaggctccaagattcaaatgcaatgggcttggctgtagtgctctgtagtacacttcttgacaagtcctgaaaagactattgaattctggcctgtgcttttctgcagtgtttggatgtgtttcagctgcagtgtttggctggacagagtaatcgaaatagtttttttttttttttccttcctcagcaatcttacgttaccagttgatccttaaagttaaaatggaatattttacaaccctgcaaatactttcgagtgcaatcgaattatagctctttcacaagcaaacagcctatctttaaaaaattgtgcataaataggtcaaaatataaattgatgttgttatcctaatagaaaaactggcaaacatttggtgagcttgctagaggataccaacttgcattgaagatcttttttaattattattaaacaaacacaggcattttgatgggacttaatatggaagaaatttttttctcttttctttcatacgattaaaatgctatagtagtaatctacactagtaatctagtagcaatgtcactagtagattgcatttgtgctgggctgggggttttgatgctctgtgtatcaggctattgttctctggtaatcttcaaagggctgctggcctttgaatctgctccatatctaaaattctagctttaattatcagattagcctgcatttttttttcttcgtgattacagggaggagaagtgtatgtttattattctgcaaaatacttgagatggtaggatctcaaatgcttaattttgttgtagaaatgagagctgatcaaattatagactcctttaagctaaggaaaggaaatgaataagtcagggaaacagaggcactgaggggcacaatcgaaataggcattcatgtgctgcactttgctaaacaatgctggcactgtgcctttcagggtccctgcaagtcatgaacaaaacgagaaagattatggaacatgggggggccaccttcatcaatgcctttgtgactacacccatgtgctgcccgtcacggtcctccatgctcaccgggaagtatgtgcacaatcacaatgtctacaccaacaacgagaactgctcttccccctcgtggcaggccatgcatgagcctcggacttttgctgtatatcttaacaacactggctacagaacaggtaagggatgacgtttctagcccatgaacgtcttgtaatatgtcttagactcaggaagaagtgtcatgtaatgaaatgcatgaagttccaacaaatacctaaaaaaggatcaagtgtttttaaactgcttgacatctaccccagggtctgggacacagtaaatgatcaaaattatttattatttattaattaatgaaaaactgatgggtaaatcaatcatgtgtaccttgttgattcatgtatttgttcattcataattaataggatttggaaagtttctttagcttgtggttgtttttaggtctcaaatgttcacttctaccttccaggaaaggaagtcatcctaattgctacacctcctattattgtttaacctacacagggcaagaagaggtttttgattaattggttttttgaaaattggggacttctttcaagaggggtagtgaacatcatgccagtctttctgagaaaaaagcaaggttccttctggtaatattagccccaaggccctatcctcccagcatgtagatgatgtccttgggttttttgtagcatttcttcataaaagggcacaacgttgttcgtagaagggctacagtgcagacatgggttgttgcttgtttttatttttccagaatcacctaggcttattcataagaatcaaatatgttatgattaaagcttgttcaaatgactttcaggcctacaatttctctattttgaagatttaaaagtaaaggagttcagataaatattctcctgcatctcttttaaaagtgaaattaatctttcccactggactcaggaaatatatggccatttgcttctttgcagagcgccctacgggcacttaatacttgttatttatggatgaaaatattgattgtgcatatgatagcactgtcactcgcagacagctcaaagtctcgactcgaagcagctcctcccgtgcatctcaagggtgttttcttatgcgtaggaaagaaactaggttacgtagaggttacagagagtgccttatctgagtgtgttttctcacattagtgatttaaatttatagcacctttcatttgaggactctaaagcaatttgcaaatccaccaaacatccctgtagagttcatagatggcaaatgtacttggctctgttttataactgaggtggggatttcaaatattgcgtgaccagctcagaaacagaatcagaggcggttccctaataaccggttcctgattttaaccatcaaattgtgttttgcttctgggaagtgttgtgtgaaatcagtgcctttcacctcccaggttccctagtagcaaacatggaactggaacgattgggactctcacatatccagagtgaaatggatgacatttgtcataagaaatagagattgagggtgagacagggccctgccaggacttagagcagtcaactagggtttgctaatttgtttcagggctaaattaggaagggcaagaaagaagggaactccattttgccattatctcacctaattcctagggcaatcttgaaagaaaggaatttcccatgttactaatgaaaaaaccgagactcagaaaggctaattgtctatggtcatgagctagtcggtgatggaatgaacccagcacatctgactccaaagtctttcctctgttcattgtcttatttatttatgtaatgattctcttctgcctcattccaaaacgccttccagagatacagactttagaagctacagacccatgaggaccctggcaaacagaaacaaagagtaggactagctaaagtcaaggcaaagattgctgtacaaactgcttgctgtggagttgtagggaaaggtggaatatttagaactaagcatccagatgttaagagcaaaaatggaaacaccatccattgtaaagttcacccagtcaccgggataaaaacaattcagttgcctctaagcatgtttcctggtacttgcttcggttatactgtgctatatccaccttaagagggattgagagagtttaactaaaactcaaagatgatttagttccatttccttatttttagaggagcaaatttacacccacaagaataaagtgactgaagtgacagatctgactgttttttatttatttgtttatttattttattttattattattatactttaagttttagggtacatgtgcacaatgtgcaggttagttacatatgtatacatgtgccgtgctggtgtgctgcacccattaactcgtcatttagcataaggtatatctcctaatgctatccctcccccctccccccaccccacaactgactgacgttccaatgggaagagccggcaccgggaccttagtcttcagggctctctccagtgtgctgatcaaaccttaagaatcgggtctgggatgaaactgtgtacacaccggaaggcttccctgttacctcaatggactgtcacttttttgtgcagcccgagaagtttgtttcagtcgatgtcttctccagggagagtagatttgctcctggaaactaaatctgtttctaaaccttttccccagggtttagacacttaggtaataatacaatttatagtgagtcaacctccaaaataaaaggaattctttaagggaaataaagacttttccaaaaacttagttaacagtaggaaaaggggctgggtgcggtggctcacgcctgtaatcccagcactttaggaggacaaggctggcggatcacgaggtcaggagatcgagaccatcctggctatcacggtgaaactgtctctactaaaaatagaaaaaattagccaggcgtggtggcggacgcctgtagtcccagctacttgggaggctgaggcaggagaatggcgtgtacctgggaggcggagcttccagtgagccaagatcgtgccactgcactccagtctgggagacaaagcgagactctgtctcaaaaaaaaaaaaaaaaaaaaggaaagaaaaaccagtaggaaaaggataatatgggctcaggaaaacaaatctagatttgcctattagtaaatcagaaaaaataaaaattggggccgggtgcagtggctcatacctgtaatcccagcactttgggaggctgagatgggcgtatcacctgaggtcaggagttcgagcctggccaaaatagcaaaaccccatctctactgaaaatacagaaattagccaggtgtgttggtgcatgcttgtaatcccagctactcaggaggctgaggcaggagaatcacttgaaccaaggaggcagaggttgcagtgagccaagatcgcaccattgcactccagcctgggcaacaaagcaagactctgtcacacacacacacacacacaaaaaaaaaaaaaaatgggaagactgaaatggcagtgatagagatctctataatttaatttatccttgatgggaaaacattacagtatctcagacaattaggaagtaaaaatgtcttcatgacaatagttattgatccaaccatggacaacaacccatttgaaaatacacaaataagtacacacaagtggcaggaatcttagaaaattaagagaattggtaggtagatattaaaccaatgtaattatgagacactaaactagtagggagaaagtcaatgtgtaaagattctattgctttcctaataatgaatttattatttggaacatttagctacaaacctaagaaaaataatgacggaaactgaaatatgtactatacatacataaatatccatctagagagtaagttttatgtagaataactcagagaaaacaaattactaaagggcttattttgggaggcgtccagaatccatggatttaaatgagttgaattaatccaatattatatttaccattgtatgacatgagttttctctttcagaactgaggcatatttttggactggctatagcctaaatttttctaagtttactcatggaaaatatgagtctatgagagcttgaatgttcaagaaggggaaaatgcagtaacatgtcgactgcacttcatattctgacaagtgaaataggaatgagattggattatatatcataaaaatgattatcctgcctgaaatcagctccaaaaaaattaacttaaatttattatgaggatatcaacattaatataaaacctggcttaggttttaaggtaaaaataattatccatggttgagtgatagcattaagtatttaacaacaacaaaaaaaactgaagcaagattgaaaacatcgtggaatcacattctaccttgatttgttttgaggacttggactggccagttttccaatctgtatgatgcagagattggcctagaatgattcctaagttttctttcttgtccaaagttacagtgtgttataactttattatactcatggtaattataatattgattcatttaacaattgtggtatttgaattataatcctaacacatggtacataaaatcacatatgagttaaatcttaatcacatgaattctacctcacatcactgaggtagaagggacaatatttaatagacagctgcaataaatatttttgtgaagaattcttttgtcataaatcaaaatcatagaccttagttctgaaaaagaaaaattatatcaaataatggtaaatacaatattggatcaaaaatttttttgtctttttacgttacaaaatttatgttacttatagcaagtatatttattctctaatatgagattttttaaatgtagagttcacttaaagtaagacaaactaatattcttaattttattatgatgtagattcttgatacatgcataaacatgagaaatgtcatacatttattaaaccacagtgtgcttggaacacactagacattgggatgaagacatttaaaggaagattcctgtcttcactagacttacaatctagttgaggaaaccagactgctgtatacaaactgacattaatcataattttaacttggttcaaaattatttatatttatagttactagcgtgaaatccatcaccctaagtctatcaattacgtggattaaaatctcaatatatcttttgatacattaaataagatttgacttttctgcggcatcagatctttgggttagtcactattgctggctttaaaagaaattccttggcttcaggtagttcctggaaatttttctaagcattatggaacaggttgtcctagacagaagtagcatggcctgaagccaacaataattacaatcaggtcttctgatctttctccctgccccccaacccccaccaccttcttaaacagctgtgaagggaagtgcttaatggtatccaaaacaaagaggatgggtaaatggcacattagtgatgtattcagatagtaggagttgaattgaattgccaatgccgaaggatagaaaaatattgaactatacgtaacctacatgtagacataatggcagtaagggcaagaaagctaaattcaccttaggaagggaaaaagagatttaatacatctggaggaaaataattagagggccagataatcaattgcagagcgccgccaggaaacatcgtgttgaaagaggccggggtgattacaaacgagtctcaatgtcatgaggcaacaaaaaggccagagcaactggaggccaacagtgctgcaccctgacacccaaggcccccatcagccttggaatgagtgtgatgggtgagcgcacatctggaatactgagtacatttcttacgctccgttaacacagagacaccaaaaacctggagggagttctgaagcaaataacaaggactattaaaagacttgaaggaatagtttataagggaaggattaagtcaaaggggaatgccatggcaatgggtagaaaacagtacaaaatatcctacaaagtaaaacaatgaggaaagggcaggaatgacttggggagaggaaacaaaaaaaccccaacaatgaagtaacttaaagtgcagaaaaaaaaattaaaactaattaagcagaaaaatgtaagccaaatggaggagtttgttgccacaaaataagtagtagtggggaagaaaatatgtaacctccgaagagatattttcaagtgcacaagtgcagaactctagtgcgagatttccttacactgcaggatggaaaatcatttacaaaagacagggccaaaagaatactgctaatggtgatgctaataacaatattagttgtaggagcacttaacaagccgttgttttgtgccaggcactgttttcagcgctttacatatgtgttgatgcatttaatcctcaaaacaatcctgccaccattattattatcaccatagtggctttgcagaaggggagttgggggagggagaagtgaagtaacttgcatgtagatggataccctagcaagtagcagagccagaatttgaacccaagcaggctggctctagggtttatattctcaatcactatgctttttgccttcttggaaaaaaaaaaaaaaaaaggaaagaaaagtgggataaacccgtagggatgaggaggaggccaaggaaagcacggggcttgaggctgttaagtgcaagctttttggaaacaatcgcttttgaacgttagtggggtgtggccttggtctgctgcctgtggctccaagtcatactgcattttgttggaaaaggaaaatcatcttgtggttctatgtgaaaaggtcagttcgtctctaagacaggaattcctcattaaaagaattccaactacacgtagtcagcacagaaggaaatcctgagtcacctgatgtgagaccctttgacactttgccctacactgatcaacgtgctcagtgcccctggcagaatgcttaagcagcgggcacttggctgactgtagacctaattggttcactcattcacagagccaacaaataaacattcattcaacaaacaaacattgccatgtttctcagactggagtctagattcttttaaaaataatataataagaaataacaattttagaaactctaaagctctattctatgaaaatgttttgaaggccaaatcagctttaaaaaatatgatgatttgattgggcgcagcgcctcatgcctgtaatcccagcactttgggaggcctaggcagatggatcgatcacctgaggtcaggagttcgagaccaacctgaccaatatggtgaaaccccatctctatttaaaaaaaaaaaaaaaaaattagccaggtgtggtggcgtgtgcctgtagtcccagctacttgggagtctgagacaggagaatcgcttgaacccaagaggcagaggttgcagtgagccgagatcacaccactgtactctagcctgggcaacagggtaagactccatctcaaaaaaataaaaaagataattcaagcaaaatcacaaaatttttaaagtctagacctcgtaaagtccccagaatacattggattcatgaacccaaattcaagaaacaaaaaggatggagccctgaactgtgtgcaaggatggagagtgcctcagagataaggcagaggcaatgtttgccctcaaaaagcttacagtctagcaggtgttcagcttctatatgaacatgactataccacaatggagaaagggaagatgacattacaaccacaaagacagtgttgtggaattaagacagagactgtgagtgaaatggcatctgctctggccttgatatataaagaggcaaataaagagaattgcacaagcaaaaatagagaggtgggaaccagagagcaaatagaggaaacattagctggagagagggacgattaacagagaaataggagatggggttggaaagggaaggattttgtccaaactcaaagtaggcctctgagggcaagctagcagagtacacttgattctgcaggcaatgagggtaatctgagattgcgagaagagggtgaagtaaccagagcaggtccttgggaagattaaccagtggcaatcgaagtggaaagaccctccatcctggctgggaaagtcagtgagaccatgagcatctgtgaggggtggcaagttaccagggatggcaggagggatttgagcactatttccaaggcagacctgataggaggtggcaactgcccagcaaggggagcgcaggagcaggcgaaagcagagggggctctggagggccaagcatggttcatggagggtgattatgccattcagaggaatggagtaaggctgaaagggaaaactggtaattccattttaggcaatggcattaggaagcaagtaaaacattcagatggaggaattctacaggtacaggtgctccttgacttacgatggggtgacatcccaataaacccatcataagttgaaaataaggtaagtcaaaaatgcatttaatatactgaacctaccgaacaccagagcttagcttagcccagtctaacttaaatgtgctcagaacacttatattagcctacagttgggcaaaatcatcgaacacaaagccaataggcttgtaataaagtactgaataactcataggattgattgagtactgcactgaatgcataccaattttacaccactgtaaatgtgaaaatcttcaattgaaccatcgtaggtcagggaccatctgtagtcgtatatcaaagataaaagcaagctaaatacctatcccatagagacatcaaaattatgtacatcattaagtttaaaattcagaatgtgtgttttaagaccaatgtcaataaagtgctgcaattctagaattcgtttctattatcccaagccagtcttccaggaactacttttttaccatggatataagcgagggcacctataaaatctgtttaatgaagccaggcattggctttgacatggaaggcgtctggcaacagctttataacatcagaaaaactaaaacttgcctacatatgtatatgcatgcataggggtgtgtgtgtgtgtgtgtacacacacatatatacatacacgcacacatgcttatacctatacagacatatataaaataaagttttctctagccctttctacttgaagggaaagctatgtgtgtggctggagtgactaaacatttaggtttacccagaatcatgcttgtttatacctgcttttctgtaattacagcaattacaaataacatcctcttgctctctcaaaagtattccagtatatttatgactaccattctgctaggttgtaatgtctttttcacttcaagaatgaacccatattgttcctggaatcccagcttcttctttgcttcccgtacccctctcctgtcatcatcttttgcagaagaccaaatttctagtcaccctctcagagagaccgagtcagccctgtggcacagtggtctttcttggaagtgacatgccaaagttataaatgtgaaggccttccagtggcttttttagtgaactgtggtgtctttgtgacacatacacttctactatactataattgtatgaaaattagtaatctatgtagtaactctatgttgacagaatttttattatcgataatagatgtatacattcataaaatacacataacataaacacccattacatactatacatgtgatataaaccctgaccatatcccataaaaatggagtttaccatggttccctggtttggaaaatttgtactctctggatatgtaaaaacgaaaataagcttttcaatagtgtttttataattcacaattctcaaatagtaagttagaaaacttatcacaaagactgaactttcagttctccaacacctgcccggtggttgcattccaaatctcacgctacttctctgattgttccatcaacttaacaaaagagcatagcctgattttactccagtaggaccataagaaatgaatgcacccagagtgctgtgatcattatgatggtttcattgagctgtaatccatgtacttggatactacttctatttattttttaaaaatgtgtttgtgtcactttgccaaaggattggagtattacactaatgtcattttggcattcactattacctagggcaacttttgttttaccgtctctttttcaagtcataattttatacttatccatttatttatgattaatcattttacgtgaaaaaaataattcttttttcccactgcagccttttttggaaaatacctcaatgaatataatggcagctacatcccccctgggtggcgagaatggcttggattaatcaagaattctcgcttctataattacactgtttgtcgcaatggcatcaaagaaaagcatggatttgattatgcaaaggtaattttcaggcacttttacactgcatcaatttactttgtgcataatggggaaaagccattttcagtgagttaaactatccacaagattggctttctatgttctcacaatgttagcatgagaaatgttaaggtaattttaaactctaggcaaggaaaagactctcaaggaacgctgcctttgtgtagtgatttccctcattaggatgaaaggcaatcaggctttgatgaaagtatcatcaagaaaatcagaattctctgctctcttatgataatttttgtcctcccagttcccccggacccaaccaaggacttgtccacataatcaaatgttcatcttgtactgttttacttttcactgggacaaaagtatattttgtctgtggcttcagatttaggcacaagcataagagcaaataaatatgataattaaagtttgaaaaaccacattccttgcttttactcctgtctgaccaagcttagtatacgtgacaaggacaccttccctatcacggcaagcatccacaaaagtctctaatgctatcaattctaggattttcaaatcagttcagagaaactgaaatcaacatgtcccatagttctttgaccagtgggttctagttttgacttaaaaattcacaaagattttgtgatagctgacttaagtttaaatttttttcaaatcataagaatgaaggggaaaatatcttcgaatttagcatgcttatttgccaaaatatccccttcccttccagccatacccatctcttcttcatttatctagaagaagccgagaatctgctctatctagcaacctctcccaacaggctagatcacttggtagaaatcggaaggagagaacttgatttaatgttggcatattgctgtctttatgcttggcctgatttgagcacaagggacttgatgggagataagattaagtccagctcctttatacccttcagaaaacaatgaatgcaaatgaattcataaacattgctaataggcttccaaactcatgaaagttaaaagttagcagagaccttggaggcaaatttgagcaatgtcctcatttgcaaagatgagaaaaaagcattctagagtggctcaaccactcatcctaggtcatatccccagctgtggatacaatcattgcaagcaaatggtgcagaccacgtgcactaattgtcactgctctcctttgctgtctgtagggatgctttttcatgctccttgttcaagttattaacctttctttccctgctgtcctaaagagagcaaagtaatcaagattctctccaaatactaaatcagcgtaacttgttcattatcacagctgattaagtgtcaaagacaactgtgtctgaaaagaatatatatctttttttagtgaggaaaagaatgaaacagacactcccttggaagaggaaggggatagcctgtagacttgccctaacaatgacatgcggcacacaccatccctctgatactgcttttgcagctgttctggtccttaaatccacaacatgtgattagccatgcctggaagccttcaacatttgcaaatattgcctaaacactttctgaataaagtttatactggagctccaagccaatgacacacacttaaaagaagcaggtggtttaagttttcatcttttctttccttttcattccatttcctccctccctcttacagacctgcatcagccccccctgactgtgggttaagtcattttattagcaagtcaggctctaatcccagcagctgtattgctttagttgtgcaattaacacagtataatctgcaggaaatcaactgctccctattcaagtgtttcaagtaaattaactgatcaaatgttgcagcttttccctgtgctcctggattttggccatggctttgattactgattattgtaattcccacaggtggatttttcgtttgaagaaaatatcttttcttgtgtttatgtattcatgggcgtgtgtgtgtgagcgtgtgtgtatgtatgtgtgtgtgttctgcaactgtaaatttgaagtgggcgtgggtgtttcctgcccttaaagtaattaaattttttgccaaggaattacatcaatgaaacctgagactgaaatatgtatccggtgtttcatgtgttctagtacttttatcgccagattaatcattatcttgggcaaacacgacttgactttttttttccccattgctaagttgtgtattacttaaaatccatttttcgtatgttaccaagctagcaaccctagaaaacaactggcagctgattttctctattatcgaaaatgttcggctgccttgggaggtgcagccttccttcctgctgtagaccttgccacttcgtgcagtgaattgcttctgaggaaagcagttattcaaatgcgatctgatgaatgtcaccttttgtaatttttgttttgtgtcaaatgtatgtttcaggactacttcacagacttaatcactaacgagagcattaattacttcaaaatgtctaagagaatgtatccccataggcccgttatgatggtgatcagccacgctgcgccccacggccccgaggactcagccccacagttttctaaactgtaccccaatgcttcccaacacatgtaagtaacaaactcaactctgcgacctgccgaacatgcctttcccttttctcctcatcccactcctctcctttaccccgtttccttccaccctgcgtatccacaaggctttcttcatgaaaggataacttaagagcagaccacggaacaggcagagccgctgagcctgaaagaaagcgccttatctgggtggtttgaggaggaatcaaatttccagcatttacaagtagctaaatagaaaggaagagatgcacatagagtgaatgggggcaagttttacaagagtttcctttcgttgtcttaaataatattcgtgtgtctgatctaataatgatgatgatcaaatagtatgcttttcatagctgcacagtggggacctctggtctggttatagaaacatggatttattttccaggcgaataccgtagcagctttgctgcagacgtgcaattagaattcctgcagaaggcagcttgagtggcttgcccaagagggcttctcaggtcacagctttaaaataacctgatttttttttttttaaagaggcaggagtcttggagatggggggtgggaaggcacaagggagagggctgatggcgtggagggatgagacagaacaaagagctgtcgtgtgcccacaattctcaccagccaaaggtggaaaaatctagatgctttggcagcaaagaacatgattttgttgttcactcagttgacaccatttcttcctaagctttgccatcaatatccagtcttccacacagagcagtggagttggctctgtgtctgctgaaagcctgaccattagggagacagggaacagaaaattggtatctgtttcctatattgtgaaacctccaaaattggttcttaatctatttgtacttaaatatcatctcttttcatccacactggttattagccaagattccaggcagaaagaaccttacgaaaataggtaagtaactatgcaggctctctagttgccggtcactatacatccctagagaagtttttataaaatgttctcttttttttgagacagagtcttgctctgtaacccaggctggagtgcagtggtgcaatcttggctcactgcaacctccgcctcctgggttcaaacaattctcccacctcaggcttctgaggagctgggactacaggcacacgccaccacacctggctaattttttgtatttttagtagagacgcagttccaccatgttggccaggctggtctcaaactcccctgacctcaagtgatccacccacctcggcctcccaaagtgctgggattacaggcatgagccaccgcacccagccttataaaatatttttatttgtaccttaatgtaactgattgacttatgactcctggtcagtggtacacagatcatctctatgatatcatgtgacttagaccagaaagaaggaggccagagctgactcaggacaagaactaacaatatgaagccagggtgggttacctactgagcatgcccaggaactcagaggatggaagtgttttaatgcataaaatatcatcgacaaatcatgaaggttgccccagcacctgggaatatagctgggataagccattatgttttggagtcaactccatgggtggatatttaagcttctgaagatcttcccctatatacaactctgcgagtaaattcatgaatgaagcccatgtgtgacaagtggctctccattatagctcacttacaaatttagtagccaactgattcaatgaaaggaaaaagtcctgcgggctttttcaatacccctgaacccccctgttcccatttctgttgaatcagaaatcactttacctatctttgttgcattagcagaaacccagtctaaggtgacttcctataactgtaaactttacagatgttccctcaagctggaggagaaggggttgacaaaacagagtgttttgtggctccttaaaagtcagcctgcctttgaagctttgaggcaaggtcctaagcctgcaggaaaatcagcctcaggtcaagagtttataagagctcagttgcatggaatcagtactgcatgaggggaggagcctgcagagttctcagggtctcagcaatagctttttgaaaaacatctctgtgctggccaggcgcggtggctcacgcctgtaatctcagcactttgggaggccgaggcgggcggatcacgaggtcaagagatcaagaccatcttggctaacactgtgaaacactgtctctactaaaaatacaaaaaaaaaataaaaattagccaggcgtggtggtgggcacctgtagtcctagctactcgggaggctgaggcaggagaatggcatgaacccgggaggcggagcttgcagtgagccgagatcgcaccactgcactccagcctcggcgacagagcaagactctgtcttaaaaaaaaaaacaaagaaaagaaaagaaaaacatctctgattccagtaattaaaaattctatttcattccacgaatatttatcagtgccacatgtgacactatgcagcccagcagggatatagataagcgtgaggaagacacagttgctaacatttaaggacagataaactaaggcaggggttggcacactggtacccacagtccaaacctagcttgccaccagtttttgttaacaaaattttattgacacacagccatgctcattcatttatgtattgtctgtggctgctttcacaatacaacagccaagtcgagtagttgtgtcagataccatacagcctggaaatactatctcatcctcgataaagtaactttgccccaacctctgctctaggggcaggatgggcaagtgtcccaatggcaatatcaccaatagggccagaagtgacaagcacagagcagacgttcgcagggctgtggagcggggagggagaagccttcatatctttgaaggaaaccaggaaaacttcatggaccaaggcttcaaagtgggcctcaaaagatgggtaaaatttctgcagataattgtttagagattgggtttcaggaagagaatatggcaaggacacgtggtcactgtataagggaggcaatctaagatgtgtcctagaaactggagaatgggctacaaagaaagcagcactaaggaacaatgctgcagagggaaactgttgcagaatattgagggtgtcagtgagtttgtatgtaactgcaagcagagagtcactggaggttgggtagtaacaaaataggaggtggctcagacatttccacatgcaaatagattcagtagttcctttttagttcaaatgaaccttctattgcccttattagtgattctataaagtaaaatctacacagtgcagagggtggccttagaggctaacgagcctggtttcctgcctcagctgccctcactgagtgtaggggtgctttctttaatctctggaaacctccactgtctcatctgtaaaatggagataatactaacaccttgatgtgatgtcatgaagagaaattaagagaggcagtgtaagtaaagtccccacatagagcctgggacatacaagccacttcataagtgtcaattcttattgaacctttttattaagaaactaacaatattctatcattctggacctacaaaagggcaatttcatgtggctcaacttaaggtttaggggaagcagtgagagaaatgacaacttgatgcttgtccattgtgacatgacagacctcttgacaagctaagactcccattgtgatgagcctctcacacctggccattccaatggaacagacagggtaaggaccaatctggactgtgttatcttttccaggtgcaagtatgtgctatgggtaagtgccagtttggagaactcccttagccacaggaaatgaaaattcatgtgattgtttgaaggattcagcttctctttgctgctaatccttgggttttgtgcacctagaatgtggtctcctgcaggccctgaaagccttgaattcctggcatctttgctgtgaaggtctccctggctgctgctggaggaaggggctggaaggagtgagtgtgtgcacaggttcagagttcagtcttcagacaaaaggagtgagataaattgaagacaagctgccgatggtagtgcatggaactgctcaatgaccagcttccttagcgaaaacattagcaacacattcaggcaaagggatgcgagaagttaagtactttgcagaaatatttgacaggccctgcaaacactgagcaagaaaccataggttctccccaattgcagggatgcaagtaacgtgaacactttcctttcggtcatcttccttggtggtcaggcatcatctggatcactttcatctggcatcgggttataactacctgaccctctcagactggggtgaatgtatcatctttccaaggtgtttgccgttcccaacaaagagaggaagccagttcgctattggcctgttagctttacaaacggatggtagagcttatgcttaccaaggaagagtgaaaggggattatcgaccacttgttgacagggaaaatagtttaatcaaactgtaactcagctactcatggccactgagaaatctgagaaagcctctgtcataataacacacataataatcctagtattagaaagccctgcgctctggctaagactctactatacttttcagtaacttatttccccagaatctccatagggatgcaattccttcacccctgctttaagttacttctctctcctcgcctcagtgatgtcatcatatacacctgtggacaaaagccgtgacagggaaggagatgccatttacgtccctggtgattctataggaaactaagggacctccttatcacccttctatgaactatgcccctgtcagctttaaaaatttgttgttgttattccaatttttttttttttgagatggagtttcactcttgttgcccaggctggagtgcaatggcacaatctcggctcaccacaacctctgcctcccaggttcaaaccattctcctgcctcagcctcctgagtagctggaattacaggcatgcgccaccacgctcggctaattttgtatttttagtggaaacgggttttctccatgttgttcaggctggtcttgaactcctgacctcaggtgatccgcccgcctcaggctcccaaagtgctgggattacaggcatgagccagcacacctgacctgttattccaatttaacagttctttcttcccatacctgtaaatgtgtgtgactgtgtgtgtgtgcatgtacactcacacacacacaaatacacaagttcaagtgaaatctaaatgcttggtaaaacagtccatgtgcactaatttgcaagagttgttgtgagggtagagcttttgaataaacataggttgtcaaaggaaaaactccctctgtgtaagccacaggacaaaggttttgaaacacctttgttatctaaagctggaaagaaatgtcttgccttaaaagaatttgcacattcgtacctctttccacaaatacgtgaaaggacgtgcttttgaagataagaaaagtttaaattctacaaaaaaaaaaaatctgatttgggcagaactcattgctcccttttctctgtttctaccttgttcttctctgggtggatcatttactacttatactgtcagtgttggtgttgcttgtttacttagatccctgaagtcgagttgcacaactccagggggcattcagataaaatatcatgtgaatgatgccctggagttttgcaggtagctttgtcctgaagacagggacaaaaatgtttcatctctttacctcccagtgcctggtggacatgccttcggaccaagtagttgcacaattcattgttgcttagcaaatgaacaaatatgttcacctcactaaatagctgacatgaaaacattttaaaaatagtatcaagatatttaaacagtcgattttatgaatttaaaagacacctagagatactacaattccgtagttttttagattaaaaaacaaagacccaaagtctatattttttaaaggaaggcccagatggttttgtgaaggtcatgtgagtatttagggacaaaactagagctgaaactcaattctcttggccccaggtgatcttctcactccaccagacttactcagttcacatcacagtcacaattcagattagagctatgaacaattctatccatttgcacaattctaactggtgtttctaacttcattaaaagactctgaattatttttcttatatacctctaatcaagatcatttggtattatcctgcatatgttcaaatgttacctatctacagatatttgaacttaggtggggaatatctccacaaagtccattaagtaagttcagttttagtgaaaactgagatggtgcagcttgagagattaagtgtagaatttccaatgtaatgctttgaatgtgtaccttaaatctgtatcactggcttattctgggaattgaagtcttatttcatttctcagagaatgatggttctgctaccagtaatctttaagggttagatcattcgggttttttgtttgtttgagactaaataaatgaagaaaacacatgttagatacaaaacactagaaatatattaattttcactggagcgacaccaaaggccatcgacattaaaaatgaactcctaagttctttgcaattccccaggtatagatttaatatacaacacatgcatctcttgaaactctttctttgctagtaagaattattctcctgaaatacccacctgtcaaaaagaaaggtaacattattgatttttagaattcttatttctgtcgtgtcagtaagcaataccggaaagaaaatcaaacactcaggagaattggcatgatggtgaaggttgagcttacaagtacagtggactcaagtatccatgatccagcgcactgagcaataaatccaaatgagcagtgaccacaggaaaacaatatgcagggaggcctcgctgggaaaagctaaacttttatatatgggaatagtctatggaggattacagggatgttttcttgggggtataaggtctggagtgtgcagtactgggtgaagcccttatctaacaggcaacagaaaggtcttcccaggttaggcacacgtgactctacctccaacacagaatttttttttttaagaaagcaacagaaatttgcaaatgatagtctggtcttttgtcctctcaattttaaagcaaataaccagtattgtgttatctaccttttcatggatgcatccagtgtgcctagaagggccagactttattctgtatttgcaacaaaagtagacccagcaactgatgggaagatatctgattgggaagcagaagcagctggtattttaaatcaggatgaaagctaagattttaggactcacttttgataggaagaaaggatatatcaattttccttttaatgagtgggatttttgaggtactttgtggggcctctggttcaagactgtggccagtgtggtgttgtaggaggggcactgatggagagctatcccggtgcattatttctgagccacctctgtgcactttacttcctcatttgtaacatgggactaatgtgccctgctgagtcctcagagttgctgcaacaatcaaatgagctattaagggataagctcttttccagctacctatgagaatgggtatgatatggtcccagaatttgctctctagagccacagaaatctcttaacccctacaagaactctttaaagttgttatccccattatatagatgaggaaactgagacttagacaaaaagttgtccaagatcacataatattaaggaacagagctgggatgaatatttgagtctaattccaaaacattctggaataactcaatatgtggttttccatttctcccaaaaacaggtacctgcttttttcagtggcttgtgttccagctgacagctccagggcctgtttgaataattcgaagacaatccttagttaggaaagcaagctttaattatcactggggaacagaaggccgcatcttcgaggaatttggcagacctcagcagggggcaaccacaggcctttggcaaaagatcacttttcaacaacattgtcaattccagtgacccccgaccttccacctgcaggtccctgaacagctgctgttctgtgggaagcagtggcagtctgtcttcctttaaaaggcacatgcacactctgtccctgctgcctgctgagatcccacctgggacctcatccccagagctgggggtcatctcccatatcaagaaattaagaaaaataagggggggcaggaaaggacagctttgacaacagtccctgaactttcccttttaatataagccagatttaacgtatgtcattctgtaaatccgggagtccaatttgaggcttgtaatttgctgcaagcttccctgttcctccaagtggggtggagctatgccaagcacatcaaggtaactggtggaagatataatttccccactgtgagcctgcatttcagttccctattgtaatttttatttgtgttgaggttttgtggttttaaaaaagtcaaccagatttatttttaaattaacccagcccaacatcaaaggcaataagtagaggatgtttaggtattataaagaaaccctgtgtaatctgttatagctgtattctttctcagggcatgtaatggtaaatggttaggggcctttcacaaccaactttctatatttctctgacctcggactaccctcatgggcaaaaaaccctttttgaggggatttagtagcccctctctcctcctcctcaacctcttaatctaatcctgtttgtaacgcaacatgctgcatgaagaatacgaaacatgggcttaagtccctccccacttcccttatgactgtggtttacttttagatatgaagaactctttcaggccaaaaaaaaaaaaagggggggaccatttggttaacgaaccattttctttggtaggcaggagaaagtttatattgaaagtttatcttaaggatgacaggtcatacctgaagggtttgttttggaatactgtggattttttctaacccaaataattacaagagagttccttgtttattggctcatggaggaaattcaagcgcctctgttctaggcattttaagtgctctgtatatatggtggttgttcctcaaaacagctttgggtttgttttttgttttttgttgttagtggtggttttttgagatagagtctcgctctgttacccaggctggagtgcagtggcgcaatctcggctcactgcaccctccacctctctggttcaaaagattctcctgcctcagcctcctgagtagctgggattacaggcgcccgccaccatgcccagctaatttttgtatttttagtagagacggggtttccccatgttggccaggctggtctcgaactcctgacctcaggtgattcacccgcctgggccttccaaaatgctgggattacaggcgtgagccaccatggctggcccaaaacagctttttaagaaaagtgctattaaccccatttacagatgagcacatttgagccacaccctcttttccacactctaaatcttgtctctttctttaaacatgagttacttatacttctgagcataactgaggcacttttagagacagtgtcttctaagctcaatgtgatattatttgtgctgctgtgctgctactgggtaaccagcacccatcctggtcaccagggtaactttgtcaaccaagaaggccaaggatcccaaaccagcattttctactatcaaaagagaggttctgcaaatccactggcaggagagaaaatataatagcaggtggcatttatatgacccagtgtgcatggcagtgtcccagggtatcaccgtgaatctcagaaactccaggctttccccatgggaaatccacaccaccacagatccagtggaggactcggtcaagactcctgaaatcaaagaactcacagtgactgattctttccctagttttataatataaataatggcatggggtcacattcagccgtcattatccacatcatttcactgatgggatcctcctcagacagagattgggaatcagatttctcggtcacataaactgttgctcattctgtgaggctgcctatttgtaaagttgtggttcttattaaaagcaatctcagacgtagcaagcacccctcacttcccttctcattcattttgttaaagcaaatgggctttggaattcaggcctgtttctaccacttactaatgttgttaatttggaggagttcctcaactttgccaaggcttgattttctctgctgtaaagagggaataataaacctattttacagagcagctgagacaattaggtgagttaatgtatataaaatggtttgcataatacccaacacatattaaactctcactcggtttttaatattaacctctatgtgcttaataacattgaagaagaagattcaagtagattatagtctgttaaagagttcaaatataaataaataattctcagggtgagaattgccatagcatagatatgttacgtacccatggcagagcgtgaggtggcagcatctaatggttgagggagttgggtgagacatcaagagaaggtgacatatttttttgagtacccagtggaaggcatgggataccatgtggatctctgcagtagattaaatatagacttgaactaacctatcctggaacaataggacaatatccttgtggcttacagaaattattccctgcacctatattgatttgtttattaaacgaatagctttattggtaaacatgtatattgcggaagtagacttggttatcattcccacaagtccagttaaagtaatggcatctatataaaaaactcataaaaactagatatgtaagtaatcaataaaatactcttctcaagtattcaggagaaaaaatgtgttgaaatgatgattcatcattccacataacgtatttgtgactacatttaatagcctcattagcaataaaatttttatgagttaacatcatatgaggatattcccttgtaccttaccgagactttatctgtagatttgtaacataaccataatcatcttggtatgtttcttacacattttattcagtgaacccaaatgaacttctaattacatgttcagctgccagtcatggttttatatgtttgaatatatataccttcagaggatatttgctctttggggtggtgaagacttcatcttcttataaatgcaaacagaagatagttggaagaggaaaatgttttagcagtgtctcaattatctctccttaatgattatttcacaacctcgagatattttcctaaaagactaagtaagaaatatatagtaagattcctttctggatattttcagaactcctagttataactatgcaccaaatatggataaacactggattatgcagtacacaggaccaatgctgcccatccacatggaatttacaaacattctacagcgcaaaaggctccagactttgatgtcagtggatgattctgtggagagggtaagcacatgaacctacctcagtgatagtttttggcccagcttcctttgtgtagacttattcttgccaatcctgtttggttttttccccttcattttccagcatcattttgagagagaaagaaagagagagagtatgtgtttagtggcttaatcatccctcccttatcttgtcctcattccatctacctctccagggttggtttcttatggagccagtaaaaaagaggagagaaaaatcaaatcagcgtagatcaggggccacatcctcaaaggcaataaagaattgatggagcttgtgctgaacttgaactttaagttaagggccccatctaaaggaacagcaattactcagctccagctaaattttgccatgtagaaatgtggatcaagtatcagcaggtcttctgacttttttaaagaagccagaaacacaaaaaattttatttgaaattttctgaactttgaaacatagtataagccaaacaagacgtgcctcaggctggatttaactggatcaggctcagaagcagcctgtttttaacccttggtaattagatatgtgatgataattttaacaatggattttcaaagtacaacctataaagtttgatggtagaggttgttgtgcggggtgtttttgtttttgttctaccaaacaagcaaacaaaaagcctaaaagtagaatgtgctagattccaaaaagttacatttcacctttaccattggacctttccctcccagactgtaagcaaatagaaaatgtggataatgttattaaagcaactcttgccttttaaaaataacaggaaaaagatttgggggcaatcgtggcaacactattgagcatcatcttataccagcacaattgattctgacttgttcctttgctgtatttcagctgtataacatgctcgtggagacgggggagctggagaatacttacatcatttacaccgccgaccatggttaccatattgggcagtttggactggtcaaggggaaatccatgccatatgactttgatattcgtgtgcctttttttattcgtggtccaagtgtagaaccaggatcaatgtacgtatttctctgtttgcaacattcaactgtcgtacctcaagtgtgtctaagataattcaattaccagtctcagtatctggtttcctttcatccaaaacaaaaaaggatgtgtgtaggctggttaatttcgaagatgaaaaccttttcctccctgccacatcttaaattagctcaagtatactacttaaagagaaaggaaaaataagtgtatcaatgactaattctctcaaattgactggaatctatgtctttttggtctgtgtgcacagacaggatgtgatcttctgggatatcacccttctttgaatcagagatacgctgtcatttaaaaaaaaaacctgacaccatccttttagtgtttaacttttaaaaattattccgaaagaaatgtttttaaaagataaattttgaaaagctggcttttcttttaaaggaaaaagagctaaaggactaggctgctatttctgtcactgtaggcaggtcactgcttctctttgcatctctattttcccatcatgaaatggccttgcctattttcccatcataaaatggccttgtcaatcatctcaggatgttttgaataaaatgggattgcatccatgaaagaattatggaaagactaaaagaaaaagtggaagtagaatccagaagctggaatggcccttgaaaagcatctagcctggacccctgatgtaacagtgaagctaggcagacagcgtcagtgcccctctcagatccctgattctggaagtggtggcagtggggcccagagcccagatgttctgaatctcccccgagtaccacatgtgctgctgcatcatactacatcctggagagagggcaattgaagtaagaaaggtttctttgaagaatgttattgtgcttcctaagattattagaaacaccctgagaattgtcagatctatatctagaaggctttatgttttaaggactagatagcatagattgaattcaactgtaaaaactgtacatccttttttaaaatattgattttaaagctcttgttcaacggaaaagttatggactattgggttttaagcaaaagtatgcttgctgcaaaaaccatgtatcaggctgcatcttgcctggtgatgtggtcagaatacaggggtgcaggcatctctccagcctgaccctggcaagagtcagttaatcttgctcagtgccattgctgtgatcacacacccacccttgccacacaactacccatgcctaggagaccagatgagagggtgagaagagttgaaggccaatgagtcactgctgtagaaaaagcagccctaagtgccaccttcccctggcattggatctcagccatcaccgtgtgcccctttacagagtcccacagatcgttctcaacattgacttggcccccacgatcctggatattgctgggctcgacacacctcctgatgtggacggcaagtctgtcctcaaacttctggacccagaaaagccaggtaacaggtgtgtcattgttcctcctctcagccagccccaaatacactgagctccagctggtgcccagagccagccagcagctgaagacatggaggcagaatatgccttgcccacaaggatcaccccaagctgagcatttctcagctgcttgtgaatagcatattgatggagatgcactcatggtctgtgggaagtgagaggtgtttctttaaataagctgttagcacagatccatttggaaaaacgtccagatgccaaaagtaaatattatcattttgctttcaggtttcgaacaaacaagaaggccaaaatttggcgtgatacattcctagtggaaagagggtaattattggttcctggggtgcttctgggaaccagtcctagtgggcagctttccctgctgagtattttttttctccttatttttgtttactaagcatgcagatttcgtaaacctagtcacaagattgaatggtttgctgcttattctgtagtggtcaatagagtaataattgctggatcagaattgtaaagaataaccctcaagttggttaattggtacaaaaacacagttagatagaagttatagaatttgatagtatagttgggacattatcgttaacaataatttatgtatatcttaaaatagctagaagtgaagaattgcaaagttcccaacacaaggaaaagataaatgagatgatgaatatcccaattatcttgatttgatcattacacattgtagactggtatccatatatcacacgtacccccaaaatatgtataattgtgatatatcaatttttaaaataccaaaaaagcaagagaatgacgactccacatcccccaaaaagaataaattctcataagcttggaccaaagcctttatcatgggtgtagatttactgttgcatttctcagtgctggtttctaatcagaccagtggattgagtttctctaccatcctccccacgttcttctctaagctgcctccaagcctcacccggcacccttcttcctacttcctacttcttttccttgtgtgcctttcctagttttaaatagataaatgtatgccattgtaattatttccattgtcacttctgggtttccccttttggttcattaatacccattgccttgtttttctctgtacataaattaggagagagaaaatatttgtataatttttttaacaaaaggaactttgagcatgtaaaatgaaacatgtatgcccaaattttgaaattaatgcttttgggaagaacgaatcttttcctgacctctcatcttcatcctacccagtttgtcattttcataaaggacccatcaaatgttgaactcctgtagacagagctttaacatctatttcttgctgtttaaagaatgtggagtcatgtgacagggtaaaaaaaaaaagggggcaggactcagggaccgtaattcagatcacttctcatgtacgaagcttttccctttttgtcgaagcaaatttctacgtaagaaggaagaatccagcaagaatatccaacagtcaaatcacttgcccaaatatgaacgggtcaaagaactatgccagcaggccaggtaccagacagcctgtgaacaaccggggcaggtgagtgacgcaggctttctttaccaccactcatgtgcttctccatctctaatttagaaaattgtccacatataaaagaatgtacatttgtgtataaataagcttttcctagtggccttgagggcaagctcactgagacacctctccgcggacagaattacgtaactggttcaggctgggcctccccattactacttgggctccctccagttaaaaaagatgatgatctcagagaaagttctatgccaaaagacactggtttcctctgaggagaagattcctgttatagtccctgttaactagtcactgaagagttgccaaaaggctacttagtcaaagcacaggtacgtgctgagcctcttggcagtgaaccaccccaagagacatgatagggccttcaccctaggctaaagtcagaatgtcatcttacccccagtagaggacagagcctgtgaccaagcttgaggaatgagaagagaaaccatattctgtttgtttattgttcctacttctgctcacaaagattctggcatcaaatatttcattagaatagatcctcttcgttagtagaaatattactatagaccccagagctacccagaataccagttattatcagtaagaataaaagaaatactgtgtgatgaattaacattgcttttaaagaaagtgagtacgtatgaatttaaaccagtttaaaaccattgattttaaatgcccttgattgaaatgtatgctagctaaaagaaaatgctgtgtcatgacaagaggaactgaactttggcccaaatcattgcagctgagaacaaaatcagaggaaagtgaaaaatactaacacatagtgagcatttgtcttacatcaggcacagtacgcaggattttgtagcatttactcaatttaatcctcacaactgtagagtgaggtgggcattggcatctccattttacaaatgggcagctgggattcaaacaggagttgtctgattcaataactcaggccacttgctgccttccaaggtaagttacaataaccaggtgaagagaagttcaaatctgtgagtcttttttaacttaactgacctctagatatccacacaattcaccaacaccagttcaagatgtcaggctcatggaatgagtaggtaacaaagttattattaaaatggcctcactcattatacgcttattatatggtatctagcttgttgaatagacattcctaataaacaacttgatccttataccctgcatttcctcatgctttcttgtacacaggatccctttgaaatagaagaggatagggagggagagctgttgaaggaagggctaaaactaagccttcactacattctagtacatcttaattttcaagtgtttagtggagaaaagctgagacctattcattatattttaatttgaagtcttcaaatctttcttatgaaacctccaaatattattatgaataaaacctcagaattgttttgtagctctaagatgatttttatgagctagcctcaatagactaatttacttttattcaggagttgcaaatgttcagtgttaaatatatctcatgcaaattggtgatcttgttactcttttagctctaagaggtgaacattatagccttttgggaataaggtacactgcctacatttcagtgtgtaattttacaaacctctccatatggcttgccctaaaattttaatatatgtcctaaagggcaaatgtagcataaaccagattatggtactttggcacaagcttttcactcacgagctgaatgctaactaagttacaaacttaattttgctttttcatattttttgaacttgttttggccccatgaaatgctttcatatctggaattttcttccactgtttcatttcgctgtgaatcagtctgaatttagatccattatgtggatatatgagaacgtcagcaatggtctcttttagaaaggcctgaattcgtggaacaaagaattaggctatgccctgatggtgatttctttctatagaatttctttatattgggcctgagtgagctttagaagtgaagacctggagagtatttcagattgtctctagcttcagtgtatccacagcactagtgaattgttactctaatcccgaaccagcaggatcagcatccctgagagtttgtcagaaatgcaaattctctggctattgcagaccttctgaatcagaacccctaggggtgaagcccagcaatctgtgtgttaacaagtcctccaggtgactctgatgctccctaaagtttgagaagcactattctaacccacgattgtgtttactggtggccctcaaaccatagcttaggaatctaagaacttcaagaaaattttgagccttaatctttaaagcagttattgaatctgtgggtcaaacctgatagctgtgttgtgtgttgttgttttgttttctttgggacagggttttactctgtcacccaggctggagtgcagtggcgtgatcatggcccactgcagcctcgccctcctgggctcaggttatcctcctacctcagcctcctgagtagctaggactacaggcacacaccaccatgctcgactaatttttgtgcttttttagagatggggttttgccatgttgcccaggctgatctggaactccaggactcaagtgatccacccaccttgacctcccaaagtgctgggattacaggagcgagcctccatgcccaggcagctctgttgtgttctatcgactttttatatcttggccttttgctctttctttctggctactttgaagattatctgtttttggcgacagtatccctgactttaaaaaaggaagaagaaaattcagaataatgacactgaattgttcaggttcgaggtggcagcggaggctagaactgacctgcttggaatctgctctctctcgatgtccctcctgacatgcgccctgcttccgttcctcttaacaaggtgaatggccttcattccaaggcaacacagtcaggttttgacactccatggggaacaaagggaaaatcagcatgactagccccattctcttcactcttaatcccagagatagtgaatgcccccctcctaccacatctttgtgccaggtcacctaaaggttgtttggtggagtcaatgtgggtgcatgaggtaagtcaacagagaaaagagatccaaaggttggggttagaatattggccgccaccactttctagttgtgtcttctcaaataggtcacttactttctcctgagtctcaggttttctatctctaaaatagagaaaattaacctcacccttgtgaggattaagtgatattatacatgtaatgtactaaagtgagactgagattttctctagtgtgcgaatattgggtgttattattattccaagccatcttacctgctgttttcattcctatgaagccaattagaattaaaatgggctgaggccgggcacggtggctgatgcctataatcccaacactttgggagcccgaggcgggcagatcatctgaggtcaggagtttcagaccagcctggccgacatagtcatagtgaaaccccatctctactaaaaatacaaaattagccaggcgtggtggtgggcacctgtaattccagctacttgggaggctgagaccggggaatcacttgaacccaggaggcagaggttgcagtgagtcaagattttaccattgcactccagcctgggcaaaaagggcgaaactccatctcaaaataaataaataaatataaaaagaataaaaatgggctggaatcccagagacttggcatcacttcttgactatgtgaacacaacaaccagcggggactaattaagacaacatggacatatgtgtttgcattacttccacgttcctgaattaatatgagatggagtgtgaattcccaccactctctcagctgggcgttacacccccggacacgtttatgtacagacactccccatccccctacaccatcacacacatgcacatgtgcatactgaggggcaaatctcgacctctttcttaaagcatgtttgttccacagagaacaaagagcagtgatgctcaatgctggcggcacattaaactcacctggggccgagcacggcagcttatggcttactcccataatcccagcactttgggaggctgaggcaggagttctaaatcccctaagcccaggagttctagaccagtctaggcaacctagggagacgccgtctccacgcacaaacaaaatagccaggcgtggtggtgtgtgcctgcagtaccagctactcaggaggctgaggtgagggaatcgcttgagcctaggaagtcgaggctgcagtgagccgtgatcgtgccactgcaccccagcctgggcgactgagtgagaccctgtctcagaaaaacaaaactaaaataacagaaaataaaaaataaactcacctgggtggcacttgaaaaatgctgatgcaccccccagaccaaccaggttaaaaatgtctggaagtgaggccaaggaatctgtattttttaacgaggttaagaatcacaggcctagaaccagagaatatcaaagtttgaaggaatcttagaaatcttctaagttgaatggtatcatttttctgataaggaaatttaggtccagaaaagttaagctacaaacccaaagccaaaacctgcatctcttcacttcacgttgagtactttcttccctgtaacatgctgccactgcaaaattgcaagacagattttccctttgaaactatgaatggcaatcaccactcacggtggttctcaaccctgactgcacgttagaatcatatgggcagctttagagatgcttatgtttaagtcccagcccaggcaagttaaatcagaacctctgggtatgagacccaggtaccagtgttttttccaagctcccctgatgattcctacgtgcagacaagcttgagatccacaaatgtcaagtgagcattaatgggttggtttttcttcttcttctaggcataggtattgacgtcttaaataggagctacataaaagagaaattccctgggcatccaattttgaaatacactttacatattatctggcatttaagtggaaaaaagcagcctgctttgttttgatagggcaaatatcacatccttttgatgagttgttgaattccagcatctttacaatttagtttgcctttctactattggatcaatataaaatcaaacatttgtttaaaaatctgtgaggacccctgcatcaagcaagctgatgctattataacggaaatagaatgtagtttgttgagtggaaactggtttagctccaggatggatctttgttcctatacaaaacttatctctctggccgtatatccttctgaccctttgtgaccagcagcagagcatgaataataagacatttaccatggagatcctcctagaattgttagttttccagaagcagacaaacctgtttcccaaaactcactgaactctggtcaaaatggcagcatggctcatagacatcttcccctggctaacctgattccagagggcacatccagaaggattgagctcccagtgccatccttttactgaattctcctctgtgcatgggtccattgtggaccactcagcctttaaaccttgcttccttccctcttcaacccatgctgaagctcatgtatgaacagttgttcatctaattaaatctttgacttctgtgcatttgttctaaacaagtcaaaaaaagacaaacatgagaataggcattttactcataaactgtataatacagccccattctgcttaatttgtactgtgtcttcttttccaccatttcctaacagcccatcctaatcaggtcctcctctatgtttcttaaatgttacatgtgaatcccactttctcacttgcatggaggttgttacttctctcttctcacctaaggctcaggtcctcctctatgtttcttaaatgttacatgtgaatcccactttctcacttgcatggatgttgttacttctctcttctcacctaaggctcacctgaagactcatactgccttcgtaccattctccttttcatcagtatcctgatcaaggtgctttgggattacatcctggatatactgctttcttggcatttgcctatgtgcaagtttcttaacctaactctgcctcagtttcttcatctgtaaaatgggcatcatatagttcttgcctcataggctgtggtaaatgttatatgaattaaatgtatcaagcatctgggacaatgtctaggacatagaaagcactcaacaaatgctggttgtcaatcattggccaagatcagtttaccaatttcattttctaggaattacaataatcatacatcttccaacattccagtgttgacttttacaagggattatctagattaaaatctataacaggtaacatttctctctcttctgcttctccttttctgttttccgtccccctctctttcccatcttacaccatctcaaagaaaacaggccaggagataaatcctcctggcacaagtaacactaattcatatttgtgagagaaaatttgacaatgacttgagctaagtagcagtttggacaaagatgtgaatatggtctttgtatattccccagtgttaagataaatattttaaacacatgtccacatgcaggtaacttttttatgatgttcatgttggcatgaataataatcagtttatcacaaaattactatacagttgtgacatttcagagaacatgatttgacctgcattatggccaaatccatgtcataagacatatggtaaccaagaactagtgtgtgtttatgtataaaattaagctttcactgcagtgcacctttgaaaaagttgtacacaatttttttaatttttctttttatttcaatagttttcgggatacaagtggtttttggttacatagataaattctttagttagatttctgagattttagtgcacccatcacccaagcagtgtatactatacccagtttgtagtcttttatccctcacctgcttcccaaccttcccctccaagtccccaaagtttattatatcattcttatgcctttgcgtcctcatagcttagctcccacttgtaagtgagaaaataaaatatttggttttccattcctgagttacttcacttagaatagtggtctccagctccatccaagttgctgcaaaatacacattattttgttcctttttatgcctgagtagtgttccatggtgtatatataccacattttctttatgcacttgttggttgatgggcatttaggctgggttccatatttttgtaattgctaattgtgctgctataaacatgcctatgcatgtgtccttttcatataatgacttcttttcttttgggtagatacccagtagtaggattgctggatcgaatggcggttccattcttagttctttaaggaaactccatactgttttctgtaatggttgcactaatttacattctcaccagcagtgcaaaagtgttcctttttgccacattcacgccaacatctattgttttgttttgactttttattatagccatgcttgcaggaataaggtggtatctcattgtggttttaatttgcatttccttgatgagtagtgatgttgagtattttttcatgcttgttggctgtttgtgtatcttcttttgagaattgtctattcatttctttaccctacattttgatagaattattggcttttttcttgctgatttggttgagttcctttgtagattctggatattagtcctttgttggatgcatagtttgcaaatattttctcccactctgtgggttgtctgtttactctgctgattatttcttttgctgcgcagaaggtttttagtttaattaggtctcattcatttatgtttgggtttttttatatttgcttttggggtcttagttatgagttctttgcctaagccaatgtctagaagagtttttccaatgttatcttctcaaatttttatagttttgggtcttagatttaagtctttgatccatcttgagttgatttttgtgtaacgtgagagataggaatccagtttcattcttctacatgtggcttgccagttttcccagcaccatttattgaatagggtgtccttaccccaatttatgtttttgttaactttgtccaagatcagttggtggtaagtatttggctttatttctgggttctctattctgttccattctatgtgcctgtttttatgccagtaccatgctgttttggtaattacaggcttgtagtataattagaagtcaggtaatgtgatgcctacagatttggttttttttttttttttgcttaatattgttttggtgtagccaatttttgggttttttttttttgtttcttactcatgaaaatggacacaagtaggcataagtaagaacagagaacaacatccttaaccaatctgagaaatatttgcaattcaaaatgcagaaattataatgattacttagtggatacttcaggaaggaaaagcaaccagaggtcatctaatattgcactaagtattttacatggaaaactgttctatgagatacatattatgcccattttagatatgaagagactgaaactcagatgggaaaataacttgaccaaagtcacacagctagaagaatgacaaacctgagttcaaaccaagatctgggtgactcaaagcttctgtctctctcactaaataataattattttgtacagtttaccaccagaaaacattagcttgcccaggattggataaactttttaaaggccaattatagtactgctctaggttcatatagtacatcttttccttagaacttcaaaacactcaaacaatctattctcatgactatccatgaagccaggaggagcaagtattattttatcggatgtggaatccagaagaacaaagagattctgcaatttgctcaaagccatagagttagcagcaaaaaaaaaaaaataataaaattaaggtctttgaatcccaacccaatactcatctccattaaaaatggctacctcttatcaaatacacattagatcacattctttaagtaataaaccatgtgtgggtgtatgtatgtaataataataataatagcagctgcttttgttgagtgcctgccatgtgctgagttcttaccgtgtgttatcgctaatgctcataactctgcaaaggctaatgtggcatagcttacttgctcagggccacatagccatgtgatagagctggtgttcaaatccaggctttttgagcttgcaaatccagactttttcctttaagccacaccgatgagtaaaaaacaccattccgagtccaagacagaatataggtaatattcactactacgaaatcctatttcagtaaatgacttgtgacagcactctgggttgtagtgaggattaaatgaaaaattcataaagagtgctctagagcagtacctgctatcaagcaagagttaaataaatgatcataatcatggtagtcaagatgatgatgaatgaaattgtttgaaatgcgtttgacatatttctcattagatttgattccaccaaactagctgcacactatttgtatcctcataccaaaattgccagccttctcttcttcatcaggtgttatttatatacaggcagatataatcaatcaaaaacactaacacataattacctaaccaagtgattctgtgctgagataacttctgggaatgactcaggaatatgagacatggcccttgcccttaattccaacttccaccatagttggaaaggctgaaagaaaattataacaacttaagaaattatttaaatagttttatctagcacctcacccataattgctgtgcagaaatatttgtggaatgactgtgtgctaaattattggcacagactgataaatcagacagaaggagaacggaaataatgtagttgcagaaaacaggaaaacaatttgcagaaggaatgaaccatcagtgaagatggagacaatcggatttggcaattaactgatttactgataaacttcaagagcatagataatagaaagacagtgtgacagctgtgtttctgcaagggcacttgttgaacaaagctcatttctgaggctgactccacacatcccattagcaggtgcctcacctgagctcaggctttcatctgattcctgaaactctcctgcaatgcaaaaaacatcccttctcattattttgactatttaaatggcttgcttcatgagtttcagagcaattcttttaaaaattctctttatctgcttccctctataaactctctaagatcaccactttagttgtagctatttcaaggttttattgtgcagtcataaaaattgtcatgatatcgagttctaaaatggctgtggcaatgtgtgataattacatttcattaaaattcctagtatgcttgccagtaggaagattttcaaagcctctagttaattactttatctaacagggtctatgactttttcaaagggtccatggtagaaaaaataattgacatttttgttcatggctcttgcttcatccaagtatgtgtgtagatatatgtatatatgtagtatgtatggataatatgtttgtatgcatgtgtgtagacatatatgcatatatgtatgtatatttgatttcgtatgatacatcatcatagccaaggacagtgccagacatccagtgtggttaaattcaactcttcagaaaggaaacaccttttcccttcatctctatcccataggaaaccaacaaagaatttggctaatgggaaattcaactaggattccaaatagcctaagtcactaaaacttctgcctacacctttgtgttctacaggaatctacttgtaccctcagctcctccagggcaaaaacaaacaaaataggcagaattctttgaatgcattgtgattataaaaaccacaggttttcactatagtcatgtgctttaaaaattagtatttgtactaaagttgatataaattggatccacaaaaagactttagaccattatttttcaagaatatatatatacacacacatatatatgtgtgtatatataatgtgtatatatatacacacatatatgtgtgtgtatatataatgtgtatatatatacacacatatatgtgtgtgtatatatacatatatatgtgtatataaatatatatacacatatatatgtgtgtgtatatatatatatatatatatttttttgagacggagtcttgctctgtcacccaggctggagtgcagtggctcaatctcgggtcactgcaacctctgcctctcaggttcaagccattctcctgcctcagcctcccaaatagctgggactataggcatgcgccgccacctggctaatttttgtttctttgttttttgtttgtttgtttttggaaacagaatcttgctctgtcacccagcccggaatgcagtggcatgatctcagctcacggcaacctccgcctcccaggttcaagtgattctcctgcctcagcctcccaagtagctgggactataggcgtgtgccaccatgcccagctaatttttgtatttttagtagagacggggtttcaccatgttgtccaggctggtcttgaactcctgtcctcaggcaattcacctgcctcagcctcccaaagtgctgaaattacaggcttgagctactgtgcccggccgttttttttttttttttttttctgtatttttagtagagagagggttttgccacactggccaggctggtcttgaacccctgacctcagacaatccagcctccttggcctcccaaagtgctgggattacaggcgtgagccaccacacccggcctcaagaataaaattagccatattttcctgtctgatagaagatggagcacctcttacgcttccacttggctgtggattgtgaattcactagccgattattttgcttctctaggcattaagcagtcaactcttcatttttaaatgctagaggcagagatcatccaggtagatggataagccttaaaccatttggatttaagacagatatacatacagacagacactcaaatgctactgattcccaaactttgcaaagttacgaaaagttatttattttggcaacactttccccagcaataattctatatagcatatagttatatgttaatggagttgtctgtcagtttctgagcccaggctgtagtgcagtagcatgatggcatgatctcagctcactgcagccccgacctcctgggctcaagtgatcttcccacctcagcctccctccaagtagctgggaccacaggcatgtgccagcatgcttagatgtatataccacaggcatgtgccagcatgcttagctatatatatatatatatatatatatatatatatatatatatatatatatatatatatatatgttttttttttttttggagagacagggtttcaccatgttgcccaggctgttcttgaactcctgggctcaagcaatccacctgccttggcctcctaaagtactgggattgtaggtgtgatccaccacacccagctctgagaacttttttgatcatttcttggcacatcctaaagctaattggatagccatgaatgctataattgggtctgtgagtgccacaaacccaggcctggaaaccactgatctccacattaaatggcagaatcatgaacaggccgcatgcagttttcagctaagtcaaaattctgtcacttatcaactaactgtggagacagcacaaggataactggtttcacttaaacaacgcacatagtcctgaaagcataggtgcactgatagtattcatccatccaactggagtcattttctgacctgcttacatcagtacatttctagacacagcttcctttgcacatgccgcccccaccaattacacgcatccctctcaaagacccatgcatctgagctacttagacttaaatatatccctcctgccttccccatggaatccagctgcaaaactgtccagtaagcagttgctaatgtaaagcagtggcctgaactccaactgcacattagaatcatctggggagcttctgaaagtccctctgtccagccaaatttgagaaccactcatctgacctaacttcctgtgtttaattaagttgacttcacagtttttaagttaaatcatctctaacttagtccttaggctgttcttgtttgtgttgcctttttgtggctttgtaagtaaaatccaccctctctatccgtgggttctacatctgtgggttcaaccaactgcagattgaaagaattgaaaaagaaaagatgatttcgtctgtattgaacctgcataaactttttttcctgtgattattccctgaacaatacagaataactactaattacatagcatttacattgtattagatattacaagtaatgtagagataaagtatacaagagtatgtatgtaggctaaatggaaatactacattttatatcagagacttgagcatttgtggattcgggtatctgcagggcatcctggacccaattctcagtggatgctgagggatgactcgttagtcgcctgtctgtcccttgagctcctgcttctctggatgaagatgctaaacgttcaagacatcctagccaatccacaaaaaaaggttgtaccctgatatggcttgaaacaaccaaattcagtagtaccaagagtatagggggctaaagcaaaatcatagaagaagtcctgtatctctaggatttggggattatatagtagaagccaaaaagcagctctgataattcaacatacattgaagacatacaactcccttaagagaaagcaaaccatggctctgcatcttggttcatcatgaataattgcatatcattttgtacacgagtgtcagttatcagcaaagccatctgggacctttggccaaactttactttgcagtaggacactttgcaaccaagatatcaccccaaatatgtactggtataagagggaggtatgagatccttttaaatgatgcatggaagaacatcttttatttaataattatttatttatttgaatatatttgaaaatatacgtggcacaaaaaaccataattttacagtgcagatagtattgttctgtccacagtttagaaatgcacccatttaaagaagagtttctcactctttaactagatatgaacaaaaacaataaaggataaagaaaagtttcagtagataatggtacacaactgatagacctatatggaaaggaaaaaagacaaaagtgtgataacactatattttaactctgtgacaactgtggccaacttaaaattaaatattcttcctgcctccccaattaattttgtagggagaagggggaaaataaaatgtaaaagaagttattcagtctttaagtaagatgtggaggatcccaggaaatgacccccagggtgaagagctattatttcagccaggttgagattcagtaagtgcaaggacacttagtccagaggcaatgtcatatttacttggatgtaagcctgcagcatctgtggcaggcatgttagaaggctcagtctagaaaagtcagtgcaagctccccgtatgtgtctgttgggaagtgaactctgtctcacatagcagcatgcccactctctgccgagtatgcagttgaaactgcagagttccctgatccccttcacaggatgtgcaacaggggtgtggcatgcctgcttggtcaccaccactgctcaaacccctgatgagagggggagcacgcagataggcaggtacaggaaccagggcgagtcttttgggctccagccctgcggtagtatctaggggcgggtgccgacggccccagtgttacaatgctcttttagccttgccgtctgcagacagcttgttaaccagttcaatggaccctctgccttttgacaagggtagagggccaatatgacagctttccgtattccaagctcttgcctagctcttggaagaatcaggtcacacacgggcttgaaggatgaatgcagggttttactgagtgttggaggtggctctcagtgggacggatggggagccagaagcagggatggagtgggaagatgatcttccccagtttggccgctggatggccacactcctctctgacccctagccaagctcctctcagtgttcagacgttcctcttctgtctttctctgccaccttgttccaccattcgtcagcttgtctcctcatctccttgtctgcttccggagcctgagtttcagggtttatatgggcacaggataggtggcatggcaggccaaaaacaacttttggggtgcaaaaacaggaatccctgtccccatttagggctgtagattcccgggcttgagggtgaggcctttgccaggaaactaccttcttctacccagggtttccctgtcttctgtccatatcacaatgttcttagaaggataagaaaagacacaaaagaaagcctgacaagtttgctaatgtctggggtatatgagagttggctcgccccatgatgggctccaattaaattcatctctgtcttcctcatgtgccattcttccctggctcacattagaaattcaggagcggagaacaaagcagccaagtttgtttttccagagcaagaggggtctggtgaaagcagtcctgacagctgcaccgtgtgtcttggtgaactaacggcttttacgtgtttcattcaagactgtttagtctgcgtgctaaggattcatatatcagtttttggctctagtgacattgaggtagtttgatttccaatgatttcgttgtcatctgtatttgcctacagtgaaagaaataactgagagtcgagttagtgcagggtcacttaaaagcttgcctttcttcattcactctccttaatgatattgccagtgcttctaaaaaaaagaaaaaagaaaaaaactaaggcagcagctcttaataaataacacctggagcagaatcggtaaactgctttcacgttggcttttgcagaagtggcaatgcattgaggatacatctggcaagcttcgaattcacaagtgtaaaggacccagtgacctgctcacagtccggcagagcacgcggaacctctacgctcgcggcttccatgacaaagacaaagagtgcagttgtagggagtctggttaccgtgccagcagaagccaaagaaagagtcaacggcaattcttgagaaaccaggggactccaagtaagccacgcttttgtgaccatctcaatggtggcctaggcctgtgggaataaacaatagagagacgaaagggttgctccttctacattttagatattatcaatgcatcattttcaggctaaaagcacatcattgctctatttaaaataagaaagctaagactaatgtgacattttgctttgtaaacattttcacttaagcatagaatgaaaatatagttcataaaagcaccagatgcaaaacatatgcacacataaaagagtttataaaatggttattccaaaaggtaaaggatatggtttaagtccattttattttatcgtaatgccaacatctcctgacttgtctgcctgaagttgcttttaaaaaatagtaaatacaaggtttcagtgtgtatgcatttaattttaagaggaaaagcataaacacttttttaaggcatatattttaatctctgttttaggacaatatatgtatgttttaattctgtcaaatcattggatctcgttgattggcagggacaaactagttgcattcagtatgaaaaatacttcctagaattttcttaatagctataagaaacctacgattatataaatgtgaaaatccacgggctgacaccctccacgaaagaatgaatctagtaccacctagtggagtaacatggaaaatgactcaattttatggtgatttctttctatactggtttggaaagaagcaatttaagtaaattaaattctatgtcaaagatttggaaatcaaatcatacactagaacaatggaagccctgagaacaggcatttttattgtagactccacaatatgggcttcagggccatgccctgatatttcatccaaaattgttgtgttttccatgtgtatatggacatttgtttccatgtcaacaatttttaacaaattttaaaggaatccgtaagccaaaatactaagaatctttgatttgggagactttttttcttccctaacagaaaaattccaggtctaataactcacacaaagatatcaaatttctgaaaatcaataaggccaggcgcggtgactcacatctgtaatcccatcactttgggaggctgaggcaggcagatcatttgaggtcaggggttccagaccagcctgaccaaactggtgaaacgccatctctactaaaattacaaaaaaaattagctgggcatggtggcacacgcctgtaatgccagctacttctcggaaagctgaggcaggagaattgcttgaacctgagatgcagaggtggcagtgagccgagatcgcaccactgcactccagcctggatgacagagcaagactccgtctcaaaaaaaaaaaaaattaataagggacgaggaccccagcatgctcttttttcagaagctgattagcaacattcagtttagaagtaggagtgccctcttctcttccagaaagttcgaccttgtttcccaggcactgggcataaggcacattgatttttcagtattaggcacaaacacaagtctagggcagctctctcaaactgtatggaatcttgtgtatttgagagcaggagtcggttttcaccctttctgcaaggatggaactcgtaagcactcttattgacacccctactgtcacggaggttgctccctgatctggaaactgcaggattcagctgagaggtgtctcagaagcatgacaattctgattccacagccagtatgccccacttctttctatgttagcagcaggctagagcgataaggccagacgaatatgcctctacagagctaagagcatctagtgtttgtgcattaaagttcttatctggtacacatgagttcttgaaaaggttccatagtcaccagaaagcatgctgccctctccccatccctgcccgcccaccccttgccttaaccctcctctgccaggtataaaagtgagttggctgatgaaagcattaacaaaatttaattcttcttagagtaatcctctactatttgtacaaatagaagttgtctagagcatttgcctctttgaaaaagcagcccaatgtagtggtaagacttcatagtctcagaagattatagtcctagctccataaccttgcaaaatgtatgtgacattcaaaacttcagttttctcgtccataaaataaggatgaaccggtattgacaatctgatgtttttgtatgtaagggtttttataataatacctgtctttcaagactccagattagagataaatatgaagtatataatacatagcaaaagctcaataaaggatagtcattattattaacaccataattgggaatatggttttatccaaaaaaatagcctgagcagttcacattgaaaaccaaatgtagaagttcacagcctgccatgaataaaaaggatcctagaaatcacctggactaaccccctcacttgacggatgaagggctggaggcccagagaagtgtgtcatccatcacactgccaggcaatggcactgccaggcaatggcactgccaggcaatggcactgccaggacaacctctgctaccgtgaattgcaggcaccacgatgccactcagcaatgcagcatggactgctttctccactccaggatcccttctggaccaggtgatcactttcttcccttgtaagctacatcaggacatccatagtaatgtatcttcccttacttctagagtacaagcccagatttgtccatactcggcagacacgttccttgtccgtcgaatttgaaggtgaaatatatgacataaatctggaagaagaagaagaattgcaagtgttgcaaccaagaaacattgctaagcgtcatgatgaaggccacaaggggccaagagatctccaggcttccagtggtggcaacaggggcaggatgctggcagatagcagcaacgccgtgggcccacctaccactgtccgagtgacacacaagtaagaaagctttatttgttcactagggttgagttcagaattaccaccacaacacaccatattatcaccattttgcacttggcaaaaaagcagtatcacttggcaatacagtgcctgagggctggcctatgtagcaactgggggttaaagaaacaatgagtccacgcaatcataggcttggacacatgctttgggtttgatttcacattaagactgatcagctaggaatccagccagagtaattcacattaaggctgatcagctaggaatccagccggagtaattccgtcacatcttgacttagcaggcatggagttcatgagcctaagcagttaccttcgcaggcatctagaaaacagatggaaacaatttcagaggctggaagttcttccatgttacacaatcactgtcacttggagcagttgtgtagtcacagactcagaaacgaaacacagtccaagggaggacagtgagtcccagagacgcttccagagagatgatgtaggttacaaatggatgtaagacatacaaacatctaaccagtcccggatcacagagagggccctggaagtcaaggggacagggaaggcagatgattccctcataagtttaatgaactcactttgttctttggctccatccaaagtctacttactctcttgattaggaaatgttttctttctgaatttattagcaagatctttgttttctctccctaattgtatcactttgaggagatgggacactgtgtgctctgccaggatttttatctctgaggctctggtctcctggtgcctgaagttgatgcagttatatactaaggggtttagaccagaatgcatttctcttacattattaaccccacatcccacctactgtctatccctggggctgtttgtttacttcaaaactcagtggggtacttaaggcactctctttttaacaaaatgagtggaatgaattccccttctgaatctgcttttcttcaaacaagccatttgcattatgatgtgaaaggtcccttttgttctatgtctatttgaacttgagttttttggtggtatcctgttcatgagggtgtgagcattgaaaactgccttgaaaagtggttgtagggatgatcttagtcacagagctgtgacaccatccacccatgtgacattttgtcctcactggtggctagaacctattgtgtccagaattggtgggttcttggtctcactgacttcaagaatgaggctgcggaccctcgtggtgagtgttacagctcttaaggtggcgcatctggagtctgtcccttctgatgttcagatgtgttcggagtttcttccttctggtgggttcgtggtctcgctggctcagcagtgaagctgcagaccttcgcgtgagtgttacagctcttaaggcagcgcgtctggagttgttcgttcctcccagtgggctcgtggtctcgctgggctcaggagtgaagctacagatcttcgcggtgagtgttacagctcataaaagcggcgtggacccaaagagtgagcagtagcaagatttattgcaaagagcgaaagaacggagcttccacagtgtggaaggggacccaggcagattgccactgctggctccggcagcctgcttttattctcttatctggccccacccacatcctgctgattggtagagcggagtggcctgttttgacagggtgctgattggtgcatttacaatccctgagctagatacaaaggttctccacttccccatcagattagttagttacagagttttgacacacaggttctccaaggccccaccagagcagctagatacagagtgtcgattggtgcattcgcaaaccttgagctaaacacagggtgctgattggtgtgtttacaaaccttgagctagatacagtgtcaaatggtgtattcacaatccctgagctagacataaaggttctccaaggccccaccagagcagctagatacagtgtcgattggtgcagtcacaaaccttgaactaaacacagggtgctgattggtgtgtttacaatccctgagctagacataaaggttctccgaggccccaccagagcagctacatacagagtgtcaattggtgcactcacaaaccttgagctaaacacaggatgctgattggtgtgtttacaatccctgagctagacataaagactccacgtccccaccagactcaggagcccagctggcttcacttagtggatcccgcacaggggctgcaggtggagccgtctgccagtcccgcgccatgcgctcgcactcctcagcccttgggtggtcgatgggactgggagccatagagcagggggtggtgctcgtcggggaggctcgggctgcacaggagcccatggagtgggtgggaggctcaggcatggcgggctgcagtcccgaggcctgccctgcgggaaggcagctaaggcccggtgagaaatcgagcgcagcgccggtgggctggtactgctggtacctccgcagccgctggcccgggtgctaagcccctcactgcccggggccgcaagggccggccggcctctgcgagtgtggggccagccaagcccacgcccatccggaactccagctggcccgcaagcaccgcaggcagccccggttcccattcgcgcctctccctccacacctccctgcaagctgagggagccggcactggccttggccagctcagaaaggggctcccacagtgcagcagcgggccgaagggctcctcaagtgccgccaaagtgggagcctacgcagaggaggcgcggagagcgagcgagggctgtgaggactgccagcacgctgtcacgactgccagcacgctgtcacctctcaatattcccattgatgctggtcttggatcagctcaacggttactgcatgtatcaacattaaggattttgaggattaaaatttctctttgttatctttagtgttttctgctattagaatataaacctatttcacatggttttggtttgttttgcaggtgttttattcttcccaatgactctatccattgtgagagagaactgtaccaatcggccagagcgtggaaggaccataaggcatacattgacaaagaggttagccatggctatgtgactgtcagatatattccaaactcaaactcggcctgccagccctgctgtgtctggtgggacataccacagatacacatcatctataattatgtgaaaaaatacaaaaaaaaaaagttatttgtctttctccagtgatttaatgatagtcctactgaaaacaatatagagtatgagaagagactgggaactgactcaatggtcttttgaaatctctgtgagaaaatgattcagttataaaagaggaatctgctaatgtttatctataacacatgggttggaatatagagtctatatagacatattctatgcccagtttgtttctatgttaagtatcatctcagatgaatagctgttattacagaacagagaaaacaaggtgaaaagaaaagtactttgtaaagaaaatcctgatcttaatacgtaagtgcttgaaaacatgttttccagattgaagctctgcaagataaaattaagaatttaagagaagtgagaggacatctgaagagaaggaagcctgaggaatgtagctgcagtaaacaaaggtgagcttgtttccatccatgctccactttccaaattcatttccgcacaagccagaggcattagcactgggctcatttttctctcttacctatagaatgtattgtcatagagtacgataacctaagctatttaagtaaaactaaatatgcttaaacttaagcagaaagtaaaaagtcacattcagctaaaatacttacaacatcactgccttccttctttctattttgctttctttttataaaatgaacactttgatccaatgcaaggctatgaagtctcactttttaatcttctctcctgcagctattacaataaagagaaaggtgtaaaaaagcaagagaaattaaagagccatcttcacccattcaagtaagtaactctctgttttccacatttgctgggagtcaatgactgtccacctggcccttcgaagaggctggagggacccctgtgtttcctgcagtgccgcttcagaagaagtagatccatctaggagggcacctagctcatgaagttgaaagcaaagccccacctcaccaagggaccgtggcaatgctcttggcatcctttgttggggaggcttgctgaactccactgtcattctgtgggtgctccctacctggcagatgggaccagtaactagattttactccatgcactgctttctgtggagagtgcttgagggttacagactctctcgatgcagttggtgttctacagagcagcctggaatagtgctgaattctgaaagtgggaagaaatataaatttttttaaataatagcaaaatttgcatgtgaaggagatttagtatttaaacttcaacaaagtttaagccttttatatataaaaaacaaaataataaaaaataattctaaaaaataaaggctatctaaacttgtttagtagaatttgtcaaagaattttttaaactttttaatccaagccatctgattcaactaacctttaactcgatggctgattggtactcggctgccaaaaaaatgagccatttgtccaaagagtgtggctagcaggatcctgtcattcacattaacatttatttccatcgatgtttccatgcacatgaggaggaaaatgttggtcctcttaggttcaataaggtcccaagaaagctgtcactgaatgcatttgcattcagtgttccttttttgttgttttttcgagacagagtctcactcttttgcccaggctttagtgcggtggtgcaatcttggctaactacaacctccacctcctgggttcaagagattcttgtgcctcatcctccctagtagctgggactacaggtgtgcgccaccacatccagctaatttttatatttttagcagagacagggtttcaccgtgttggccaaactgatctcaaactcgtgacctcaagtgatccgcccaccttagcctcccaaagtgctgggattacaggtgcaagtcactgtgcccagcctgccttcactattcctgattctattttaagtccctctatacaaaatgaaggtcgtccattatctcttatcaaggcatctaaatatttgtgcaagactcacagcaacaagcctatttgtaattgagaaagtgccttctgaacactcaaaataatcccttctcttggaacagggaggctgctcaggaagtagatagcaaactgcaacttttcaaggagaacaaccgtaggaggaagaaggagaggaaggagaagagacggcagaggaagggggaagagtgcagcctgcctggcctcacttgcttcacgcatgacaacaaccactggcagacagccccgttctggaaccgtaagttgcttgttccaaatgccacttcctgccgccatgcagagacagcgactcataacttagatcagaaattcagcataaaatgaggaatctacaaagattcaagagaaaggcatcatattctactctatactggaaactcaaatgattttgccatgtattactgttttctttaaattttttctggcattttgtttggtaatgccaagcttctccctggctttttcctcctgatgatgttgtttcacataatacccagcacctggcacagtttttacccagtagaactgttctatagctaaataacgcaagggatgaacatcccgtaaatggatgaacaattttgccccaaatagattttgtttctgctttatttcaagtacataagtgtaataaaaggaagaaaaagaatggtaaaagcctcttaaatgcagggcccatactctacttattctcagtccacttcagtaccagcactagacttgtagaataatagatactctacaaaattatttggttttacattgaactgctaaggatatggcataataacatttgtgcacttttaaaatagtgcttatattttctttagtggcctgtgcacattattcactgaggccatatagaagtaataccccacattcttatagtacatcctctgattgaagcttaccagcctatagagtagatgaaacacaaaatcttctaactgagaagctcactggagaccacccgggctactgtttctcaaactgggatttggagactccaaagaattgatagaccattcttggggggatctagggcttgtcctaggagactttatgttttccctttccattttgatgtctcttgatttcagggtccatgtttgcatttctgtttaaaatcacatcgaggccgaatgaactcttaaagtcacagcatttaacttttaatctagtttctgaaactgtggtgtgggaatccctgagggttattcagatcgctggggacagtaactggggacgcaacatctagcaagacactttattttctgtgctcatattttaatggggtacaggtagaaaaaaaagaaagtaaatgaaacaaaataattatgagttgtagtaatgctatgaaggaaacagtgatcaacattgttttttattattatactttaagttttagggtacatgtgcacaacgtgcaggtttgttacgtatgtatacatgtgccatgctggtgtgctgcacccattaactcgtcatttagtattaggtatatctcctaatgctatccctcccccctgcccccaccctgcaacagtccccggtgtgtgatgttcctcttcctgtgtcaacatttttaaatgggactctttcggagagcgtggggaagacgggtctttgaggtgaaatttaggctgaaacctaaaggatagagagaagcgatccctgtgggagggagcgtgttccaggcagagggaacagtgcaagcagaggtcctgagggagtctcacctttggtttatccaggagtggaagctccttgaaagctgaagcattgcaaaacacagggttatagttgcttatggcagaaggaggcccttcatacctctatctgctttttatcatctgagttgaggccatcctgctcaagccaccaccatttcttacctcggccactgccagacctcctctgtggcctcccaggctcccctctggtcctcaccagtccatcctgctcagaggagctagggtgatcttttaaggacacctgcttttcttaagctaaagagcagaatcccttcacctgaccccagaaggctgaggcttcagtgagctgtgatcgtgccctcacactccagcctgggcgatagagtgagacgctgtctcaaaaataaaataaaatatagcaaaatccttaacatatccaacaaaaccccatatgctcctatccaatcttacactgggaccattgcctcctgttcttgcctgcttcagccactcaacttctctttattccacaagcatctcaagctccctctcgccatggggcctttgcacttgtttcccctccctggaaggctcttgcccacagccccgtgcccagaaaacactactcacccttcagacctcaattgcggtgtcactgctcgtggacaccctctctgtgcctcagactagggtccgcccatttgatacgctctatcagcaagctctgtttttcccccatgggacgtatcacatttgtaatcatagtttttttgactactgtttttgcttaactgttgtcctttccactagactgtgagtttctcaagataaaaaaccatgtctctatgatactgtattcctgacccaaaggaattgcttagtcaattttaggtgaataaataaacaaacaagcaagccaccctgtccagatcaaatcaactcatgtcaatttaacaaagctttgagtgcctgccactgggtgtcactgtgctggtgagtgaggaacgtgcctgccatcactctgctcttgtacacaggagcgaattaggaactgatcccattcaataccaaatttgatgctccttctgatacacaatgtattcttggtgctctggtattctaggacagtggcttccagaattttttcccaaaaagccacagtaaaaaaatgcaccttatatcaggatcctgtacacatatgtgcacatacacaagtatatatgtgtatctgtgtgtatatgtaatatatatactaaagtaaaaatttcaaaaaagtaatactatgtgtgctatgcttaaatatttttatccattttctattacatattttaataatattattgctgtattcctcatatttgctatgtcaacttaagcccttggcacagtgagactcaataacatgaaaaaaagaagaagaaaagaaaagtcaaatccacccaggcacaagatcctccaatgcaatggtctctaaacatttttttattatgtacccatatcaatttttaaaataaacacaccgtctatatttcattacactaatatacaaacatgcctgtgtattatgaaaatatacaaaataaaaaggccaagaacagcaattcatgcctgtaaacccagcactttgggaggccaaggtcagaggatcagctgagcccaggagttcaagaccagcctgagcaacatggtgaaaccttgtctctacaaaaaaatacaaaaattagccgggcttggtggtgcccgcctgtagtcccagctactcgggaggctgaggtgggagaatcacttgagcatgggaggtgaaggctgcagtgagccatgattgtactccagcctgggtgacagagtgagaccgcatgtcagaagaaaaaaaaaaaagaaaagaaagaaaaagaaaatacacaaaatagaaatgtaaagtttgagataaacgtttaaaaaagagtttttaaaaatagttttcatattctttggaggtccaaaacattttgttctcacttattaaagaatgcttaaggaaaacaaatctcagtgtcccacttaacaatgcagtgagacattcagtttatgtttgatgtgtgatcttaattgctttcatatgaaacatgactcagaaagattttctggttccatagatgtgcttcacggcatgctgagtcaatcaggacattctttttttttttttttttgagatggagtttcgctcttgttgcccaggctggagtgcaatggtgcgttctcagctcactgcaacctccgcctcttgggttcaagtgattctcttgcctcagcctcccaagtagctgggattacaggcggccaccaccacgcctagctaatttttttgtatttttagtagagacagggtttccccatgttggccaggctgacctcacctgagatcacctgacctcaggtgatccacccgcctcggcctcccaaagtgctgggattacagatatgagccactgcacccggccaggacattcatttatttatttattttattatttttatttttattatattttaagttctgtggtgcatttgcagaacgtgcagttttgttacataggaatacacgtgccatggtggtttgctgcacccatcaacccgtcatctacgttaggtattttttaatgccaccattaactaggcagtcatctctattgaaattacacttttaaatgtctgtcctccctgagattgatcaattattcttgcaaatacaaaggtattgtatttgtatatttcatgaaacaagtttaaaacccatttaaacggttaatttggaagatttctacacagattagaaaatttgggttccgtggtttttaatgtatgtagatgtgagataaatgttcacatataaataatatgttataaataacataattagagatcttttaatgaaaagtcgtataatgatgaaagcattttcaatcatccatttttaagatattatcttttcttcacctgtatttgatctaatctggttcattcaattcaatttaggattttttccccacagctaccccttcatatcgtttcctataagctttaggtctttctttgaaataagcatatgtagtttgttatctgatttgttaatatcaaatctcaagtattaaggctttttaatgttttgatataatttagaagttctttagaatagatggttttcattaggtgacattcctagaattattgtcataagttattataaatgtggtaacatattttacttaaagggtgcacatctattacaaagactgtttgcgttaaataaaaggtcagaaaggatatgaaaagtttaagagcgtaaaagttggctgggcacagtgactcacacctgtaatcccagcactttgggaagccgaggcaggtggatcgcttgagcccaggagttcaagaccagcctgggcaacatggtgaaaccctatctctaccaaaaaaatatgaaaattatccgggcttgcctgtagtcccagctacttgggaggctgaggtgggagagtcacttgagccccagtggaggaggctgcagatcacaccactgggcgacagagtgagaccctgtctcaaagaaaaaaaaagagagagaggcggagagaataaaagttttaagttggagaacataatgtgtaaaaaaaaatttttttctttttgagatggagtttcactcttgacccccaggctggagtgcaatggtgcgatcttggctcactgcaacctccgcctcccgggttcaagtgattctcctgcctcagctgggattacaggcgcctgccaccatgcctggttaatttttgtatttttagtagagaaggggtttcgccatgttggccaggatggtctcaaactcctgaactcaggtgatccgcccactgcagcatctcaaagtgctgggattataggcgtgagccaccgcacctgaccgtgtaaaaatatttaaattagctaatcaactaaaaacaaaatcattcctggagggagagagggttgaataggcagaacacaggatttttagagcagtgaaactactctatgtgatacaacaatggcagataaatgtcatcatgcattgtccaaacccagaggatgtgcaacaccaagagtaaacacaaatgtaaactatgaactttgagtgacaatgatgtctcaatataggctcattgattgtaacaaatgtgccaccctggtgagggatgtctatggtgagagaggttatgtatctgtggggactggggttataaataagaatgctctgtacttttccctcaaaaccgctctaaaaaatagtctattaaaataattttttaaaatcatttctcattcattgtttaaaacatctcttttagcctaaggggacagatttagtgtgtctgatactacataggatagcagagtctagtaattaagagtaaactcttgcccgggtgtggtggctcacgcctgtaagcccaacactttgagagaccgaggcaggcagatcgcttgagtgtcggagttcgagaccagcctaggcaacatgccaagaccaatctctacaaaaaataaaatattagccgggtgtgatggtgcatacctgtagtcccagcaccacaggcggctgaactgacaggatcacttgagcctgggaggtcaaagctgcagtgagccttaatcatgccactgcactcgagcttgggcaacagagcaagaaactgtctcaaaaaaaaaaaaaagtaaactctgtagccagatcccagtgctaccagttgtcagccaggtgaccttggacaaattacttaacatctccttgcctcaggtttttccatctgttaacatgaggatgataataataacctctgtctcaagaggtagctttggggattaaatgagttaaagtacatagtgcacaaggaatgctcattacgtgtacctatcctattaggttggtgcaaaagcaattgcagtttcagaccgtgaattttaaatcattataactgggctcaaacacatctttctcaatcaaaataggaaccattacacccaacgcattttcgccacgagaaataagtttgtttattcctgtagcataaaaattcatgtttcagaccgggcgcggtggctcacacctgtaatcccaacactttgggaggccgagatgggcagatcacgaggtcaggagatcaagaccatcctggctaacacggtgaaaccccgtctctactaaaaatacaaaaaaattaactgggggtggtggcgggcgcctgtagtcccagctacttgggaggctgaggaaggagaacggtgtgaacccaggaggcggagcttgcagtgagccgagatcgctccactgcactccagcctgggcgacagagcgatactccatctcaagaaaaaaaaaaaaattgtgcttcaggattcaatgaactcttggaaagcattttctacgttctgctggttgtggaagtgttttccctacagaaagttgtcgagatgcttgaagaagtggtagtcgattggcgagaggtcaggtgaatacagcagatgaggcaaaacttcgtagcccaatttgttcaacttttgaagcgttggttgtgtgacattcagtcaggcactgtcgtggagaagaattgggccctttctgttgaccgatgccggctgcagacattgcagtttttgatgcatctcattgatttgccgaacatacttctcagatgtactggtttggccaggattcagaaagctgtagtggatcaaaccagcagcaggccaccaaagagtgaccgtgaccttttttggtgtgaatttggctttgggaagtgctttagagcttcttcttgttccagccactgagctgttcatcgcacgtcacaatctgattaagaaatggttcgttgttgttgcatagaataagagaagacaacacttcaaaacgacaatattttttattttcctctcagctcataaggcacccacttaccgagctttttcacctttctgatttgtttcaaatgccaaatgaccatagaagggtcgacgttgagttcttccacaaattctcatgtagctgtaagaggatcagcttcaatgattgctctcaaggtcattgtcaacttccaatggtccaccactacactcctcatcttcagggctttcatctcctttgcaaaacttgttgaaccaccactccactgtatgttcgttagcagttcctgggccaaatgctttgttaatgttgcgagttgtctccgctgctttacgatccattttgaactcaaataagaaaatcactcgaatttagtttttgtctaacaccatttccatagtctaaaataaacatgaagagcaagtaatacattattagcaaaaaaataaagcaagaaatgcccattaaaatgatgattaatataaccacatttattgaagaatgtattccaatatcaaacagcaaatttcaacaatgcaaaaaccgtaattacgtttgcaccaacctaatagttgtttctaaaaaaattttgctgggccaggcacagtggtgcatgcctgtagtcccagctacttgggaagctgaggatcacttgagcccaggagttctagtccagcctgggtaacatagagagaccccatctcttaaaaaatacttgttaggcagcacatttctgaaattcaagaaaggtcagcaaatttggaacatgtgcccttttgtaaacagaagagtagatgagttgattataaatgggacatctcttctgcatacattctacaagttaaccagagggctatgtggtataaaagatgtttgtggtcacagcctagctcaggctagagtgttgcagagaccatcccaaatcctccaggctgggctcaaggcttctctaaacccttctttgttgcaaaatcccatcttttcatgcttcattggtgacatgtggccatctgccacatagaacaagtgagagtactagttccatatctttattaaataaccatttttcttttgtacaaagaataaatagaaattctgatatttttcttctcatacttccgtcactcacccctctttggaaaccactgcataacagagctaaggggaggataaactaatgtgcctgaaattttactttagtcttcagcctataagagatcactatcttttttcccattttcacctagtttcacagcaaatttacctacggggggaaaggtattattattcttaacatgaaaccacaatatttataagaaagaaattgtgaactttaaagtgtaaagataagggaacactggaatggcaagcctgcctaaggtttttcactctttttgttttgttgtgtttttcttttttacccaacagtgggatctttctgtgcttgcacgagttctaacaataacacctactggtgtttgcgtacagttaatgagacgcataattttcttttctgtgagtttgctactggctttttggagtattttgatatgaatacagatccttatcaggtaagacaatatatgttcattttatgaaggttgttgaaaataggataaccagacataagcttaaatagattgtcctgtctgcattcacagctcacaaatacagtgcacacggtagaacgaggcattttgaatcagctacacgtacaactaatggagctcagaagctgtcaaggatataagcagtgcaacccaagacctaagaatcttgatgttggtaaggaaaaaaatactattttttctattttacctggaaaattctttgtgttactgagctttctgccttggaaacatttaattgcacagaaacatataattcaagatacttagaggagacactttccaggcaattctaaatacaatttgatctctaagtttagctctggtgtactaatgaaaagcttaatccaccaaaagatttggtgagcatttccttccaatatctcccacaggtctattctattagtaaaccttgattcctgatagaagcatctgttggaagatgacacgaaagcgttaggtatttgtttgttattgctgtcaacagtctgaagatatactctgagtaaaccaggatattctctttttttaagagaactttgatggaaagacacaatgctctatttctgctgtcccagtttggagttcccccagttggatccctgcctatgacactgaattagatttcttttgccagtatttttcgtctgaaactagagatattggagcagttcattaacttgggatctaaaaatataagaggatctgaatggaatcagccagatgttccttcccagctatgtgtgttaaactggcttatttctcctttgtttcatggagatgcagttcttttcagtgtccgccccagctcttttctggttaatgaaaatactcatttcctcctcatgatgtctgcagaaatgtaaataccagctgtccatacaaggaaggaggaagaactaaagctggcaagggcatggaccttggcatggcatgccaactccagaagggtgaagagctggactcacaggcacttgggtgcagtttgcaggagctttttgtggtgccgctgggttttctctgtgagtctggtgcagagccagtgtcatcaacagtaaaagtgggcagctttctgggtcacatgccttgaaaggggtagggattcccatcccagaatgatcaatatcaccacctgtcatctcctttccactgcagggtcacaaaggcttttgagttctgggagtcccctaagaaaatataaatcctcagttctcaatcaacacctctcaattaacacttagtggaatcagttgtcagtcaagagcagactgtacttgcaaaataggtcttttggtcactgaccccactcggctcaaatcttttcaaatatcctgcttatctgttgaccttttcctcaaatcttacaaaaaaaagagagagagagagggagggagggagagagagagagaggaaggaagaaaggaaggaagaaggaaggaaggaaggaaagaaagaaagaaaaaaagaaagaaagaaagagaaaagaaagaaagagagagagagagaaagagcctgcaaagacttggaatctcaaccaaccattagaggcactagaaatattatacccagatatttctccccaaaagaacataggacttttattggtggtgacataacaactctacttagtgaaatctgatcgagtcccttaatggtgaaatgacacactgggtggagccagttatgctgtttcacttcaagccgtcctctccaccttccagactattcctatgggagatgattattagcccgtttttttccaatgttttgtctaaaaataaccaaaatttaacttttcctgagaattacatggacttctggaagtacttttcccactgcttttaagtgggctctcctccctttaacacccacccatttttttcatatgaactcttatttttttttttatcttaaaccttttcattcatagctttcaatctgcattttgaacctaataggaaatctctgttgggcttcagcactgtctgtatttaacaccatgtgtttctttctaggatttagatgttgtgcatgaaaaactatatagtgaatggttttataagttctaaagctaacagaaattactcttgtattttcctatatcaggaaataaagatggaggaagctatgacctacacaggtattcacacttttttattcttctcaacagcttcttccccaataattgcatgatccagtggtttcaactaatttctgtttcttaccgtgttgcacagagcaaagctgggggtgcatgcttgttctaacagcattctccactatgttttgtcattgatcacagaactgtcattttgcttttaaatcagctcactgtcccatcaagatgttccagagcatttactcactcccatgcttgtttgcttgttggatgatgcttttaagcatggaatgatgtgaaggaaaaaaaacagaatggcctttgggagccccgggaaagggtgggagatttattttctttgtggtacttacacattgatttggtgggggagcttcatgaaaatgggttggagatttttattaaatatagcatcaaaggcacaaaatgactaatgagaattttaagagcactgtaaggccgaagttgaaggaaacaaggaatttctttgttgatgttcattcattaactttggtggtgaaaagcagcagccgtaagattctgaaagctctgcagagaggtggtgaataacgagaaggtgctgggagttggggacagagtaccgggagtcaagatactagtaaagggccacacacagtggctcacacctgtaatcctagcactatgggagcccaagcgggaggattgcttgagtccaggagtttgagactagcttgggcaacaaagtgagataaaaaaaaatttttaactagccaggtgtggtgatgcacacctgtagtcccagctactcagctactcaagaagctgaggcaggaggatcgcttgagcccaggaggttgaggctgcagtgagctatgatagtgacactgacctccagcctgagggacagagagagaccctgtctctaaaaataaataaataaataaaaaaataaagacactcaatagtgtcaacacagcaccaagacaacacacaaacattccataaacaaccctcagccctgtcattttatgcccctccaaccctcatccatccctcactgtgctctggaggggggacgcacgctcctgatggccgtgtcacttggtcacctggcaatattcgccattgctaattttctactctgagcacagacctcaggcaggtctgccacccgaagcagctgggcactgtccttaccgcctctgctgagacaaaactgaggcacagacgttaccagtaccctagttaatgtatccacttgggagaaaaacatccgtcaaagaaatgtgaacttaattggtgccatctatattaatatcttctttatctatattaatatcttctttatctatattaatatcttcttcatctgtattaatatctttaaaattaacatcccaaagaatgttgctgttcctggtaccctgttcggcccctctaacctccagagctatggtctcagatgcttccttttagagagaaggtcattagtccaccaagaagccaaatgacaacaggaaaggtgatgggaagatgaaaacaaaggaaggtggacttttgggtatatgttatagccatgtatgtatgtcttcttttttctattttctcttgttcttcatcttaactgtcctcaatctgccccacaccaaccctgtgtcactcccagcacacataagacagagcagaagaccccatccttgagctggtctcccctgggtatgggctgaggtaacatcccacacaccaggacgatcttccctgcctcccatcggtcacattaagacattttcaaagtgtaatattataaatggacctacctctaaatattgactttacagttattttatgaggcactcaatttatagctaagggtttttcagtctagtgtcatgaaagagataaaagggtgttcacagattatttaagacataaggctggtcagggatgagtcagagagtcattctccatgaagtcacccctggccaactttgaaaggaagaatgtttaactgcactttgggcgtaaatgacaagcatctgggaccctccccttccctgatccctgccaccaccactcaatcggccagataatcaattgtttctgaggtcactttcacataatcttggcaactttagttgttgaaagcatgcatgcaggggcaacatggtgttacctgttgctttttttttcccccttctaagctccttaccagagagcagatctaaggatactgtgtaacttgaaataaccggcattttcagactttgccatttcatagtccatagggcaagccatctttcagtggatatccacatggtgggcaggaaatcttgacattggtttctcagaaaatatctgcctagtcacacctgggaattcactaaacacccaaatgcagtgtttgatgtggccttacctgctccttgtatcttattggattgaatgagaacagatgcaaaacaagtatgtacagaaatgccaggaaaactactgtcttccaatggggttcaacagttcaaagccctccattgatggagccacttaggaggtttcagtgtcttaattcttttagattttgacagttttagaaaactaaaaaaaaaaaaaacaagtttttatcgtgaaatttgattacaaaagattttgagagaaatgataagaaccagatctgaagaatttgaaatttgaaaattcagcagagcatttttttaaatgtatcttgtacaagatgaactaaataaatgtttttaaactgacttctttttggtggatttcaaaagttaaccttcagacttatttagagggttttcataaagcaagtttttttctgttgctgctcaatttctttcttttcttttctatcttttcttttctcttccttttgctgttccctgtgtgtgaagcaggaggggcagctgaaatgctttgcatactcaccctggtcattttccagttaggacaagctcaaagggagagcacagctcagaaggtggcactcatgactcaggaaataatttgtggctcatttgaaagcagcatcttctaagtgtgttgcaaaatagagaaaaatcaacaggttgttggggtgtttattttccccactgcgtatgaaagctggtgctgctgccctttgatggccaagaggagctcctggcagccgtggccatgtgtcccgggggtgtgtggggcaggcggtcagttcttggcagccttcctctggcagggctgcttcctgatcctttgcttcaagccttctgggctgttagaccacacagagctccaccctcagcagccacgctgtaaccacattgctttcactgattttgactcatctcccccatagtgacagtgtgtgccaaaggtggctgtgggtgacacagccgtgtgttcgtgctgtacggcactgtggtcatgggggtggacgctggagctcctgattagtttgagttcaaatcccagcctcgctggtgggcatgcttagaacagaccctagcaggcgccaagccccagtaagtggtggagtcattggtaaaggataatgctgaatgcaggacatttatatggatgaaagagtatgggaaagggaatttcagtgatatgaattccaaagcgtgttagtatattttataagaaacaaaaaggtattcaccagcaccaccaaactccatcatcagtcacaggcaaccaagaattgatcactctcccagaactttgggaggccgaggcaggcagatcacgaggtcaggagatcgagaccatcctggctaacacggtgaaaccccgtctgtactaaaaatacaaaaaaaaaagaaaaattagccgggcatggtggcgggaggctgaggcaggagaatggcgtgaacccgggaggcggagcttgcagtgagccgagatcacgccactggactcctgcctgagtgacagagggagacgccgtctcaaaaaaaaaaaaaaaaaaaagaattgagcactcaagtccgtcttctaaactgcctgaacctcttgagatgagaagaacaaaacaaacctgcgctgtcctgatgtaggttaccctaatggagcttcctgggttctcctctccctgtcacatctcagggactccaccttattttaaagctgtcttactagcactgttggacttttctgtttcagatgctcaaacaagagatggagcaggggcagggtttggggttaaatgggctggaggtgagattggcccccctaaggtgttgaggacacttggggtgaaagtcgttagggtatatgtaggtcagagccagggccgctgcgtgcacagaggtgtgtcatggagcggccagtaggcaccaaaatccagccaaagctcggccatgagagctgggtagcggcaggggtgacaacagtggccaccctggtaaggttaaggtcagacttgggttagtctaagctgtcagagggtgttcatcatttttcttacctttccaatagtgaccctattccaaaggccttgtttcttgtgccagagaagaaactaaagtatagcacgtgcagaactccttaagatcctccccaggctgcggaatgaaatgtatctttaatcagttccaatatatagggggaaaatgtgccctcattcatccatgcaacatataaagacagaaagaatcgaaacaaccacctctgtgccaaacgccgccttcacagggagtgcagtctggtgttagaatgcacgatgcaaagtgccttgaccagaaatatatggcgtcataagagccaggagagggccccaacccaaccctgagaaatcaaaggaagctttccaaggagttggcatttatgccgcatcctgaaggcaacagtgcagtgatccagacacaggatggaaaaggaagtcagtccaaccagaaggcaagactcgtgtggggacttatcatcagttccgtgacagtgcaagggaaggagaagagaaggatgagctgaaaaggcaaccagggcctattttatggagtgtgttatatggagaatgatgatatgatgtatcttccaaacagggatgttttgaccatgggggaggagtactaaaaatagttaattatttatattaattattatttatattaattctatataaatattgttatgtatttgtttaccaatgaactagtcagtagatctataaaacagttgtatttaaaactattttctaagctaaaatgtcaaaaattctggacaaatgccaaaatgaacagggtaccagtacagcagatacaaactgggaccctcccaggcaaacgaaaaatgtggtcaccctagttacatgctacatcaaaggatgtaatccctgtcctaaaagcaataggcagacattcaagagtattaaactgggagaaataatatgagaggatttgggctgatcagattaggtggcataaatagttatgagaatagttttgtgagtcacattggtttgtgggtcagttctggctccatcacttcccaatttgaggaccagttgctaacagtattacaacacttactgtggtccagcgctcttctgaatgctttcgtatattaatgtatgtaaccctctcgataacttcgtgaggtcagtactattattatcctcatttttttttttttttttaagacggagtctcacactgtcgcctgggctggagggccgtggcaccatcttggctcactgcaacctccatctcccaggttcaagcaattctccttgcctcagcctcccaggtagctgggattacaggtgcctgccaccacacccagcttattatccccattttacagatgaggaaattaagccacagagtgactaaataactttcccaagattacacagctgataaatggtgaaattcaaacccagcgagtctggttctagctgtgctgttcatctctacactatactgattctcttggacaatttatttaacttcttttattatggctgaattttctcatctttaaaaaggtgataatacatacacataataatacacaaggatttcatgagatattacctgaaaagtaagccctgaattcatattattgtatgactgaagtttgataataaatttgattagtgagagacaaattgtatcaaagagccctggaattttttttttttttttttttttttgaggtggagtcttgctctgtcacccaggctggagtgcagtgacacaatcttggctcactgcaacctccacctcccaggttcaagcaattcccctgcctcagcctccctagtagctgggactacaggcacagaccaccatgcctggctaatttttgtatttttagtagagatggggtttcaccatgttcgtcaggctggtctcgaactcctgctcaagtgatcctcccacctcagcctcccaaagtgctgagattacaggtatgagccactgcgcctggctgagccctggaattttgaaggacatttatcttcacattaatggatgacaaaattgcagtttttaatgtcaatgctatattaataaagaggaaaagttatgtgcatttaccaataagtagatataatcagccattaaccacacacaaggtagtcatctataaatgacatatatatttatttctatttttagactatctttagggttgaacattaattggctttcatttgtaaaataaatagctattcctacaattcatccataaaattatgtaggttagaaatttatggtcttctggttgctctgcctgtggagtagccattttttattcctttgctttcttaataaacttcctttcaccttacaaaaaaaataaaaacggctaggcacagtggctcacacctgtaatcgcagcactttgggaggccaaggtgggcagatcacctcgttcgagaccagcctgaccaacatggagaaaccctgtctctactaaaaatacaaaattacccggacgtggtggtgcatgcctgtaatcccagctactcgggaggctgagacaggagaatggcttgaacccaggaggcggaggttgcaatgagccaagatcgcgccattgcactccagcctgggcaacaagagtgatactctgtctcaaaaaagaaagaaatttatggtatttttactatggccaattctgattttggtgtcctgctagtatcaaaaagccaatttacaatttgcttttggatactagcaggacgccaaaatcagaacctctgaaatttcaaagcctaaatcaaattccatttcaagctaaaacatattatgtttcaagtagcatgaaaatcacccaagatgaataccagtttggtccaaatattggaaaccctgtgccttcagaaaaaaaaaaaaaacaaagagctcagcaaaacatggaagggcttaggagaaaggagcagatgtattaacgcagatagtctgttcgggctcttcccattgtgaagtttaaattagtaccattagaaatgagacttggaagagaatagctatattaattaaaatatcctgccagatagcaacaagcaacaaactacatataatgctttatgatttttctgatcgacccattgcttgcttcttgaaactgtagacacctggcccggtgaaattcaatttgctactgagcacaggtacccagaatcaggtatagatgatgccataatggaggggttcacacaacccaggggaacggccagagaggctctgtggaggggatgagagctcctcttgaaggctgagagctgactgggctaatgaggcagggaagtacattctagaaataaatacaaacactgaggaaggagagagcctggtactttcaggacattgcacttgttcctgtggctggtacagaggtgatgtgccaaaggggaagagaagaggccacagaagctgcagaagtcagcctgtgtctgcagaaacaatcccttctgcttcttatgacaccatcagcacctgttaattataacactgctccaggtagagttaaaattccatgcatgcatgatctcttaaattacccgtctgtggaatatagcatgatgtaattctgtggttaagtttttaaaagtaagtaagtgtcatccagaaagaaatgtgacttggcttgcgacctgggtatgttcttgaatttgtcttaatggattcacggcttttctgtttccgggattggggaataattatctgtaatgtgaaatcatctacatttattctgaaaattcacctgtcagaacaagcctatctataccttttctctctgaataaacagcttccaaacgaccaaagaaaaaggtttccttttttgagctgaagacaggcagaaaccaggagacacatggaaaatttaagttctaatgtcgaataaatttaactttctattttgatataactttacatttacagaaaggtcgcaagaataatttcaagaactgttaccccatttgctttattgttttttcttgttctttcactcactttctccacacaccttttttttctgaatcatttgcaagtaatttgcaaacatcattcccctttatatataaatgctttaggaggtatttccgtagaacaaaaacattctcttacataactgttatgcatttatcaaaatcaagcaatttaacattgttacaaagcaattgtcaaatctacatttcatgttcaaatgttaacaattgtcccaataatgccatattcatcattttttgcttttctggcctgggatccaatccagaatcacacattgcaggaaactcacctctttttagagtattcttttatctggaacagttcctcaacttctcattatcagtcatgatattttaaagagtgcatgccagttattttgtaaaatgtccctctgttggggtttgtctgatgtttcatcaggattgaattgaagctgtggatttttgtcaggaataccacatattgtgctctcgggatatcttatcaggagctgcataacatcttggtggtattacctttgattacttggcaaaggtggagtttgctaggtgaagccactataatttttttcttttttaattaataagtaattcatctaccagcttttaaggcattcacgattcatttctgcctgaatcatttgttgttaccatgatggttgcaaatgatggtttctcccactctgtaattcctcctgcttgctttttttttttttttttttttttttttttttttttttgtctgagacacggtcttgctctgtcacccaggctggagtacagtgttgcaatcttggcttactgcaggcttgaccccccaggctcaagggatcctgccacctcagcctcccaagtagctgggattacaggcgcatgccaccacactcagctaatttttaaaaatttattttgtagagacaaggtctcactatattgcccaggctagtctcaaactcctaggctcaagcgattctcccatctctcaacctcccgaattgctgggattacagtcatgaaccatcgtgcctggctcctcctgcatttcttaggtagtattgtactgtaaagaagagatttcccggccagatatggaggctcacacctgtaatcccagcactttggaaggctgaggtgggaggaatacgtgcttgagctcagaagttcaagaccggcctgagcagcatagcaagaccttatctctactaaaaatacaacattcaaaacattagctgggcttagtcccagcacctgttgtcccagttactcagaggcagagcttgcagtgagctgagatagcaccactacattccaacctggatgacagagccagaccctgtttcaaaaatatgaaagaagagattttcctcctctcctgcgtatttatttctatcagtatggacttagattctcagtttattccatggatattctcttgctatcattatttattttgatgattaaagtgtcttagattggccactggtgtccctgcacctggattccgtgtacttttgaagcatcctcatcattttttgaccacctcgttgctttctggcctaaaagcatgttccaggttcatatggcatttttgccactccacatttggaaacagccatttctccaaagggccccagttccttttaaaggggaatggcatttgaacaccaagatctgggtctgaggtgtataaaattgctgctgaggtgtcttggcatatagatccttttgatggatagagctaagagacacactggcatctatcaacatctattcttttttttcttttctttttttttttttttgagacagagttttgctctgtctcccaagctggagtgcagtggcatgatcttggctcactgtaacctccactttctgggttcaagccattcttcttcctcccctcccgagtagctgggattgcaggcacctgccaccatgcccagctaatttttgtatttttagtagagacagggtttcaccatgttggccaggctggtcttgaactcctgacctcaggtgatccgcccacctcagccttccagagtgctaggattacaggcatgagccaccgcgcccagcctcgacatctattgttgtacctacagatatgtagagatatgtctaattgagtgacctaatgcttccaatataatgttaccctgctcctgatttcaattaaaatgcttttagagtttctctattaaataagaggcaagctttaggactgagttatatatacttttatcatgttaaggaaatagccatcagttcttttttttagtgcttttatctttaatgaacgttgaatttgtcaaaaagctttttttagcatctatgaagatgctcagataattattctctttagatctattaaattattattgtgtattatattaatagatttggtaagaatgaatcctttcattcctgaaataaattccactgggtcattgtgtgttgctttcgtaatattgaattctgttcactaatattttatttaagatttttgtatcatatttttaaatgataccaatctgtgatttcctttttgtttttaccagcattatctcttagatatattagtttcttattactgctgtaataaattaccactgtgcctttaaaacaacacaaatttattctcttgtgtttctaggggtcagaaattcgaaatgaatcttactgggctgaaatcttctgggggctcgaggcaagaatgtccttgcttttccagtttctagaggctgcctgcattcctcattcatggtctcttctgccatcttcaaatacaaaaatgtagccaatcttcaaatcagtctctcccccaacccccaccttcctctgttttctggggtcacatctcgttctctacccctccttcctaccacctccctttccctttataaggactcttgagatcccactggccccacctggatgctccaggatactcccccaccccaatctcaggatccatgacttagtcacatttgcagagtccctttggccaggtaaaggaacttgtccatagtttccaggaatttggatgtggacatctttgccgggtggagtccactattctgcctatcacagctatcaatgttatccttgcttcgtgaaaagagtttggaagttttcttgagttatctgctctagaacagtctattagtattctcttttcattgaagatttgttaaacttctcctgtgaaagtccacagacctgatgcatctttgcacagtggttctttgggcttgctttttcttctatggaaactgttctatttaagctttctatctatattgggttgttaaatcaagtttagcctaaatctgcctcctcacatattttaagttcagcctaaaggtttctctgtatatcgtgaactataacctaaatagagttgtatacagactgtagcctactcttgtgcccatcactgagttttggcccttcaaaggtggccaactgctcaaactctgttcaaataaggcaaacactgagctgtaaccaatctggctgcttctgtacttcacttttgttttctgtccgtcgcttttctttttctgtccatacatcttcttccaccacgcagctgcgttggagtctctcagtctactctggcttgggaggctgccagatttgcaaatcgttctttgctcaattaaactctgttaaacttaattcagctgaggtttttcttttaacagcatcaatttcggcaaactattttcctgagcaactacgtttcatccaggttttcaaatttgttctcactgaggtctgcaaagtagtctcttgtttttattttttttttaagatggggtttccgtctgtcacccaggctggagtatagtagcaatcatggctcactgcagcctcagcctcctgggttccagtgatcctcccacctcagccttctgagtagctgggattacaggcgtgtgccaccacactcagctaatttttaaatttttattagaggtgagttcttgctatggtgcccaggctactgttaaactcctgggctcacgcaatcctcccatctcagcctcccagagtgctgggattacaggcatgagccacatctcttgtgtttttaattttgtgtatttcaacgatttttaaaatatttaccagtttattataaaggatattataagaaatgcaaataaatagccagacaaagaggtacataggctaaggtccagatgggtcccaaacgcagaagcttctgtccttgagttcgaagtgtgctaccttcacggcatgtggttgcattcaccagctggaaatttctctgaaccctgttatcgtttaagatttttaatgaggttccattacataagcatgattgattgcatcattggccattggtagttaactcaatctccaggcccctgtccactccacagaggtctgagagtcccaactctctaatcatgtggaggtctttctgatgatcagcccagctcccaacctagagctgtctagggtaccctagccatctcctcagcatataaaagacactcttatctccctggagattgcaagggcgttaggatctctgtgaactgggggtagaccaaatacatttttcttattatgccctagtcccctggccatgaaccccgtagtgagaagattataaaagtcaaaagatattggcacattcctagaattgcattcagccatcaataattagtccagtccatcattctgtcatatgaaaatacctcctagggcaaggccactcaggtttgccagcttctgttggatcttgccaggagtggcttagcaatatatgacctcacccttttaggagtctggtataatggagctaagagacaatgtcatctcctgttctgagcctttttcaagctgttaatgtaatattggatttctctcatgactcatgacgtaacccacttattcattccttcagcctcagttactattcctccatctctccatttatgaccaaagttttccaccttcggaagagacattagattcagccactgtgctgctctaggcttcaggcagcaatactagtctagtattatcactagactaccaataataggctagcaagtacctcttgctcagtctgctcccattcaaatagagtaagtttatataggtgcagaactaatgaactgtttttaaccaccaggcagtatacctgcattcactgttaaccccagttttgccagatggggtgaaggcacaacctgccctatcaggcccttaggaattctgacatcgttttaaagtataattagggttttttgcttaggaaacatccctgcttccaacaccagcagttgcatctctgcatcacgtataaaaaagaaagttgaagtgctgtgcagaagacttgcatcatcacaccggcatcctctcctgccccctctcctcttatcctcctgcaaagcagagaaatctgtccagtgggggacactcccttagcccccttatgttgagtgtgaaggtatgtaagccagccttcaatgcttttgtctccccacattttagacagcaaatgttttaactgcccattccttcctgttcttatggaactgttactctaaggataatgtgcaccattatacgtccatttgatgtgagctatctttgctcacttttggacattatgggctataaaatgtgtcctttcatctgaagaaatgtaacttggtggtccaaattagtacagtattttccgttcctatcctgtaataatattttaagcatttgcattgcatttaagtagatgcaatgcttaaaatgggtctacaaaacccagcctggggtaagtgtctatttctgttaagaccctgatctatcccgtcggggctactggcattggttgctcccatgtaatccacttaccagctatgcatggggtgcctaccccaggggaatctgccccatagccatctgcagtctctgactctctttttggcattatatgtctgacagtgcaagaggaataggtccagacttagcccatctctgcatggctgcagcaccaccccccatacccactcattttatgagccccagtggctaccacaagggagcacaccaaaaggtccacttgatggtgcccgtaatactccaatacatattcttatttactcttgctcccttgtactgataacacctattgtgtttctatatatttctcattgcatcttctataatttcttctttatcaagatagttgctcttttggtaattgtctttgtacttacacatttttattgcccttaatccctgttttgtgttttttcttttttggtatttttaatagagacagggtttcaccatgctggtcaggctggtcttaaactcctgacctcaagtgattcacccgcctcatcctccccaaactactgggattagaggcatgaggcaccatgcccggtctaaatccctgttatcttatttaacctttcattatctcattagacagtttttaatggcttctctcactcccagctattacctgaatcatactgaatgagattattctctttggtctgtgctccctctcacatttttagttgcattatttctagcgtgtcctataaaatgcatatattattttttcacacttcttctacctttatttttatcctagatctgataaatctattaaatgtgcaccctctatatttttgcttccatttccccattgatttcttggacaaacgagtcacagcctctggaagattgctgaagaagagctgatgcgcacagtatcccctgcattcttgtgtgtttcaaactgttcctttatagccttgatacttgaaggagatctggactggatatgagatgctaggttcatatttgaatttctgatttcagatggcttttccatcctcatatgcttgattgagaacatttaattcacacagcactggtgtgttgtggttttctgcactttatagtttatttcgccaggagcattttcttaagatggttttttaaattcttgttttccactttatttttgttgttgtcgttgttgtttattttatttttttaagttctgggatacatgtgcaggatgcgcaggtttgttacataggtaaatgtgtgctatggtggtttgctgcacctatcaacccatcacctaggtattaagcccagcatgcattagctattttccctgatgctctctttctcccaacaaccccacaacaagccccagtgttagatagttccccttcctgtgtccatgtgttctcaatgttcggctcccacttgtaagtgagaacatgcagtgtttggttttctgttcttgtgttagtttgctgaagataatggcttccagcttcatccatgtccctgaataggaaatgatctcattcctttttatggctgcatagtattccacggtatatatgtaccacattttctttatccagtctatcattgatgggcatttggtttgattccatgtctttgctattgtgaatagtgctgcagtgaacatacacgtgcatatgtctttataatagaatgatttatattcctttgagtacatatccagtaatgggattgctgggtcaaatggtatttctggttctaaatctttgaggaatcaccacactgtcttccacaatggttgaactaatttatactcccaccagcagtgtgaaagcgttcctacttctctgcaaccttgccagcatctgttgtttcttgacattttaataatcaccattctgactggcatgagatggtatctcattgttctactttcttttatggtaatttgatatagatttaggttcttttatttcatggatttatactatttacaaccctcctggtttaagagaattcttttctgtgagtgtaactaagtatacttcctctttacctttttattttattattatttgggagtgaaagtgagagaggttgtgtgtcttccaacttttcgtatctcttttttcttgcaggatctgaaatttcccatcttttgcttcctctttgttttaccacccagtttccaatggctgtttctcccttctctcttcctttgtgtccttttctgccctaagcaatgcctcccagactgctgccttcaatcgtgcacaggcacaaggctgggacttaggggtcccatcctcattgtcagtgctgtggctcaccaggaatctttacagtattttatgcaaaagattgacgttctttccaccaacagcctccaatcaatctttgactccactgacacttccctcttctctcttccatactgttttcccagagcttgtggccacagtgtgacattcagctctgctgggatttggtgtcaacgttttttatctacacgtgatctgaagattgtaggattctctatcttctagctagaccgaggttgtgggtttggtatagttttgcttattcttcttgctggtctgtatggctttatgggtggtcattgcactcatctaggccacctctttccaaatggtacttaggcacaactagagaacaagtgttattttctgcagggctacagtcatcctggagatgtagaaagatctgagagagagaaagctggtgccttctttgcatatgagaaagtcattcagttatctaaggcacacatttatctaggacatagaactttcagggcaaaaacaacaatcaaagaaataaatccaggcatttgatttgaagagcttaattgcattcagatttgcttttatactgagtgttagggaatataaaataaaaatatcatactaagcattgcctattacattcaaatactttcaaatttgtcattcacccagcaaccttataagtagtaatgattttatcatacaactatttctacacttgacagatgagggagcaagactcagagggactcactcacatgctcttctggttgcaaagttgatttgagtggggccaggagtgaaacccaaatcccctggctgaaaggaccgtgccattttcagcactaaccatgcttagtcatagatgttttcacgaatgtgatcttttttttccccaattttctgttgtttaatcacctgtaacctaaggccactctgtgataacaaatgactaggggaaaatgcttttgagtgtcatacttctcattgattaactctgtaaaaacaatgtaagttgcttgtccaggtaagtagaaagccttttctccactaatgattcaccttcttctctcttttcacagaggacagttatgggatggatgggaaggttaatcagccccgtctcactgcagacatcaactggcaaggcctagaggagctacacagtgtgaatgaaaacatctatgagtacagacaaaactacagacttagtctggtggactggactaattacttgaaggatttagatagagtatttgcactgctgaagagtcactatgagcaaaataaaacaaataagactcaaactgctcaaagtgacgggttcttggttgtctctgctgagcacgctgtgtcaatggagatggcctctgctgactcagatgaagacccaaggcataaggttgggaaaacacctcatttgaccttgccagctgaccttcaaaccctgcatttgaaccgaccaacattaagtccagagagtaaacttgaatggaataacgacattccagaagttaatcatttgaattctgaacactggagaaaaaccgaaaaatggacggggcatgaagagactaatcatctggaaaccgatttcagtggcgatggcatgacagagctagagctcgggcccagccccaggctgcagcccattcgcaggcacccgaaagaacttccccagtatggtggtcctggaaaggacatttttgaagatcaactatatcttcctgtgcattccgatggaatttcagttcatcagatgttcaccatggccaccgcagaacaccgaagtaattccagcatagcggggaagatgttgaccaaggtggagaagaatcacgaaaaggagaagtcacagcacctagaaggcagcgcctcctcttcactctcctctgattagatgaaactgttaccttaccctaaacacagtatttctttttaacttttttatttgtaaactaataaaggtaatcacagccaccaacattccaagctaccctgggtacctttgtgcagtagaagctagtgagcatgtgagcaagcggtgtgcacacggagactcatcgttataatttactatctgccaagagtagaaagaaaggctggggatatttgggttggcttggttttgattttttgcttgtttgtttgttttgtactaaaacagtattatcttttgaatatcgtagggacataagtatatacatgttatccaatcaagatggctagaatggtgcctttctgagtgtctaaaacttgacacccctggtaaatctttcaacacacttccactgcctgcgtaatgaagttttgattcatttttaaccactggaatttttcaatgccgtcattttcagttagatgattttgcactttgagattaaaatgccatgtctatttgattagtcttatttttttatttttacaggcttatcagtctcactgttggctgtcattgtgacaaagtcaaataaacccccaaggacgacacacagtatggatcacatattgtttgacattaagcttttgccagaaaatgttgcatgtgttttacctcgacttgctaaaatcgattagcagaaaggcatggctaataatgttggtggtgaaaataaataaataagtaaacaaaatgaagattgcctgctctctctgtgcctagcctcaaagcgttcatcatacatcatacctttaagattgctatattttgggttattttcttgacaggagaaaaagatctaaagatcttttattttcatcttttttggttttcttggcatgactaagaagcttaaatgttgataaaatatgactagttttgaatttacaccaagaacttctcaataaaagaaaatcatgaatgctccacaatttcaacataccacaagagaagttaatttcttaacattgtgttctatgattatttgtaagaccttcaccaagttctgatatcttttaaagacatagttcaaaattgcttttgaaaatctgtattcttgaaaatatccttgttgtgtattaggtttttaaataccagctaaaggattacctcactgagtcatcagtaccctcctattcagctccccaagatgatgtgtttttgcttaccctaagagaggttttcttcttatttttagataattcaagtgcttagataaattatgttttctttaagtgtttatggtaaactcttttaaagaaaatttaatatgttatagctgaatctttttggtaactttaaatctttatcatagactctgtacatatgttcaaattagctgcttgcctgatgtgtgtatcatcggtgggatgacagaacaaacatatttatgatcatgaataatgtgctttgtaaaaagatttcaagttattaggaagcatactctgttttttaatcatgtataatattccatgatacttttatagaacaattctggcttcaggaaagtctagaagcaatatttcttcaaataaaaggtgtttaaactttttt

SEQ ID NO: 34 - DNA, 74468 bp, Homo sapiens
tgcattcttaattgctagagctaacatgctctcagcatggtcttttaattacaccctaataatttattatagtttctctctacaatgtaaagtcttggaaatcacccactaaaaagtgcctgtgtactctggggctttggcaggctagggcagaacttctgagaacacggtgtgttccagagaagacaatcaatctgagaggacttacacagaaacagttcattcaggacctggctgctggcttttatctgagatctgaggatttcacaatcacttggagatacctacaagtgtatagcacaccttggatattactcttaatgattacttcattttgtaaagaggtgactccaccaacagcaaaggagagggcccagccccagccaccaggaatacagttctctgccagtaagtgcctaatgactcattttcctcaacagaattttcataaggctggaattcagggagggatgtctggagaatgtctgaaaggaagttcacaagccactgtcctgctctttgctggagaaagtgtcccgtggtagccagagaagttgactaaggcaaacagcaacatgttttggtaacatttccccattacctttcatgtacaatccaagaaaggttgccatgaagtgttttaatcaggttgggaacattataaacttcgaaaaaagaaaaccattagtggaaaaattaaggacacagtagatttaacaactgtgtttacgtggaaccacaaaatctatccaagtgaattgcattaaaacagacagaacactccaagaaactgttgtatgtgtattttttttaattcagtcaaccattttactaatctgtcaagatgaccaatttctttggaattatgtagatttagccaaaatgaaattatacataagatttacttttcttttcagatgcttttttatttatttttaaatctttataattactagatgttctcctctctcagaagatattctgagaggaaagcaaaaataccactcttgtaaagccatttccattcttccaaaggtctgctggtaaattattcttactgatctttccatctttctagcctgtgcatacacacctaacccatactaaatttcaccagatggcattttatttctttaaagtaaagcagccgtgggtttagacagttgaatttttaaacttctgtatttactgaaagtgcatatggtgctatatggacaaagaaattgtgctgaaagaaaaacatttctgtctgcaatacctcataatcttccagaggaaaaaaaagtgcagttatatggcacatttctcacaaaatcttatgtggcttcaatgttcttcctctgttaaaaagtagatatatgtttaatgtacagacctgcaagtttcattattttaaattcatcttttagtggcaaataaaaatgttatgcaaaacccaatgacttgctaaagtgatccttcagtgaattctagaagaaaatgcaacataaacctgaactggtaaaaaagaaaaaataaaaacctctgtatgtcaacgtaagcagatgttggtgtagttacaaggatgagaaggctataaaacttcccttgagtcactcacagttcatttgagggccaagaacgcccccaaaatctgtttctaattttacagaaatcttttgaaacttggcacggtattcaaaagtccgtggaaagaaaaaaaccttgtcctggcttcagcttccaactacaaagacagacttggtccttttcaacggttttcacagatccagtgacccacgctctgaagacagaattagctaactttcaaaaacatctggaaaaatgaaggttagtataagcaacctcaagtattcttaaaaaattagggttggctggattgaacgtgatcagagttttctattgtttagaaggtgaagatttgtacataagtatttacttcctcaatgggttgggattggaaaattgttctaaatatactgtagaaacatttgtccttgcagagctggaagaattccagcaattatagccggatcagtggaaaacaatcaaaagctttgtggggcgagagaaaaaggatttaggtgtaaacaaaatcttgccatttctactatttagcaggaactgtgtgtatgcctaattctctttattttatgtagacttgggtaaaaatcgtatttggagttgccacctctgctgtgcttgccttattggtgatgtgcattgtcttacgcccttcaagaggtaagaactttctctgatttgctctatctgcctagaatagcttggaaaatgtactaatgcaagatcacaagtggttgaacatttcctaagtgcttatgttccaaagtaagtctgttatttctaagaagacatataagctcacagatatgttgttgtgcaagaccagaaatactgaggaatttaaggcatgggtaggaagagatttacagtgttatttcagcaatagaaaaacctaagaactatgctgcatcacccccacaacccccaaaaatatatgctaaatacaagctttgacaggcctttagaaacaacatttttaactaacattgcttttcattattaggtttgtctcgtggaaagtaaaaatgagtaagaatggaaaagttaaaacagaatctatggactttttttattactaaatagtctttccaaaaatttagggaggaagttgagaatacagatctcaggaatagctgtatagaaaaagcaaagttgttgttttagatgtagtagcactgcacatcaaattagaaaaccaaacattgttaagcaagcattttgatcagtcataaattggatccttttacaaaaaaggcttagattgacactgatctcactttgctaaaaattggaaggtactatgggctgatatcagagctagtttaaatataaagtaggactatgttgatagataatctagtgatattagggaaatagctttttatgaaaatatttatgaagagaaactcaagcttctgaaatggaaaaaaaatccagtaataacaggtcttatgtctttgtgtctaggaaaggggaaaaatttgtactaataaatactaaaagtttatgataacaaatgtgggaaatatcttggttaaaagttaactgatagtaaatgaagatcaataaaataacttcagctaaagaatgtatgagtcctgaatgactggactgttgctattaaaaagaacatagaaaaatgttttcgaaaattaaaaataatcatgagattttcacagaattacaaaatagaataggttaacccataagatgaagtcagctgatatcttcagtgttaatttcagtctttgtttctgctctctgccagcacaagattcttcttaggctgttgagaggtatgtagtgtgtgtacatatctttcataaattttcatgttaaaattgttttcagactcatctctgaactcagtggtcttggggccacatttccctcataccagcaattgtcaggtagtggattaggtcatatagatcctttgaatgttaattcattaaaaattagctcctgatttttaaagaaactcaaccttgaaattgatactctgcaccctcagaaataaatgttcttggaacaaaagtttgttaattttatagggcacttgcctccatgtccatagggaaggatgaatttcactatggaattcaagctataatttctaataagaaatgcattatatttacatatttacaaatgatgtatagagatacacatacacagatatttgtgtgatcacatataatctcaatccctaccctctttccaagtttagttatgtatagcttacatataaatatacgtcgtaaactatatatagtataaaagtcctatgtaatttataatacaattctattttcaactaacaggaaaattctaagaataaagtgatttcttgatagggtgaaataatcaaattaaactcaagtactcagtgaaatttgagtactcattcagaaatagaaaaatcataaataaggtgagaactgttgttttttggttcattatatcattctctttctcttctaaatttgctgaataacttctcagaatgtcagctaaacagcttgtgaatggcactagtcattaccctactttcctgagcaggacccggggaagtcagtgccacaggcagccctgaagttaggcgtggtggcctcctaattttcctcctttcttctcacatctcactggtcaatcaatcatctcccgtctggagtgccaggtccagtcctcactctcacatctgcccagtgcctatgagaataggatctgagatggcaaggcaggaaagggaaggaggaaggggtaaaaagaacagagaattcaaagctaagcgagctcctacttagcctctttctcacattcatcagaaatcccattacttcacatttgccttaggtgccctcatatcctcagcccagaattttatgcaccagtgtatgaactgtcttcttctgagaaacttaaagccacactcaggaaacattcattcattcatttacatattagtgtattagttctactaactccctgctcatcatcatgccagttgctgaggatatggaggtgcagcagtctagaattccctctgcaagttggggagtaagaatccagtgctttctgcacccaaagatgcatggtcagcaccacagataccagagaaggatttgtgttatttcacatcacgtctaaaggaaagaaaaaagagaaaggctcttccatcccaggagaaccagcttcaggattaaaagggtttaggaataattaaactggattataagaacaaatatgaaatgtagtagtgaaatgagaaaatccatttagctcacttacaaaatattaactataaggaaaaacttttttcgaaacttgtaaaatattccctttttagttttgccaaagtgtgaagcacacatgaatttctaccccttactcccaggttgtccttgccttcagcttacaccccttcaactgactcctttcctctctcctacctccattcactttttcttttgaggttcttcttcacaagcatcacccctcttcgtctgtgaatatgcaacaaggctgagagtggaaactaagctccttgacttccccttatttttgttcaccccaaagacaaacataaagaccttcttgcttcaagagatttaacagaggttacaaaagcaaaaaactagaagtgaaaagttacagaggttgcagaattttgcaggtaaattctacacaaacttgattcatgatttatattttctgaatacctggaccattcctccttggcttatagaaagaaatcataggaactatttgacctcgtttcagattcttttgagtatagagtgccccacatggtgatgaacaaatactcaacaaatgttagttattttttttctaaaatttctaacatgtagtaaatacttcataaatgatagcattttgtgtctgtgttcttccattgttgagaatatgtacttctacactcaacaatagcaactattccattctgtgtgatgtatttcaatttcaaaaatgtcttaattccgagagtagagagcctttatcccagaatatcatccctgttcctatccccaactttttttttttaaccaaaaacaacaaatgtttcagaaacttttgtgtctgaagcactcatacagaacactgatggctctagggcaaaagcaaaacaaaaggaaagaagaaagatataagaagctgaagggtggaggaatggagaataaggctgagtgagagtaaaaaaggaaagggtgggtggctgtgttggcttatggctgtaatcccagaacgtcaggaggccaagacaggaggatttcttgagcccaggagtttgagaccaggctgggcaacatggcgaaaccctttctctattaaaaaaaaaatacaaaaattagctgggcatggtggcatgcacctttcgtcccagctatttaggaggctgaatatcagaaaagtgtttgggaagttcaggaaaccaaaaggaaactgacagagctatgagaccaaaatcatttaaacaaaccaacaaagagaatatgtatatacatatgtaattgtgattctacatacatacacatatatatataatatgtagtgattatttagctgagtcttgccttttataatgcattgaagaaaatatgtgaaggccacagataatttgtatagcacagagatcaatattttttaagaagaaatatcatttggaaagtctgaattttagtcagaaatccgttgttgttgttattattagtattactaattagtattctattactactgtaacttcaacaatcacctttggtaaaataagatatacgtgagataaaatcatcttcaaaggagatataaatatgttagtagtaaagttaaaatattttcccaggactaacattcagtctatgaaacagagtccctcaaacatcttaagagttttaagcttattttttcactattcttatggagaaaatatgggaaagtctaaaaggttaaggaaaagtttcagaaagttcatgaatataaaagagctttttagtcaagataaagaaatcaagtttgcagtttatagttctctaatttgcacgtgaattttaaaatcacagatgaatcttggcaaactccctttgagtttcgccaaattctaaataatttaaaaagaaaaccaaatctttgtatgattctcacaatggagaggcgtttacctgtctcagatttccaaagcaaattgagttacaacttcaacgagaacatccagtcatagatataccttgaaaaccagattcaaaagtctgagccagaggtgtgcaatcaggactaaaagtttttaagaaccacagacagtcaaactgagccataaaatatagcaataattgacaaatgggatctaattaaactaaagagcttctgcacagcaaaagaaactagcattagagtgaacaggcaacctacagaatgagagaaaatttttccaatctctccacctgacaaagggctaatatccagaatctacaaagaacttaaacaaatttacaagaaaaaaaaaacaatcccatcaaaaagtgggcaaacgacatgaacagacatttctcaaaaaaaggcatttatgcaaccaacaaacttatgaaaaaaagctcatcatcactggtaattagagaaatgcaaatcaaaaccaaaatgagataccatctcatgccagttagaatggtgatcattaaaaagttaggaaacaacagatgctggagaggatgtggagaaataggaatgcttttacactgttggtgggagtgtaaattagttcaaccattgtggaatccttgtgattcctcaaggatctagaaccagaaataccatttgacccagccatcccattactgggtatatccccaaaggattataaatcattctgctaaaaagacacatgcacatgtatgtttattgcagcactgttcacaatagcaaaaacttggaaccaacccaaatgcccatcaatgatagactggataaagaaaatgtggcacatatacaccatggaatactatgcagccatgggacatgcagggacgtggctgaagctggaaaccatcattctcagcaaactaacacagaaacagaaaaccgaacactgcatgttctcacttataagtgggagttgaacaatgagaacacatggataaagagaggggaacatcacacacagggcctgttggggggtcgggggactaggggagggatagcattagaagaaatacctaatgtagatgacgggttgatgggtgcagcaaaccaccatggcacatataatatctatgtaacaaacctgcacgtcctgcaaatgtatcctagaacttaaagtataatttaaaaaattgcaataattaatacagtagcatgtaataaaacgatctcataagacagtcaaatactaaccagtctctttttatttctcattgtatagagaaccaagaacttatttttcatttccagtatcctttttaattgactaatatgcagtaagaacagaataacttacaatacttattaatatttattcccattaataataaaaacagtattatttagtatcaaaattaaaattttaaatacaggttatgatttatacttggtggaaaaacagatgttaggaccttttaaggaacaggatataacaattgtatgttaaaaaagaaaacagataacaggccaggcgtggtggtaattgcagcactttgggaggctgagatgatggatcacttgaggccaggagttcaagaccagcctagccaacatggagaaactccctccctacaaaaacacaaaaattagcagtggtggctgacacctgtaacctctgctactcaggaggctgaggcagaattgcctgaatctgggagacagaggttgcagtgagccgagattgtgccattgcactccagcctgggcaacagagcaagactctgtctccctgcccccccaccaaaaacaaaacaaaatcagataacaaatgaaataggcacattgaaataggcacacagaaagatactaactaccaatacttaagaagaaacagaaaacatgagtggtgctataacaccaaaaaagattgaattagtcattttaaaacttcccacaaaaaaaaaaaaacaaaaacataaaaacttcctaagctcagatggcttcactgacaaattctaccaaacacttaaagaagaattatcacaaattcttcacaaacgttttcaaaaaatgaaagaaaacacttcccaactcattctataaggtattacccgcattactataatgccaaaaccaaagatgtcacaagaagagaaaattataaatcggtatctcttatgaatatggatgcaaaaatttcccacaaaataccagcatgccaaatccagcaatatataaaaaggattacacaccatgacaaattgggatttagcccaagaatacaaggttggtttatcatttgaaaatcaattaataaactttattaatagaaaaaaggacaaaaacctcatagtcataatagacacagaaaaaggatttgacaaaatgcagcaccctttcatgataaaaacacttaacggattaggagtagaaggaattccccaaccttatcaaagacacctacaaaaaaaaaccatagttaacatcacacttaatgaaagctaatgtcacactgtgtccggaattggtgggttcttggtcttgctggcttcaggagtgaagctgcagaccttcacagtgagtgttacagctcataaaggcagtatggacccaatgagtgagcactagcaagatttattgcaaagagcgaaagaacaagacttccacagtgtggaaggagaccccagcagagtgccactgctggctcaggcagcctgctttattctcttatctggccccacccacatcctgctgattggtccattttacagagaactgattggtctgttttacagagagctgattggtctgttttgatagggtgctgattggtgcgtttacaatccctgagccagacacaaaagttctccacctattgcctagatacagagtgtcaatgggtgtatttacaaaccctgagctagacacagggtgctgattggtgtgttcacaaaccttgagctagacacagagtgctgattggtgcactcacaatcccttagctagacacaaaggttctccaagtccccactaacctcaggagcccagctggcctcacccagtggatctcgcaccggagccgcaggtggagctgcccgccagtcccgcgccatgcgctggcactcctcagcccttgggccatccatgggaccgggcactgtggagcagggggaagtgcttgttggggaggctcaggccgtgcaggagcccatggcggagggggaggggcaggaggtgacagggggcgggcggtgcggagggggtgacgggggactgggggagtggggggagtgggagagactcaggcatggttggctgcaggtcccgagccctgccccgcagggaggcagctaaagcctggcgagaaactgagggcagcctcggtgggccagcactgctaggggacccggttcgccctccgcagctgctggcctgggtgctaagtccctcactgcccgggccgctgggagtgtggggcccaccaagcccacgcccacccagaactctagctggccggcaagcgtggggtgcagcccgggttcccctccctgcctctccctccacacctccccgcaagccaagggagccggctccagcctcggccagcccagagaaaggctcctacggtgcagcggcgggctgaagggctcctgaagtgcggccagaatgggtgccgaggccgaggaggcacccagagcgagtgagggctgagagggctgccagcatgctgtcacctctcaacactgttttcctgctaagatcaataagaggacttgatgtcctctctcatcgcttctgttcaacattttatcagtggttctagccaaggcaattaggcaagaaaaaaatatataaagtatccagatttgaaaggaagaagtaaaactctttctactgacagataacacaatcttgtttgtagaaatcctaaggaattcactaaaaaactattagaactaacaatacagttcagtagggttgcaggatacgagatccatgtataaagatcaatagtatttctatacactctcaatgagcaatccaaaaagatctaaataagtggaaagacatcccatgtttatggatcataaaacaatatttttaagatggcaatactgcctaaatttatcaacagattaaatgtaatctctatccaaatcctggatagctttctttttttgcagaaagtgactagctgatcctaaaattcatacaaaaatgcaagggacccaaaatagctaaaacaatattgaaaaagaataataaacttagaggaatcacacttccttattttaaaacttactacaaagctccgtagtcaagacagtgtgttactggcataaggatagatatatagatcaatggaatagaattgagtgtccagaaataaagtcttttacttagttaattgatttttgatgaggatgccaagacaattcaacgggaaaagtcttttcaacaaatgatggtgaaacaattggatatctatgtgcaaaaaaagatgttggacccaattcctcacaccacacacaaaaattaactcaaaatggatcaaagacttaaatgtaagagctaaaaactataaaactcttaaaacatacagatacatttttatgtttttgagttaggcaaattttctaagatatgaccaaaaatgcaagaaacaaaagaaaacatacataaattggacttcatcaaaatttaacattttagggtggccaagaataccatttaaagagtgaaaagactacctagaaaatgagaaaaaatatttgcaaatatatattcgataaaggccatgcatctagaatatacaaagaattctggcagctcaataataaaaagataaataactccattaaaaaatggacaaaggacagacattttgctaaggaagatatacaaatgactaataagcacatgaatgatgctcaatgctatcagtcactgcaaaatgcaaaacaaaaccacaacaaaataccaggaatgaaattgcagaggagcaattaggcatccgttaaagcctaaagattgtgaaatggcttgtccctgggggtgcagtagaaatagagacaagcagtagacagggttggcaggcctgggtgttggttaaggaagaggaaggtcaaggatcacaccaaaatgtttgtattgagaaactacatgaatggtaggtagtgccatttacttggagaaatttggaagaggagcacagaattttttttcttagcattaaacatattgattttgaagtgcttgtgagatatgtaagtggggattttaaagaggaagtttaatgtacgtgtctggagttcaaaagacaatccagtgaaagtcaggtgtggtagtggggtgagggggtgggtcagcccagggatatgtagtagaaaccttgggagaacgaaatgacctaggaaagttgctcttcctccagccccatgtagaagcagtaacagccatgccaaaatgtcaagtagagattagaggaaaatgagctggcaaaggagactgatgtcttcaaaaataaacaaggcttgctttcatcttcagagtcaccagagggtcatttgccattcatgttcttacacattaggttgattatatcttatgatctttgaaagccttagttatccagaaaaataaatgaaccctaattaaaataatataacataacaataaaataacacacaaatgggctatttttaaaagcccggcaaatcctttgaataactcatgttattcagtattgttcatagagaaaaccatggaaaattgctgttagagctgagacattcttcaagtaggcagtaataatagtagcagtaagtagttttataatagctagcaacctatttgctttgaaaaagctcaaattgcctcactttctcttaacctaggttttgaggtgtaattattctacccctttgtgtgttgcttggttcttgcctatttttgtgtttgttgtatgttgttgttttattatgtgtacacttatactttaattatagtatagtggcaaagtatctaaaaccagatgcagctgaatttaaaccccagcttttctatgtattaggcaagttagctcaccttgctaattttcatttcctaatctgtaaaatggtgtccacaaaagtatttacctcagatggctgctgtgaggatttaacaggactatacatgtagagtacttggtatgtacaagaacttataaattataacactttctattactcatctaaagccacctcatgtactttttttttcagagttgtcagtcttgttccaatttgatcatattagcttgtaaatagtatatttcccatcctaatacttcctgtccttgcccctgtggtgctcactccggaaacaaacaaaacccggtgtgataattggagatgatacctccccacaggtagcacctctgcagagccagcaggaagatggatgtgttttccctgagagccctagaccctttccttggtatgacctcatatgcatcaattacaaatcaagtgcaaaagtgagaacaaaaggacctgccagccatttgtatgccacttaattttctcatttggtttatgctgaaggttagaactaacatccaatgtctctgctctaacacccattcctaatttttcagtactagacaatcaaatggcagaaacagacacagaagcctaattgaagcacaacgttttaagaaagaattaagagaatagtaaatcattacttgcttgtgaatcatttctgtgaattgtaatttcttggattcataattgaaataattttcagctttgctttaataagctgaaaatgcaaataattaaagcatagttaatgagagtgtttaagcaatgtatgagtaactatactaaagatgggccaaaacgaagttaagggcactggcaaaaattaagagctaatcaagtaagtgttaacatatacagaggagagatatgctttcagaattcatgtttacttctgttcaaccattagaatttaaaaattatagatgtcaaagctaatcttccaaaatcatcaagtaattacatttaatattaaaacattatttggaaggggacatgaaaattcatttgttgatccaataattattaatggaatattttctgggtgactagaacatttagtgtatttgatgctgtggagatatattttatactgatttacacacagacacacacatacacacattccaaacactagaaaataatgaccccagtgctttttccataatcttacttaagtctagtctggggtagaatcagtccccttgccttttgtccacttttccaggtctgggaaagggaatatacttaaagaagagtgcatttgaaggcaatgagcaaggtcattgaacagggggacaaacattaaaggaggccatttacattccttggaagccatggtcaacactcagttatgtggaatctcttctccatgacatatggattgctctgcaggccagcctcacccacctaccgtgagtttgtagtcaaggaatgattcctataggcacaggagtgcattgagcaaaatagattcagtgaaatcattaaattgagattctgaacctttgcagaagaatcatcaaggagactgggtaaaaactaaaactaccaggaccccaccccccagagatttggattcagtaagtttgagataagtactaggaatctgttttttatataagcacactccaaggggctccaaggaccaaatttttataaatatttaaatgaaggcaaaagagtctacatatgaaatttacaacatgtaatagagggtagaaagtaagggaagatatattctcgggggaattattcaaaacaagcgaacacaaaatctgtcaagttggttttttttttaattcagcaaatatttattgagctcccatgctatgtcaaggactgtcctagcagctgaacgtataatagtgagaaaaatcaatcactgcttctacttttatgggtggagacctatgtcttatacaattctttgccacataaatatagagatgtgaaaaaattcatgttcaataaatttagataaatgttgagaaaacaaaaacccatatgtacaaagaatcaaagcttggattgaaaattctaagtaatctttatgttttattcttattctaacatgtgacttaatgcaccatctcaaaggagacacattacttcactgtgtttatgaacacgtggtcatgtttagcaggaagagaagaatgcttaatttgaatttctctgagtatattggggatgaacttaatgtacccagcctgacatcaacataattacactttctaagccctggatacatgacatatgatacggtttcaaagctaacgtgaggttaggagtaatcatcccagcccaatctgtgcctgaaatccattcccacatacatgtagctggcttatctggatatgttattcatacatccattcatcacttcttgggtggtggtgaggattattttcattatggcaattagtagtacaattagtacatgcttaaaattgctttacagattttttgagtcatatgctacgttctctatatcgattgttggcatttatagctactatgcactcatataaaattaattgctaactaggaagtaatatgaaatatagtatcaagtccaaccttcctggataaactaaattagaggtttaaaggaataaataattaattcttagaatctttttgagaactctgataagatcaaaatgctttttaatgatacgaaaaggaaaatgagtaggtatttaaaaagtaatttgaaactgttgttttttatgttttatttattcattgtacaatattagtacaaattgcacttatgattttaattgtaacagttcagttatggagctaggcaatagacaaaatgttcaagtataactgatgaacttcattaaactagaataaaagtaaagctcaattgtatatactaatagccttgtctggaactgtgtttctcaaactgtggttttagtagatattcagaagcaaaaattcccagtggacaaatctgcttgggaaacattgatctaaaacatttatttgaaaaatactgatgagttacgataatgctaaaaggtaacatgtattgactgctaccatgtgccacacatagagctagatgttttagttgaattatctcacttgatttagacttctatgaaaatgaagattaattatagctataaatgtcttaattaagcataacacaagtaaggaaaattatatgcaaagatgcttaaataggaaaaactatgtcaccagccataactgaagcattatttatactttttaaaaaataactaaggttatattcatttattgaattaatatcaaaaacattctttaaaaaaattgttatcttggtatttacagtaaatggactttatacatttttaaattttccatctagatattcaggattgtgtaggcacaaactaaatgtgtctcaagtggaaaataagttccactatgaatagtgttataattttccctttattacattagaatcagattgcaacttgctcttaggaaagttaaataaagttgaattaaatacaatacttggcaattattttaatgctattgtagtaaatggtcttttattcactgaatgagaattacaaaatcaatggtatgaattctacataataccatttcattaaacagaagatatttcattacaaataactgtatagtgtacacaaccttgtttaggatgcacagataacacagaaagataattatttaaaaaatagaataacaattctattaagtattcagtgtctagttgcaaaagggctcaccagccactattcttacagccatggaataagttgctgcaaattaaggaaagaaataaactcatggtcctaatcaaaagtgtggagcatacatgcatcaatgtaaatcagttaaaacaacagaagatgttattattccactttattattttgctcttactacatacatagcagaacttaatgtaactataagattaatagagaaggttgagtttcagatttcaaaatctagcatggtatagctggaagagattgccaacaccttctagtccagtacctcataatatgagtgagcaagcctaggcaccagagatctacttaccaaaaaccacacagggaattcagaaaaggcacacatctcatccagccagccacccaaccagccatccagccatccagccagccttcatttcatgcattcatttgttcaacaactatttattagatgcctgtatgtgctagacacttgggatgtgctatgagaaaaacaagacatgattcctggccttatggtaactgttttgattatacagagggaggtgggaaaacagtaatcaaataatcactcaaatatacacacgattacaaaccaagaggagtgttgtaaaagcaaggaacatgctctacggaaatgtataaaaggaaacctgatctaaaccagggggtcagaaagggcttctcagaggaagtatatagcttttggattgagcattaaaggagagagactagaaaaggctgtagacaccctacagaaagagtatttgaggaaaagaaagactggcttgttagtggctagaaagtaatgagagaggagcaagaagagctggcagggtagactgccccacaccagccggtgtctgtagtccaaccagatcatcatctgtggtctttactggaagagtcatggagggctacgagttttatagcaggataaagttaaacagctcccatctttgacagttttgttctcacctgggcaaataccagattcataaatggcattcaaggtataggatcttcctataagttttagtggcctgtggaaggggtaaggtgggagagatggagaatggcaatattgataaaaaagggcattgggctttggttgccttattatctgtctggtgtatctgactgcttcagggctctgtaatgaatgtttgttctgagaataagatcatgtttgaaaaacacaatggttttgaagtattcaaatatagattgaatttgtttgtggtttgtgagctgcattagattagtttttctacagaaaaccctctactcttggaatttctaagatattttgcatagatcaaggggttttcttttcttttggtctactttctttatataaaaatccatagtatgagaaaattacctacattcataatgtctttcttgagatttctgaaggtaagggttctggccaatctcatttgaccaactgggatgctaaaatacatcattgataaatcagttgaaatctgaaccaaacctatatgaggaaatacagtgagctgcataagagactgggattttagccaaacctacatggtctgtaatcccagctctgcaaggactagagttgttggaacctcatctcatcttccttctggaaaaccttgacaactcttcactgcctgaagaatcatgccccagctactctgcatggccttcctctgtaatctttatcttcctctacagtttccagccagttttcccttccaggcagtgaaactacctccctaattcttaattactgtatctacaaaaaaggagatactactattaataataatagttatgatgataggagttcaacaaccacttagcaaacagcagatcttattactatataagaaagaacagatgaaggccaggcttagaatttatttgagttgttaaccttctttttaataaggatgtatttgctcttcccccaaagttcataactctgaagaaaatacaatgagagcactcacactgaaggatattttaaatggaacattttcttataaaacattttttccaaactggatttcaggtaagtgcattatttatctttaggggttttttttatgtattttgtttggtttttattttagtgccaatacatctctatagtaactgaagccgtatcagttgaaatgtacaaaaagaacaattatctgaatgattcaagtgctcaaaaaagcgcttttgacaaaaccattcatactggatttgcgccatagtaatgaggccaatagagttttaaatagagaaggaaaagttgaaaatgcattgttgaaataatttgaacttctgtaatcacttttgagaatggtagatatattcctatttaggagaagtcacaaaaattttaccaaaagagaaattccattattaatctggataatctggaaaacagacaaatctcaatctgacaatgaaccctttaagggtcatgaaatcggtattttcatacagcttttcaaaataggatgttataaagcaaatctaatcaaataaatagtgagatcaactaaatagtctatgacattttagttgagtatcttaagtgtcactgaacaaaatggaatattttaattttttctctttagaaaataaaattaatacaaagtgagttttaagttgaaccaaacacaacttaaatgtaatttatgtttattactgcaaaagaaatatacacttcaaactagtttatcccctttgtaacccagagaaaacaaaattgtgttcctaagcaccctgaatcggctaaaatagggctgctgtttgcaaatgtggcatctttgtgtgaagtagaacaaagcattctaccttcttcctctaccaccaacttactattttacatatcacaaagcaatatgtactggacagagaggaaaaacaaagtaggtctgtgaaatagagaggtttcttttgttaggaatgtatttcatgttaagagagatcatttacattttgttttctttcttgtttaaaggacaagaatatcttcatcaatctgcagataacaatatagtactttataatattgaaacaggacaatcatataccattttgagtaatagaaccatggtatgtatccaacatcatcttccccctcagaaacctttgcccactcttcattgaccaagaaacagagttcaaagtcttagcacctgatctggacacaacttgccttcccagctccatactccactagagtcttcccgttctgtctgctagtcccattagactactgtctttgccttcttgtaaatcaactagcatctttcctcctctttgaatatagtatagcataagataggagttaagaactcagtccttagtgtcagccaattgaggttcaaatcctggctcagtcccttactggtcgtgaaaggttaggtaaggggtttcactacagcaatcttactatgcctcggtattttccttggtaaagtaggaataataatgcctcttttggttaataaaagaattaaatgaaataacatttgcaagtgcttagggcagtgcctaacatagaataagtgcttaataagtggtagctataaagtatgggcacttaactgttctgtcccactgggctcccagtcctccaactttctccaccctgaaaaacctactattcttttgaaaccaagtttagataatactctctttctctttgcaatcaataatcctctcatttgaattcaatcatttctttcttaataattttgcaattgctatattgaatctcttttatagaacatcctaatttgtagtatgttactccttagaaagtttatgtttcttgaaatcacaaagtatatattatctcttgcatccttctcccatagtatctagtaaatttctttgaattatagttaagttccacaaaatatttttttcaattgcattgaaagtctatgcatgtaggagtatgttgataatataatattcttttaaaactacaaatttacatggttctttgttatcttttctgtattctaatcaacctcttcataatttcagaaaagtgtgaatgcttcaaattacggcttatcacctgatcggcaatttgtatatctagaaagtgattattcaaaggtatcaactatttaatttggttatatccaattgtatctcctactaatccacaaggtggtttaaaaaaagtgagagaaagcaagagtctgtctttatctctaaatattcaggccctcgtcaccaataatcttcagcatgatatgtttcaatcttatggagcttgtttgttttaagcgtgaaagtgctttaaggaacagagtccaaaataatacttgcatcatttattaacaacagcacaaacatacttaacaagaaaacaaagagctttaagaagaattataagctaaatattcttatttatttttcaattattatttttaaaactgtactcaaagaaaggcaagcattttgcatcaaaaatacatgttgaatgaaattctctttacccaattttaaagggtataattagaatgaattatccagatgcagggtaatccttataggctgtggaaatcattgtggttttacttcaatacaggtaaaacatgaaaggaaaatttctggggtagagtatgcaaagataagctttttatgttaggaaatttctttggatatgctttttatggagtgagggttgaatcactgctgagattagttctggaacttgcacaaacggcacaaaagtccacagtaagactctttaaatgaagactcatttggaattgaaacatattcttcctagtgccttgtgaaagtagtccttttataattctgaactttgaattggatgctatatgattatacattattgatataagctttttaacaactgcaatttgttttttgtctttcttctttctgacagctttggagatactcttacacagcaacatattacatctatgaccttagcaatgggtaaatcacctctgtttattaatactacttaaatctaatacctagaatgttttcattccaaactatgatttggggttaagaagactttatcttcttaatgatctttgtttcttactttttagtaatacagtatgtatgtacccataaagcttacaaaattcaagaaaatacttatatgggatacccacctctttatttgactaatattttatatttttattcacaatatagttttggattttctgtttttgaagatcagattaaacatgtgctatttatggaaaaaacatatataggaaagcacaaaaacattcttggaaatgagacactatttttaggagagtggctatttcactgatgggaggaggaagggcgggagagagatgtagcattagttgtgtctgaacacgtactccattaactgttttaaaattaattattataaaaatgacaaaatgttaacattatttttaaaatagaaaaatatctgacgtgtaaaatactaaatgttcttttgaatttagttggtagataaattgtcagacaagtaccattttccatatatatatatacatataaactgtttgaaacatttaccatttaaaagaaaaaattaaatgaatgtgcagataggcgaagcattgacgaagagaatttctggcagcaagaagaatatgtaaaggcctaaaatggggagggagagcattgtgcgtttgagaaatgcaaagtaggtcaatttgtttgaaattgagggaggggcctgctgactagtaggaggtggtgtaaggttggggaacagccaaggccaggaagcataggccaaataataatgaggaaataattaaaatgagtttagatctttctttctgatgacaataaggattcattcaaaggttttaaatggaaaatgacatgatcagattagcactttagaaaaatcaccctggctaagtgtggacaatgaattgccttagctactcatcttaatatgatatcttgtttgctgttatataaaaggggaaataattatatggcttgaagaggtattgaaaaaaaatcttctggtctatttccccttttgtctagcaagagcacaaaaattttttaaaaaattatctatctacttctttcaaattttcagaaaagaattactctgataaactgtcaaattaagaaacaggaactgctttttaaagtagaatctaaaatccatctaatgcattctgagtccttcttgtctccgaatccatatcatcaccaaatttaagaaatatttattgagccccttctatgtgaaacacatataacaatgagatgcaaatgagcttggggcaccagctctactcttaagaaacgttcgattagtgagtggggaatcttagtctttcagtccagtttctcaaagctctcatcatgtctttgtttttcttttaatcattttgaaattcttttgtgaggctcgccaaattgaacagcattcaaaaagatgataatcctaatattttaatcatgggttatgtaaactttatggcctaaaatcacattaaacatttagattctctgcagtgaatttaatcaaatcactggttttgtttgtttctttgttttctgcacaactatctagtatttcagattttttggtgggggggtggtcaggtaaatacagcataatttaggaagtgaaggatggatggcaaacttgtttgagattctaggcatcgctgaataccaccaatttcaagtcttttatatgcctttgaagactctataaaaatctagcatagagaaaacaaaactactggtttcaagctaggtaggcaaaactgaggagatgaacgcctttgtaaagcatcctccctcgccttttctcatacctttagtgactcagaaaacagaaaatggcagctgtgatggcttgagacatgcgctgagatttttagcttagtgctgcttgtgtgattgcatagataattccactgtatgtagaaaactgagacaatgttacagtatgaaaggtaacatgagcactagcttgagaacaaattgtgaaccaggtgaagaatgtcttcttatttttttttttgagacagggtctcgttctgtcgcccaagctggagtgcagtggtgtgatctcggctcactgcaacctcctcctcccgggtttaagcaattctcccgcctcagcctcctaagtagctaggattacaggcttgtgccaccactgctaatttttgtgtttctgtggggacggggtttctccatattggccaggctggtctcgaactcctggcctcaagaaatccgccgcccaaagtgctgggattactggcgtgagcgagccggccaggcctgggtcaatcttttaactgggctcttgcatccctttcaacatgttcccgatcacccaggggcctggtgctcatgtactgccctctggcggccaggactctcattgcagcaccaatggtcactttccatgggaatcactctccccactcaaaactatgccatgttcccttgctacttgctaggtctcatgcaggcacctaaaaagttacatcaaggcagtgtgtgttacagatcttcacaattgcccaaatattaaaagaatgggaaaggcagaaatgtcaggcacatgttagctccaggttggagagctttttttggaggggttgggcaggagtcttttttgaggctcttcaaattgtgcttgggcggcaggtcttgctctgctttcccacgaaggcagtctcgatgaaactgttaatacaatcttcaagatgacaaaagtcaaaaagtaagcatgacatcctacgactctgcaacacttataaaagtctgaatgcattcttgctgaagaactacaaaagctccacaatgcaagtcacttgagtgcttgcagagtgactctaagcatcaaagtgagagttttggccaatagactatttgaaatttccccatgggtggaggactttacaagcttaaggcatactgcccagtatacaatccgtttttcagtttagcttgagatcagatgttcctttccttttctgatttcaagtcagatccctggggagattgtcaaatggcatcttattttcaaaaatttgaaatgcatatgcattcacagagatgggggttgtgaatgagaatgtagaagagcacatactaaacttcagcacaattatagaatttcagagctggaaggcacttcagtgaccatttcagtctagtgtgtgcaaattttacaatcccaggggttaaaaggacttgagtttaattcaaggtctgccaagaactagcaatgtggtcttaaaaagttctatcagctctctaaacctcatatttactttctataaaatgagaggactgtattagataatttctagagatcttctccactttgacagtctgtaagtatttaatccattcacctcactataaaggtcagaaaactgacacccagtaaagttaagtgacttttaagtaactactggaagaacagcaatcaacacctatgtctccagttcttcattcctgcattcttttcattaggtttgtgggtgcagagggaatgatccttaattttcattgtttgtttattttttctgttcatacagattattatttttttgcattaaacagcaaggtttgttgtttttctttctttctttccttctagagaatttgtaagaggaaatgagcttcctcgtccaattcagtatttatgctggtcgcctgttgggagtaaattagtaagtgtttaaatttttgaagtgtttaatcatgtaaataaaagaggagccatttgattttggcctttgttaaatttccctgcctgaaagaaaaaaaaatacattcatgactattttagtggttaaaaacgggaagagttttgataaattgaaacccatctgagaattccgcaaaatctcaagctcatggatagacttctttaaatatagcagtcaaaaactttatccttatactcagccagaatgcgttgtgccagaaagctcaggaaaaatatggttttcacaagtttcccagactagcttcagacaacatgaaatttggtccaagctcttatttaaggactctaaataaagattagatctggctagctattaatattcagagatttattcgactttctgtcaatatacataattatttatttggggttaatgaaacaactaagaaaataataggctttattttttatttgattcagactttaaaattcataattgatgttaatgtgagttggttggattttttgacctattaaaatggtattttagttgtgaatcttttttgtatctttattaccactctgtttaaaggtattagaggaataattaaaacaaatatacagccttcatttaatttgttgtggaatttccccttaccaccacttttaggcatatgtctatcaaaacaatatctatttgaaacaaagaccaggagatccaccttttcaaataacatttaatggaagagaaaataaaatatttaatggaatcccagactgggtttatgaaggtaagctgtattccttttctactgctaatgctttaggcttttaatttaaaataatttcatatatttagtaagatttagatgagtagtatcttatttccatgaagggtagcattgctgaaaattgtctctaggttacgaatagggcatacgtattttaaaagaacaaattcttgttatcagaaaactggtagaattgattctcaataacatcactatgaagtggtagtaatgatttataatccaaaaaagtatatggtcctcaggtgccgcattagtacattttctcatgtttactttttctttagaaatttttttttttcaaaactaaacaactgactatgttatcttatgggaacatatttttactttctgatactctgttgattttgttctcattctaggtcatgtagaattcaggacttaattggactttaaagagacttctagtctctatctatttatctatctatctatctatctatctatctatctatctatctaaactaactgtgtttttggttttttttaactcttaggagggaaatgtaactttcaatgtttatgtcactctctagtacaattatagttctttctgttttggctatcttaggtgactaaaaaacctgaaactgccctgaaagaaaaaattaattagtgccaacatgtttattatttatttaaaaaattacatttctgattaatgtcattttctaacaaggctaattgatgtttgatatagagtgaaagggtaaactattcctcttaactcagattatgtaattttttaataaccaaagtatgacatatgtcacatccacattaaataaattatttcagttgataaatagctatttagaagtatttacaatgattttaagagtaagatgtaattatagttaatatcctagtacttatttttcagaggaaatgcttgctacaaaatatgctctctggtggtctcctaatggaaaatttttggcatatgcggaatttaatgatacggatataccagttattgcctattcctattatggcgatgaacaatatcctagaacaataaatattccatacccaaaggtatgttgaatactttcagcgatgctttcattttcctggtatcaaaatgagcaatgatttaccatgagtaaaggtgggatcaacaagtttggagagcttcttatccttgagcattgtaaggcaaacattgtactgtgctctattatttatgtggacatctgttgctttggacatctggttgtgctggatgaagtagtctttgcaaaatctattgcagaatctttgaaaaacatatggtcttgatcatggaggaaaaacaagcttaacttaattttaatttttttcatatttcatgctccaaattcagggtaaagttctgttttgcaattctctcttgaattctcatgtaaatgcaaactagaatatgaaatacaaatgctgaatttgatgttcctgtcaggtagaagcaggcatgggttatggtcctttctggatgtacaagataggttaaatttataagtctcaatttctcccttgaaggaagtagacatggtgtgaacccatagtttttggatatttaacattgtagagttgttatacattctttttattgagtttcacatctggagggaggagacctgagtgtgcagtaggagaatggtcaggtctcagtgaagaagcattatatcctaatttcaatgtaaaaatgatatcagaaaaaatggaatcaaagtacaaatttacctcttgcacaaggaatcggatgcgattttagaattcacttctttgttctttggatgctattgcttttacttgccaaggggaatattgtcgtggctggacacagtgggtccctgggtgacaaagacggttggatgtggtatacacacaagtgaattctaagcaagccaaagtggccatagagaaagaaatagaattgcagacagtgtaatatttatgttaaaagtctaaaagctgtgtaaaaactctaaaagctggagatgtttgggacaggcctcacattttgggggaacccaagatgtaaaagaactcagatctttgggaggacctatgggagcaggaagagacggggaacccagaactgaagagtgactgacactgattgggaagttgggacccacattctcatatttccttgaggcttaaggttgctaaaacatctggcgttaggtggagacgtgagaccatcccaaaaactaagggagtttctgataaacttgggagtgaaacggaggtcctaagagacgttgaacagttctttggatgaattcaaacagcactgagtcattacatactgtgcacctacatttcatgaatttaaattttattacaactccaagattctctctttctacagcaaaataacagaggaactctaagaaactgtctaggtatgagctatactgtcatgtaaattttaagcatacagtagtatagaaagcacaaaacaagaaaagtataaatctcatggatacttcatttggaggtgaaatttccctaaccttttggagatggtggcagtaataatgcaagcaggtaggagactgagcatttggtgattgtcctagaccaaatcatatggcaaaagcaaaaagtgtctttcatttatttttctttccattctcctctcaaattaatcaccctctgaactctccttggtatacagattattataattatcccaataataaaaatgagagagatctgtcttggaaatcagaaaacagaatatggttcacagaactgcattttcatatccaaaatgattttccctataaattttaaagctctctcattaggcagttaaaacacatagttttgctctggttgacacaacatttgtaattgccctgcaggtaaaattgaaatgagattccttgtcgtgttataaatagaatgtattccacagtgatatacataagattgttcgcttagaaaaatatatctaaattcctaaagtttctttaaaatgttggtgataattggaattttatgagcttatatatctcaattttcttggcaggctggagctaagaatcccgttgttcggatatttattatcgataccacttaccctgcgtatgtaggtccccaggaagtgcctgttccagcaatgatagcctcaaggtagttcatctcagatccctcccatctttctatcctatattctagtgcatttatgctgtgcatgctagaagcaaaaacaaataagtagataagagttgcacacaaagctaaagacatacaaaattaaaattgacaaataagtttccttaattggtttttcaaaattagcccttttacacatataaacgtgacctcggtgatcaatctcagtgaaacttgcctcagatgtacagatgtgaacttgggaccaacaagcagacagtaaaattcatgtacgtcctcaccctggcttctttcaagtttggctgactttatctcaagccagggtttgtggatctatgtggatcacatgtgtatgataaataagagaagataagctgaccctctccaaaaattagcatttttcacaatgaagcaggctattctcatttatctggttttagaattgtctagagatgaactgtaggcaggcagggacgtgaaggattctcacttccccagcatgatgccctatgtctgattgtctgactagtccagaatacagtgaccttcagtcagtcctctgtggtctttctggttgaagtggctaaggggaagaggtgcccaggccctgcctgttgggctttcttaacagttccccatgcctagcgggccaatcttgggtcttccccttctgcttcacgaagaagagccaagctcaaatgactgatcactaatagggaaaagaaccccatgagaggcttctactgggccttgctgagtccactcttgtataatcaaacatgactttatatttttgaattatctgctattccccaccctgatcgagtcgatgaaaacttgactcaatacatcatttttttttaaagtgtcattctccacaggtggcagatgaaatgagcataacacaaggagtccagaggcttgtttgaacagctgtaaaatactaacaataaaatagtagtagcaaacgtattctgaacactcatcatgtagcagacatagttcttaagcggtttaagcacgcggccaatctttacagcactctttaaaataggtaatattattattctgattttatataaaaatagaagagttaagtaactggcctaaaggtatataactattaggacataaagccaggatttgagcctgaggtcccttccagctttgtgatttcctttacattaattttccagaagtttgtgattcattttatgttgatgttctctacctactagttcatgctcagagtcatggaatcatcgttgccattcactgacatctagtatgtgccaaacattatttgagttatttcgcatacatcatctgtgatttattccacaagtctgaatttcaatacctgaccacagtcacagctaaaacttagcttccaacatgaatctgctgagagacaaagattatccttttatcacacttgtctctctctcaactaattataaggtgaaaaattgagtttacttgtgcaaaatgcaagtttaatgctttttttcccctctagattgatcagtagctttgacattatgttttaaattcttttctaaaatgttaaaatccagaaacggggagaaaactcacatatgaaatgatttcattagatgaagaaactctcatagatatttttttaagtaagtagagatatttaaactttctctccagagaaaggaatgttttgtcttgcttacctattaaataagtaatgtataataatgacatatatcctttagaaaacaaaaattaagaaattatttgtgtgtgaaactggtttatggttgtgactacctgtttctattttatttgcagtgattattatttcagttggctcacgtgggttactgatgaacgagtatgtttgcagtggctaaaaagagtccagaatgtttcggtcctgtctatatgtgacttcagggaagactggcagacatgggattgtccaaaggtagggtatattaagatcacagatacgtatttctgaagatcaaggcacaatagtggggactcatccatagctaacattttatgttgtaaagccaggattactgcattcaactgccaactgctttgcaaaaacacactcagtattcatgggtccatcattttattaaataaataggataccttttattttcttgaatgacgtaaaccttgaaattgaatagccaaaaagaaaaaatgggacaacatgacattgggaaaatcagatatctggttctcaattataatggtaaaccagccctttgagattataacattggcagtccaataaaaagcaaaataatgcagatgaaaccgaaacatgggtctactagataaatatatatgttttaaacaaaagaaccagagaagaaatgcaaatggggcatgttctattcaatgttaaaaattaaaaattaaaaattctaaaggaaatggatattatcaaaagaaagccagatattctgtttttttttttgtttgttttttgttttttttgtttgtttttttgttttttgttttttttttgagatggcgtctcgctctgtcgccaggctggagtgcagtggcgcaatctggactcactgcaacctccgtctcccaggttcaggcgattctcctgcctcagtctcctgagtagctgggactacaggtgtgcaccactaggcccagctaatttttttatttttagtagacacggggtttcaccatgttggccaggatggtctcaatctcttgacctcatgatccacccgcctcagcctcccaaagtactgggattacaggcatgagccactgcacccagcccaaatatttttattttaaaatcaaatgagaattactgagaatgtgacataagatattagatcaaattattctgttacctggttatcttaggacagtacccgacatgtactaattttgggcagaaaaagcctttaaaactaagcacagatttattgttgagttttaattgtttctattactcaaactcaaacataatctgttgaattaatgagtcagaaaaaccacttaaccaatgtataagctttaaaataagcctgttcttaattactcacattagaatctaagagatacaaaatattttctttaaataggatatttgatgggtacattttgtgagtcttctaattatgaagaaatgtttcattaaaacaaatatagaataatcatattttataaagtaaaaagaaaagcacagaacaaacaaagtaaatcactaaatttcatctagaaattaggacattatgttttgcaagaaaaaagtcatatgagtctgtttggaaatatatcaggactataatagtcaacattactcaggctaaaaatatttctttaaatcactactgtgtctgtgagaggctcgactaattttgatggaatatgctagaagcgtatttttatcttatatatattttgatatacaaagcaggatgattttggctttaatacagtatcataggcaaagaaaggatagactaatcttgattatgctagttaattagaaacaattggtctggttagtcagctttgggtgactatatctttaaacttttcaatgaatctagctattagggactattgctttaattttattagtttgaacataatgagatttataatttagacacaatttttagctcctaaaactaggaattttaaaactgtgattgctttgaaatctgaaattctaatttatcaaaatctgagacaactttaatccaaactgacagaacatttaagatgctcattcaatgaggtgtggaagtccctggaatataaactttagttttacagccagaaaacagtgcttaaatttagaatatcatgtttgaataaccttagaatttctaaacacctctgtttcaaaatagtttgataaatacatgcaacacattttgagatttgagaacaacagtgtcgaatttcccagaaaccatcctcatgactgatgtgtgtgtgtgtgtgcgcacacactttgaaaacaatatttaaggttaagtgacccggcaacattttattcatgctgagagtcatgccccaaacaaagaggcaaaggaaactggcaaaaatgacttgtaataaaattatattagtgagatttattaagaaatttatagttaggggaagaaacatcttttatattatgcttcctcctctgaaaagggaattaaaattaattttacttttatggctaaaaataataaatccaaaaatttcactattttttccgagtcttatcttacttgttctctctgaggcattggtctatccctgtaagagaaaatccagactgtgttcttaaaatttgttattcccctgccttttatgacagtacaccctctcatggttctccttctgcttcattgactgttcttttcctttccagctcttcttctgacttctctagaaatcttattattctccaagttaatgtatttgcaaggtaggctaactgctataacaacaacataaaaacctccaataattcagtgggttaatacagtagaaatttattgcacattcatgtaaccatccaatagtgagtccaggtaagtggggtatggtgggggttggggaatggtgcactctgcttcatatagtcattcgggaacctaggtgatggcatttctgctaactagcttccaacactattccaaagttggtcaaacctgagcatcaacatccagctgagggatggagaaaagaatgaagggtaatgtaagagaggcttttatgggctaggcctaaaagtagcatgagttatttctgttcacacaccattgactagaacttatcaaataaccacggtcaactgaaggaaggctgggaaatacatttcctgcccgtatccctagcaaaaagaggaaatggtctgctgattatcctgctgtctgtctcaactctgtacttactcactttgggtaattttaatctataccagagctttttggtatacttgccaataactctcagacttatttctgaggatttgaacttttcaatatgtgtggcttcattttctctgttctattctcactgccatgagcttgattagagtctttatcattcttttcccaaacattataatagccttccagttggtctctctgcctccttccctcttacccacttctagtatatcctctgcatcatgttcataattatatgttccaaattgtgaattggaagaccttcaaaagacttaccaaacaggagaaattgaaacttcttagggtgccataaagtttctccaaaatcttgctcataaacatgcattctccttcatcttctaactctttcctgtagtcactctccactcagccatactgaaccatctgttgggtgactaagcaggtctggtctctatgctatttattttacctagaatgttcttctttttctaattatttgtctagaaaagtctattcattcttttaggattactaaatgtttgttcagtaaatgatcaattacattatgctaaaatataacccaaaataagattcagtgcaaattttaaaattttagctacttcataggacccagaaaagaaagaatttaactcaaactccactgttttacctacaccacatcaagtggattgtgctgggcctccatagatgttgtgataattccaagtcactgcctcatggaagatttaggcataattattaaggatctgcaataaaattacccatgtatatacaacagtgctgttatatgagatttttaatattgtccttttaaactcaaatttgaagttagttgactagtaatggtatactctgatcaggcagcttaactgtttccaaatgtccagattacatttaggaaaaaaatgttctcctaatactatgttcgatgtgatcttttgtcttttagacccaggagcatatagaagaaagcagaactggatgggctggtggagtatgattttgctatctttttcttatgttttaatgaaacttgacagattctcagctatcaaaggactatttgcaatgtacccaaactggcactacttattttcatagaaaaagtagcaaggtataaaacacataggtagtgatctcttgagtgattttgtgccggacaatttcaatgtcctttttagaattctattgaaaataactcatactcctcatgtcccaattttaagtttgtcaactgaatccttggtatctataactaatattactttttaaacaaatacaatatagatcattgttcaaaaggagacaaaatccctgatctgttaaaatcatcttaataattactagccatttaaatccaaaaaaaaatacattgggtatccttgtaatttaaagacaatctacctcttattaaatttcatataacatgtactaaatttcatgtatgtatactccttccagtatttaagtaatgatttggtatcaaataggaaaatgtgtgtttgttacttgtgatcatttatatttggaagtttaggataggtttattcaataatttatgaggatttttaatgtaaaataacgcttgaggtaaatagcaattgtattttatatcgtatatgaagaataaaaattaatacaagagaataagtgaaggttggtagatgctgccacttaccacaaacacataattcaattcaattagtatttgaagaggaaaggctacttctctaagatttggacgcattatgcaatgaaaaaggaaactcttaggacctggtttaacacattagcccatgatccaaggacaaaaaaaagtcagaaatcgattctaagatgataaattatataaaaatttaaactcaaattggctgggaagaagataaactgtaaagtgataatcttcaaatattaaaaactcttcattgtacacttttctggatccagttgattttggcttacatgctgtttaatttatactctgccgttaattaaagatactgcagttttattcattaactagggaatagttactttatttattatatacaataaatgtaaattacactctgaggtaacaagataataaagataagtatgtaattcagaaaaaaaaaaaaaccctcctatttgaactcacttttcctactgtcctaaatatcacaggaaaaaaagagtagtagtattcagtgaaagaaaagtattctctaaattttatgtattcttaatcaatctgaatctcacctttcagaaaggtaattcttagatcggtatttgaaattttgaggaaaaaaaatctaccaattcactcccattacaaatatttctagtaaagaacgaagggaagaaagaatgcttgaaaatattatttagtcatgttctccaagatgatactataactagatttactatacagttatatgaataatgtacttttatatcaacaatgataccaacaaccctttcaaagacattatcttgagcatctataaacatttattttgacaatgctgcagtgttcaaaacactgaaacactttagaatgcatcttttgaaagctcatatttataagcatcttcagtatcttaataatttaaaaaatctgtattgcactaaacttgcattcccatcaaattgagctgaatgaatgaatgaattgcctgcaaagctttagaccttttttttttttttaagacggaatctcactctgttgccaggctggagtgcagtggcgcgatctcggctcactgcaagctccgcctcccgggttcaagcgattctcctgcctcagcctccttagtagccgggattgcaggcgcccaccatcacgcccagctaatttttgtatttttaatagagacggggtttcaccgtgttagccaagatggtctcaatctcttgacctcgtgatccgcctgcctcggcctcccaaagagttgggattacaggcatgagccaccgcccctggcccagctgtagaacttttttaaaaaacaccctcagtgtcaggagatcgagaccatcctggctaacactgtgaaaccccgtctactaaaaatacaaaaaaattagccgggcatggtggcgggcgcctgtagtcccagctactcaggaggctgaggcaagagaatggcgtgaacctgggaggcggagcttgcagtgagcagagatcgcgccactgcactctggcttgggcgacagagcgagactctgtctcaaaaaaaaaaaaaatgccctcagtggaggcacatatgtctcctttgagagaagatgaggtccttacattaaatcaaaaatcattcccaactaaatggcatgagccaccgcgcccagcccagctgtagaacttttttaaaaaaataccctcagttgaggcacatacctctcctttgggagaagatgaggtccttatattaaatcaaaagtcattcccaactaaatctagagagtaaatgagttacttatctgggacatgtgattttgtgccagatcattttaatattcatagttttataattctattgggaacaacttatttttatgtactaatctcaatctcttaacatgtattcagtagtcagtaaaacttctaaattccagaagagaaattatcaaaaattatttgcaatgattgttttcaagagtcagtttacactctcccaaggcacctgctttaaatggattattaattagcttttgtaagttctgacatgccttttgaaaaagtctggccacaattttatatagccataactcatatttcataatatattgtatatttaatagcttcctttgacctataatgaaactagtgacttaataaaattaaccagaaaaaactagaaatgtgtatgtatttcagacattcattcaagtaacatttatagggtctttagataaagtatacaagctagtcgtattagtataaattttaaaagctatttttgatatatggtttcttttgagtttgtcagagatatttaaaatggaaaaagactctcagaaatcacctatgaattagaaaagggagattaaatgacttgctaaaagtaaatgatctgttagttgcaggcacagaactagaaaataggtttcctgcgaactttacttaccacttttttcctccagcactgacacatccagtcctttaagttaggattaataacctaacttcttttttggtattaatcagaaaaaataacaaaattgcttttaaaacatgtttgttttgttttgctctgtagaggacagaaaagtgaagagttaatcaaaggaaactagtgcttcattccttaaatttggagaacaagcactgaaggcatcatgcttagactgcaaagtcacatcaattattttaaaataatttaagcaacacactacaccgtctttaggcggctggcaaaatcccttggttcaaaaaaaaatgaattttcttcttgatgcttgaaagcttgtgcttttgaccgaatgtgcactcagtttagggcatccgctttaggtcatttaacagctatggcaagatattacatggcggtaaataatgtcaccttccaggtaaaatattttaaatggctttgcacttcatatagagatgagtaatctatcagaaaatctaagcataataaagaaaccagtgtaagggcctcattaaaactgaggacaacttggtgtgggtgcttatctagggtccaggtgtgacttgcaagaagcacttaactcagaacactttatgggcctaactctagcaaaatgaatgtggacatatttcacactctctttacctcacccaagttacctgttcatctaaagcagctgtcttcaatgtgtgcaatgaaaggggagaagataacagtctttgcttatcagaaatattcttcctgtttgcctgattctaatatcttaaaacataacactctgccctgttttttttattttcaataaaaatgagatgctaagttttaatctagaacaaagccctttaaaaagtcccttatctaactgactgcagcttgcagacaatttttctttttactgtggtaccttaaaaatgttgtgattcaggttttattttagtgattaaggcaatgtagaaccaatttttgtgtttcacaatgaggaataagaaggagacataggccgggtacagtggctcacaccttaatcctagcactttgggaggccaaggcgggtggatcacctgaggtcaggagttcgagaccagcctgaccaacatggtgaaacctcatctctactaaaaatataaaactagccgggggtggtggtgcatgcctgtaatcccagctacttgggaggctgaggcaggagaatcacttgtgcccgggcgacagaggttgtgatgagccaagaccacgctatttgcactccagcctgggcaacaagaacgaaactccataaaaaataaaaaaataaaaaaaagggagacattataagaggttactattaagtatgtatattatcatttagctaagagggtgaaacttcattctgaaatgaaagaaggattttgtcaaagacttatagtaataaaattttacccacaaaattgttaatcagagtttcctattcctgggcctcttggttattaatttcacttggaagcattagtctcaatatgcaaaatcctaccaaggttggtcttattattaatgaaactaatgtaggaatcatgtagaggcagctgtttctcattattccattttttcattttaaagaaaactttagacaagttaaaagtagtagagtttatttgaacaaaaacaattcataaatcaggcagcactcagaaccagaagatgttctgagagttctgcccagcaatgtgagcagccaccttttataggccaaacgcagaagcaaggtagataaaccactggttggctacactaggagtcggcctcattgggtcatagagtgatgaggcatctaccttatttggatgtggtgtgatatgatggctgcctatgattggctgaaacccttttgctggactcgtagttaggttttggtttgtatatgtactaaggttgtgtttcattatataggaactcaaattatagagacagcctcaggttaatggccttctgcttatttgatttgactgatttattgattctaggtaaatgtggtgagacttagggcactgtattagtttcctagggctgctataagttatggcaaactttgtggcttaaaacaacagaaatttattctctcgccattctgaaagctggaagtcggaaatcatggtgtcagcagagtcgtgctccctatgaagactcaagagaagaatcctccctgtctcttccagcttctcatggctcctagaaatccctgagcattgtttgtttaacagccgtatcactttaatccctgcttctgtcttcacatagtcttcttccctgtatctctcagtgtctctttgtgtcctccccacctatgaggacagcagtcattagagttagggccctctttaatacacatctttactttctcccttgattacatctgcgaagaccccatttccaaaagggtcacattctgtggctccacgtggacatgaatttttggggaactcagtccactaaagacatcacatcaaattagttgcattttaatgtcacacagttataattatttcatgagaaataatgatcggttgcatcaaaaaggcatcaaatatgaggtcatcattaaaggagcctacagtgacttcctccactcttttcttgctctacaatgggtctcacattaggtctcaccaggataggtctttgtagctaaaagatactagtagctttttgttgttgttgcttgatgcagttctcatgtggagggacaccaactagagagagctggctttaaatctgctctgcatgatgtagagtagctctttcctcatggaattcttttaatgatttgccatcatttcaccaaacaatgaccaatggggaaaaaaagtcagcaaatgtaagacaagtcaattaattttttaatgggaaaaatacgaaactattttctaaaatttggtgtaagaacatttgcagaatttcagttatatctatcatttagaatgttgaggtgtggcttgttctgtttcaaggcacactaaagagcctagcgtaccttaggtagttaattggttcccagcaagttctgcatggggttacctgttagaggtcaaaccagggcattgaggtcagtctgcagtcggcttcctgtgctcaaggagtaaacctcccccaacataggcaacttttttctctcaagtccagaagcccctcctcaccattaaaaactgtggctagcaagccatgatcttttcatcttttaaatgtcttcattgaatcattgatattgcatgcttggcatcagacaaatcaagaattaaaagaggtatagtcaatgagcatcagactttggtcaaatacctcattttaggtttggtttcgttaaatatcaacatgcgtttgtgattcttttaactccgtttcaaaccacataaccttcgacttaggaatttaatcaaattaagcattgtaaatccaggggtatgcagtagcagccaagcagtggtcggaatgttcaagtgcctgtcagaatcactacataagctgtttatctgaaagaatgggatttcagatgtgaatgacagaagacagaggaggcgagacattctgattcctataactatgaccatacgtcgcttttatatattaaaacaaaatctatggttttagtttggtttgtcttttgaacataacctctgctaatttttttcagttctttgtttcaacaccagttttcagctatgatgccatttcgtactacaaaatatttagtgacaaggatggctacaaacatattcactatatcaaagacactgtggtacgttccttccaagatttatctcctcaaagatcattcacttgaggttgctcaaataacgctcagtttcacacaacataatgtttgtctttttataggaaaatgctattcaaattacaagtggcaagtgggaggccataaatatattcagagtaacacaggattcactgtaagtattgcacgaagcacgatgcaccattcaggttttaattggcaccgatggacataaatgatactgtaccaactctcttagttaagaagatttttgttactctataattcagacagttgtgagttcatttacgattgcacatttttaataactagtcaaaatgatttccttttggaaaaaagccttcagtaggtgataatttctcttctgatatttggtaggcaattatataaaaagtatacaaattttaagataataactcgttctaaaggcaaattttacccttcagcacttgaagcaatgaacaagtttcaaaattccctggagggcagcccatagatatggagcatcttttgtagtgattcattgttatataagtttaacattattatttataacaactgtcatttatggagcaattactgtgtaccagatactgtaaagtagaaatgattatcctaagtttgcagatgagaaaagggatactcataaaatttaattaacttggccaaaggccacagttagttagtagcagactaggattcaatcctaaagcattaaatctaaggctgttattatcaacctgaacatgggactgctttcttacagttctttcctcttcagtccattctgcatactatttaaataaaccatcttcaaataatcatttatgataaaactgatctaatcacaaaagtatactttctttctataatttctaatacagtctgcatctagggatcctctcttagtgctgaaaatctgccagctattagctgaaattctaggagcaaaaagatgaggaccattagtccaggctcatggaataaaagcctgtcggaaatctattacgaatctttggaattctttgaatggagggcaaaggtgtttggactttctttggagcagtcattaaaatcactagagtaaaggggagtgacatgttcaaaacaggtgggagattcatttcaggcatgatgtgttgaggaggtggggaaaaactgaaggcggaggtccctagctctggtcataagaggcctgaactagaagagtggcaatgtaatagatgctctgaggacaaaactgcacctccttctttgtttgcgtccttagcacttagcacagcgcctgacacagagtagttcaatacacattctctaaatggaagagagaacagagtagatggtaaaaacagatggaggctaaacaggactggtgaagggagactgtcaggaaaaagagagagaaaagagacaaactggacctggctgcaagggttagagagggagacaatcagggaagcttccacataacaaggaagtggccgggggctgttggggaaagatcctgagtcctttattcacagatagttttagatgatgtggggagggcaaggaaaagggatgatgggagtcatgcaaagttataaagatgcatagaaaggtgttagtttaggaaataaatttcgtgctaaaaacgagttgtattccattgcttttttcttctacttggtgctaataagattttcatgatacctgggacatagtgagaactggactgcctaattgtcctaagaattcaaccaaacttcggttatcccaaacttttcacattcgtgggggaaaaataatgacagtttctgatactcagatgaacatacagcagagtgaaaaccatgtcatgaaactgaatttcccacttcatggctattttaagacaggttggaatcagaacctggatacttaagtaaaagcatgttctcttatgacttcttttgcatctggctaaattgacatgccctgtgtgtggtatccagtgtgatatcctcaatttgtagcaaacccatctattgacagggcttctataaaataaattcaaggtgtgttcagaatcccagataaaattaaataacgtagtacagagaaacaggtaaactgttcttaatcataaaaaagtcaaggtatgatattaataaaatttcctagttgattttgcatgactcataatgaatcagaatataatataataaaaacagtattcagcataatttaatcttcctctgatgatttggaagccaggataaatgtgcaaagttcagttatgaacagcagttatttgtgtacttaagcaccaattaattgtttcattagataaatgcttacctatattgatactatattagtattaatactaacaatcctattatcacttatttatcaatacttaataatttctgaatatattttcaggttttattctagcaatgaatttgaagaataccctggaagaagaaacatctacaggtaatttatgtccattcattctggtatttctatgtgttgatattttaatataaaaagtcatcatccccaggagatgcaaaatatttttaaagtatggcacataataaaaatcatttatgaatttagagaaaacatttggagaatgggtataaaaaacacacactcgcaaaatgttagccaattcaaaatatttgttttcaaaaggaaaaaacaagaaattctaatgtttacatgaatactaaatactattctggtactaaacactttaagtacatatagaggtaattgaggacatttctttatttaacacacatttgttgagtacctagtatgaaccaggcattgtttttattctgataatatgtgatttccttcactctgtctcactttggcaccacccatgtctgttcctatattagtgtttacattcagtccagttgttcccttgaggactgaaatggtgccctcgacagccctttctgggtgtggaaaggaaagcaatagttactacatgctggtagtctattatatgccaggcaccttttaatctgacttacatatgtaatttcatttaattccaacagcactatgaagcaggtaatgttgttggagccaggatttgtacctgggcatgctgatctctgagcccttgctgttaactgcctccctaatgtttccaaagttccacccgaatagggacatatgttaacatactaaccctaacagaggaaataagaaattttccctctgtcatattcccctgttccctcctggatcgtgatcttactttatgtgttaaaaagaatcactctctgggtccagcagtgtctctggcctggccattctctgccatgcccaaggcaaagtcagggacagcagcagaagaaactcacaggttggcacaggagaccctgacaggcaccatggggtcctgacctgtccagaccctggcatgacatcctctaaactcctccacatggaattctgattctgagggtgtcggataaggtccctgagtctgtgtattgaagccaatcaccctgctcaggaaccacacagatgactctgcagggtgagtgtagggccaatgtgggcagtgcagattggcttgtgtagactgtgtggagggggcattcccagcctgagcttccatgagcccaaatttcctgctgaaaggaatgaaggcgcagaaggcacttagaactgtaatttcttatttccaatttgcttattattaatttccccatcctgatatatggtaagaacagggactctttcttggtgatactgccagattttcttgctatgttttgccatggggtggaaacagagagatagaaagacgaagaactatgcattcccaagcactttgtgaagtgtaagagatgaatggttatgggaagtgactacctcactgccatttgaggtgttagatatttctcccactccagggaaaccacatagggcttcttcctcaaggtttgtgcctattaaggcaaagatggatcaaaaatcaagctacatcaaaatactgtgattcccctttactttaaatgatattggcaacagaaaaatagagtgggtttgatgtcaatatgtaaattagtcactttacatggagtagtacattttgataaatacaatctcaaaatttcagcttagttttattttcatttccctctagaattagcattggaagctatcctccaagcaagaagtgtgttacttgccatctaaggaaagaaaggtgccaatattacacagcaagtttcagcgactacgccaagtactatgcacttgtctgctacggtaggtaacggacctcacataagcacagcatccccacaggcatggttgtcatcctcctcacctctatctgatcaattcgtagctacagttaatgagcatttgttatatgtaagaatcttatcttgtgcttatagaaaaaaaattaaaggaggataggaaggtattattatctttacttttttgcaactgaggaaacagagtttggggaaacagggtaacttgccaaaaggtccgcactgcagctaagcatcagccaggactgaagcaagtgctgttgcctctaagtcccatgctcttaaccaccacattccacagcactaagactgcgtgcagaggcaacccgtcagctaggcttcgcaagacctgagcaatcgcagaaaaagaaatgttctctgataaaatggttgctggacttttggccccctttgcccagagaaatatcaaactctcacatccaggggaatgaacaacggcttggaaacccgagatgcccacgtcggaggtcaatcattcctcaaactgtagtttcaatggggatagaagatgaacctttgtcctttctaaatttggaaaacatcgtaagtaatgcatcaaatataacaaaccataagtaataaaatctacaaaacatttcctggttgtttaggacatacgtacatttaatgaataatttctacccatataattttattttatgtgcaaccttttatctatatcttgagcatgtggcaaacaataaaacaggttaggttaagaggccaatatagatcaatgaaatatattggggtctaagtagtcattatggagatttggaaaactgactcgggaatctctaattctccaatctctgtcacctccctccagcttattcctaatttggggctgagagttagagtacttggaaaaaggtattacaaaatgtatgctaccctcctgttttggtatcagctcccctggtaggggtatgtggcttaaagaacaaatggaatctttgactgcttgatatccctattcagttgcagaggccctgaagatctcataaagggaaccagaatgaaggctaccctaacatgccacttccctcagtccagccacctggccccggaacctgagctgcagctcatttgactacgtggacatgaataagcattttaacccaaattctcccttgaagatagcacaaagatgtcagtttgaaataacactttcataaaatgtttggtcaatggcatctttgaaatgtcaagagattgttgttcatgaccatatgtgctgattgtggttactggcatttaaaggtatacattaaatgtccctctcaagttatatgcaacatttttcaacctaagctatatatttatgcaacatagattgaaagcttacatgccaggcacatagtatcattgagctaactatactgagtcatctgtttatctatctttttctcctggaaggcaggggctacattcttttaatctttgtatttctaagaccaagaagaatgtctaatacataatagacattcaatgtttgtggaattaacatagatatgaggtaacattgctgtcccttgcagtctaccaaaaaagctggttttatgctgatgcatttgctgatgaatgcatcagtgacactacatttacatccatgcatttatatatgtatgcattctgcatttgtataatgctttaatgtttttggaaggcactatctcacattttgtattacgttgtcttcctaatatctacttgagcctgtgtgcccactgaagagatgaagaataaaagcctaagctctcatcaaaagttggtggaagagtcctttctagaacttgaatcgcctgacttttccaccactcactcttcctcggcagtatggtaatttcccatttagcaaaaaatatactgtgtgggaagcatcacatcgtctggtgtttttgaagctccagtaaaatgagtcactgcgccatcataggaaaaaccttgaaatctttcccttcaggactaagagtaaagcctcattatgtaacttcaaactctcccgagggatggttagtaagtcccagatgataggatcaaaacaggtaaaattatatcgatgatgctgatggaacaaaagcatgcaaggtaggcttctcaaggtctgatgtttaggccactaggatcacaccttcatccagtgtcaaatacagtcagtcatttatctgtctcattttttaggcaaaaaaaaaaaaaaaaagatatgcaagtttccattattgaaactacacactcatgaaaattccacagggtagatgctggttgattagagtctagaaatttatattcatgtctcatttctttgcatgctggctgaaaatgtaatatgtgtatttgtcctttttcataactttgatgaaaaactggccaaaatgaaaatctctgcaataacattctataaaattctgagattccacacaggaagttttgagtcttgagggagcctaataaatactatcctttttcctcatttccaaattagactaggattcaggcaggaaaccaaaatattatctttacttgtaaaggctagttggaaaatgtggtaaagctgtgtggtttcccaatattgcatcccagaattatacttacacaaatataggtatgacagggcagccaccatcttcctccatggggcttggcactggcacaggtacagcactgaggaacggatcaaaagcatgttctctgcaggcagaaagatgccagaagaaagacagaaggagctactcatacccaagtcttctcagaactctacaaaaaaatcatttctcctctgcttagcatgagccaagcatgctactttaatgggttccctccacatagaaggtagcatcctcaccctatctggggggggtggggtggcaaatgaacatgtacctccaacctccacatttgttgcttttaacctactgactgagcaaatttatgcttaaaaggtatatttccagacattatttgatcctgtatttcaaataaggaataatttgtttttaattatttgtagatcttgctaaaaatggccagtttctgcatagagaagctgaatgcatgttggaatatgtagtggacactggtgtgccagccagatcccttcatccccatcttcaggactgactcagtcatttcttcagctactgagagtgctagtggctgacaacttacagctgagcacgccccccaaccctacctccccccaacccgggagaagagaagagttttctcttctcccgggccacatccaatgctaggggggtaaagctccatgctagggggtaaaagtcagccttgttgccccattggagacaactctacaagctatctaggggtctctatgtgacagcaatgacatccacctttcttccctgccctattcttcctccctttcccccacaagtgtgcatcccaataccacccccacaaacctccttccaagactgcttcccagggacctgccacagcatattttaaaaggaagtatatcccatgtagatttctgcatgtattattccatggaaaaaatactcgattttacccatctaaataagctgaacattgaaccaagaagccagattgaaaatacaatctgggtactggtgaaggttgtttgataataaagacacagccaaaactggcccaatacagcatgacatcttcccagaaggccatttgtcactgcagcttctggggtgcatttgtgtaattcgatattaatgattcaggattagtcttggaaaagtgcacaggcaaggcttctttcacagctgttctttgagtgggctttgatctcatgtattgtttaaatgtgacttagaagtgatgttttcttctctatggggaaaaaaatagctgcagaattaaaagatgtactggcacttgacactaatcacaaatactaccagcagcccgtcttgaaaaggaattgttattttaacactaagccatgattttgttttcatcctgcccacaggcccaggcatccccatttccacccttcatgatggacgcactgatcaaggtactctctcttgcatgttatctatcttgtctcaagtaatcctgaactctctgtgatgctccgctagagaaagcaggacagtttctccacaccaccaaggggaactgcgatggaatcctgttatcacatcacttattattgcacagatttggatattatttgggtcaaatatgatcctatgaaatttaataattctttgcagtgagaacctggcataacacagatagatgagttatatcagagggtttaattctatcttctccaatcagccttataaaaagcacagattagaattgggaaaaaacttagcacattcagtacgatcttccttccaaaatagaatccctagggtgtttttttttttttttcctcagggattgggggtagggggttgtttgcatgtgtgtgtgtgtgtgtgtgtgtgtgtggtaacatcccaaactggaaacaaattctacatgtaacttcttcagttcagagcagagggtgactgtcacaccagctttttttgttttaacagctacatcacattgttgccacgtatgaacgccctgaaatttggaggctctttccattttcaactgctatcaagacagtcctcctctatcctgtatttgtgatattggttcaaaatagttcacatctcaaagacgaccagttttgctcgcagcagagttgtccaagtatctaattgctctgatactcttcctgctggctctccattatcttttgatttactattaaacaacattatagggttggagttgttggaggccagggacaatgaggcagatgccactttcttcagcactcatgcctgcgattgtccctggacagctttggtgacaagtcaggagactgccttgggattactttggctgtcagctcaatggctcaagtgtaggtgaaaataacaagaaaaaaaaacaaaaacagaatcaatttgggaactctggacaggacaggcattgtgataatgggactgtgaatttagtttcattttaaggttttttttgaaaccttgtgtctaataaggaaatacttttaagaataacagattatatttcttaatttgaccatctcagtcagtgagattgatttcaagtcgacaaggttttgttttaatagaaatcactattagcatataattctcatcttttcaagactgcaaaataatagccagcctttctttttccatagcatgaatttctactttcttgagatccttgttagattcctggcagatctgtgtactgattttgaagctctattacttcactcactatttacaaaataggtacgccctcagatatgtcagatgtaattaaataagtaccaacagaaaaaatcaaattctttcagagcacagttccacaacttacctaatgtgaaattattctcctatgttcattataaatacggattcccaggacttccccaaagattttaatgtggtacgtcttaagttatgcttggaaatttgtatttttaatagtaaatgttcagctgctgttttggagcagatgctgtgtctcttatttacattgcatttggtgtcagcaatctcattcaacaaatatttatggaacttctaccacattaagccaggcactgtgctaggtcctggatctatctataaaataaagagatactgggttagacgatgtccttgtcctcaaggaggttatagatgagtggggaatatgaacatggaaatgggcagttacaatacagtggggtaagttctaagataggggaactgcagaaagcctggaagcacacaggaagagcagctcatctgggtttggggggttaggaaatgtttactaatgataactaccacaaacccgagactcatgaatatgaagtaggtgataatgctatttggatgattggcttgatactaatggttttttactgaaatagaggagtcattgtggagatcaggttttgggaggatgatgaattttgttttaaatgttgagcttgaggcactgatgagatacctaagtggagctgctctgtagtgacatcattttggatctggatgccagaagatcagtttggactgaagataacgatgaaagtcattaatttatggagcatgtggtaactcaggccttggaagtggatgatatgagccgagtggacaaaacaagagtggatagggttagtggggagtgagcctacaacgaaactgtgtggaacatcaacacttgagaaatggaaggagaaaaatgagcctggagaggagaccaagaaggaacagaaggagggggataaacttgagagtatggtattgtggaaagcaggggaggagaagagctcaaggaggaggaaataatcagctgtaccagatgctgcagagagtgagggaaggcttgctctaaattaatggacttagcaagagggagattgacattagcttggtcagagccatttcagtggagcagtggaggtggaagccagattaaagcaaaattaggtctgcataagtaagtttaaaaagacagtatttccagttggtctgagtgtgatgagaagaggggattggtgggacgatggctgtaaaagattgatgtaggtttaattttgtttttgaaagaggataaacatttgagtatgagtggatgtgatagaggaaatcagcagaaaaaatggaaggaaaacatagaggagggaggtccctaagaagttgagagaggatgaagatcagagacaggtaaatggattaatctcttgtgatgtgatgagacagaataaagaaattgttggtagaattgcatgaaagttggaacacagtgaagtggcttcattttccctgcaaagagggggaagtttatttgaaaacagcaggtagtacttgaaccagattccgtgggaatccagaagagctggaattgtcagggagggcccagttaaagcttagttgctttgggcacagaaaatgctcattaaaattaatcaattcatgacatgcccttattaatcagcctttctatggattctccccataatttaatcagcaatatgggattttaaaacgattcaaacagaaatcaagtataagatccatcattgttacaactcaatttcatcacaatgaagagcctacaaatacatgtggaagcagatactacatgccagatactaggtgctgtgtgtgcttggtactgagtatacggtgatgggagaaagaaagtaaaatgtgtggtctgacctgtactccctttgctaggttatgggtttttaatgcacagccttattgagaagcccagctgccacctctcactcttgccactgccccctgtgagattctgtttgtgctccaagaggtggaaaaattgcccagtcactatccataaaaaatgcaactctgaaccataaaagcatttagattaaattttgcatttcattaagtcatgtatcagaaaagttcgatagctaagaatagaatgaagaaggagtcaaagccataaccacgtgacaacacccggatactgtctcccacttccagtgcttgtggtaaaataatacaaatagtaatcagtcaatcaatcagccagtctgtgtgcttgatccacacaggagtctctttatcgatggcagctccacaaacagaatccacgcaagaatgaagggttggctctactgtacttagaattgtgtattcattttacttttttggttttaacttttaaggtgtcacaagtatctcttccctgatggattacccaaagttaatgtgaaattcattatgtatcttatacaaatcatacccaaaacatctatacttgtgctaagattaaatataacatgttggagcaaaatgccatgagtatatgaaaactgagagttacaagagaagtggtttggcaaacttagtatagttacaagcactcctccagctctctctcttcagagaccactctttcaaaaaggcataaaaacaagaagtccatggacatcttttgtagcaatagatatacctcacaagtcatccagcccctcttttaaaatataaagctaaaactccacatattatttgaaaggctaacttttctctagaagatgctgatatcaatcccaggttcaaaataaggtctataaaaagcccgctattgctagaaacctatttgcatgtattaccaatctacagattcaagagatcaatggatttgttccttttcaaatattaaggtgtgaaatataactgagctcaagtataaatagcaggttttagattttttaaagatttaagacagagaaagagcatagtgtgtgtttgtgtgtgtgtgtgtgtgtatacacaatatatattgttgtcttactcagatatatcactaccttgagagaaaggatctgaaagaatagcatacaactaattcaattaccaaaaacaggagaatatcctttattaatcaagtacaacaggaaagcgtaagaaagaaagattttaaaaatcacagaaataatattcaactttacacattaaaaattaaaaagcaaattttggaaatacacaattaattattttaaatttgaggccccagcaatccagattgtatttccactacatttttttaagtatatgataaaagaaatatcacctgcttaggtcatggctttaaacttaaaaacaaaacagctttagatgggaaaacgtgattgaataaacattgttgctcctgtgatttttgctcaaaatgtgttctgatgctattagaattagttaaagacacagtgattaaaatgtgatgtccttcataagcttatatctgctctaaaggctggattataaatacatttgtcaatatgaaacttcacttcttaagcgagcttttcacagtttcagtttcacccatattgaagtcaaaggaattttaaggaaaaaaattgtttatggaaatactattgattaaaaatgaacatttaacatttttcagaaattaaaatcctggaagaaaacaaggaattggaaaatgctttgaaaaatatccagctgcctaaagaggaaattaagaaacttgaagtagatgaaattagtaagatcttttaaaaacttctcatttatagatatgaagctgagcaattttcttgcttttaaaaaagcatagagtgaatgttacagtgcaaattctgcgatctattaatattacaggatttcatttaaaataatcttactgtaacaattcttagttttactaaatatctttaatatgtttgtgaacatggttgatcttataccttttcaatagcttcctttccacactgacgtttttttaaaaagagcttatctaattttaattttaaaatgtatccttctagaacaaatagtaattcaaggtttctagtcatttatacatttaacacaaaaatttaataaaagttacttttaaatatatcctaaattcttaacaatttagtagttgaaaattgattttattgcatatattgttattaaagacaataaatgatgctactagtgctgtggaatgaagatttttctcctttttttttcctcaaagctttatggtacaagatgattcttcctcctcaatttgacagatcaaagaagtatcccttgctaattcaagtgtatgtaatattttctttggtgtaaaaactatttactgaaaatatgttagatgaaatacacatttatgaaatagaatgaaccattctccttggtaacagtgcctattgatgctgtttttatatattcttcaactaatcagagtaaataaaatatggctatttaaaatagattgaggaagttttgagattttagctggacttgcttgcatttgctgtgttaaatttcctttgtatggcaatttgccgaatgtgtcagaatacctttgagatagagaaattgcagccaaaaaaaatattgtaaatcatcttcacatcttatgtaattgagttagaaatgaaataaaggaatagaatacatttagtggaatcacacccaaaatcagtgctgacctacacacaatttgcttaaaacaccatgcattttttttagtatatcttatgtctgcttttagcaagtggcaggtggcagaaatgacgaaaaacccacacatattccttgaaatgccaaccctagatgtatccgttttggggaataggagaggctgtgtcccaaaacaacttccttgtagcaaacctctgggaaaagcctggactcctcttgattttgagccagttctaacgccattgttattttatcacataattgtactggaattactagaagcaatgcttggccaggatgggaaattgagttttacaaagcaatcaaagattcttgttttttttgtttttcctttaggtatggtggtccctgcagtcagagtgtaaggtctgtatttgctgttaattggatatcttatcttgcaagtaaggaagggatggtcattgccttggtggatggtcgaggaacagctttccaaggtgacaaactcctctatgcagtgtatcgaaagctgggtgtttatgaagttgaagaccagattacagctgtcaggtgagcaccttctcattcaagcagatgtcaacatgcaacaaaagtcatgcaatcactattgtgtttctccattcttcatgacttaattcttttgtttttctttttctaacttggtctaaaactatcactaatcttaaagaggtatttctgccaaatatgaaaaaaaagtatttatggaagagagctaacgaatgtgtagaaaaatgatttcaagtgctaaatgacaaataccctcttttgatgtgttgtcattcattccaatatcttttaatttagttccatttcttacaattgatagaaaaactttgaactctaatgatgatcttcaggaaaacaaatatctgaatttgctcaagcattgtggattctgcctcttaagtttagaaatggctcaagattttatcagcactacatacttttagatgttaggccttcatttgtggttaaactagctatcagtcggccatggtagcatgaaagtgtttgcctattttcgtttgacaaaaacatagtcattttacacaacagaaattatattatgaaaacatttagggaaaacacagattcataatctgatttcttcttctcaactatatatattttcaaccatgatttatggttcaatcatcttttcctgaaacaggactatataggcaccaaaattgtggcttttttagaaacactgtgcaaataattcttgccatgtctctatagttgttgggtttcattattatgttatgaataggtgaagctaagaataatagttcgtaaatttaaaaggtagcaggctaattgcactctcagtcgtgaatatatgtgcatgtgaggagctaaaggtcaaacactgtttcacaggcaaagagaaatttagaaatttctttagtacattttttatccccttaatgttattaatacttaatgatttcactgcaacatgcagaataaagattgtatttaacagcctggagccaggcctagacaacacttttctatatttttgtctctaatcaaagcagaagagtttagactcacaagtaattatttttaaaaatagaaaggtgtccataacccatacattttcaagtgcttctttcattctgggaacaaacaaaatgttcaattaaaaaaaaagtctatctgagtacaatacgacaaattagtaagtaggttactaacactaaaatctgtagctatcactcaatttctggaagctccctctttcttatggactcagacttttggcctttcaactattcacttgtttggaggagatagttcaaagaaaaaccccactgagacatcagtttctcctataaagactgtagtgtgccttaatgagaatattaacgccatcctcagaattatagcttaattccatgggggactttttttagcaccatggctcacatctatttgcatttaaaccatgcaataaacatcaaggacatgtaatcctgggactacatgaaaacagagatgaaaattatgcctcatttataatttatttagatcttttccaaagctgaaagagctaaaaagttgtttattttggcattggttaaaaaatcattgtcttcatcatcgtcatcatcgcaacccaccagtaacaacaaaatatgtcattatacttttatgggtttatttaccaccacagatgcaccatttgaacctaagaagaaatagcttcttaatattttccttggatgaaatgaaaatttaaacctgagccatgatattcaacatacaggacacaaagccataaattctaccttctactgattttcgcagtaataccaatttgtctttggcatttagaattgaagatggactagaggtggtaattggatacctctactttctctgagccatttttaggatggaatctgaagaaagtcttcctgctatagggaaaacatatgttcacccatatactcagccattcaacaacatagcaaatattaatattaatacatgccattgcagtacactctgtataaaattgtgcaatttgcaatttctgttttcagtgtgcttgcaatctggtaaaagtaaataagccacctacactctgaagggacaaaattgttgttagatcaaacttttagtaaacaccccagagaatatgggcagctgcgtggccccatgcaaagtctataaacaacagtggagatgacagccagagctggccttggtttttgcttgaaattgttcttatgcaactgtgaaaaggaagccttataatccaatgctttgagaaaacaaaagctaaataggatagactcagaataataatcctagggatgattcaatatacctcctaaggaagtgttttaggaatcagacactaaatgcctgacctggggaattgagattataatacttctactgtagcccttaaattgcctctcagagaataaaatttctcccctgaatcttttacaaaatgcaatctggctaagcttttgacataccaaaagaaaatcgtacgtacatatttggaaacaacagtaaatactactcaaggccaacaaatagatttaaacaaagcaaagtaggggaaaaaaagaagtcatatcgtcttataacttctatctatgtgaaagaaaatgcgtcagaagagatgtttgtgaagctacagacataagggagactggaacccgctttctttaggtgtctcttcaaatggtacatatgtgagacccttaaaactttggtggttataagggcaactttgctcatttggagtatatttggcacttttgatattcccacaactttaaaatttgatataacttgagggttagtggtggggaagaattacatgagatgaaattttctatcatgcttttatagatggcatgaataagaatatttctaaaataggataataattgatcgctatgattccaagtttaccttggccttgggccaactttatgagagaaaagttataaagttcaatccagactccaagattagaaaaacatccttttcatttgttactgacattttgttgatataaccacattatcaacagtatttacaaccctctgggaaactcttcagaatttgaaggtgaattttatagtgcctcgttggtctggaagtgctaagattatctagctaacctttaacctagtcctgcaacattcagtgttaatgtttcatttccatgttaactattgcactatcatttcctgtaaatgtcatcctttcagaataaacctaggaagagagctgttaagagtttcctgttcccatgtatcacctgttatttgctctttaccccagatgtaaggtagtatgattgttggcttctgggagatcataaaatcacaattgattttatggctcagaactgtcttcaagcaccagtagcaaggttattttttttttaacaagaaagtgaaccttctcttctttcatttgatttttgaagtttgtgcaagaattgctcaagtgtcacaatttgctgcacattttctcctctataccatgagcagcatccacacaggtagcaactttccatttgctactgcatttcttctctgtagactcctcagtgtccttcagaatcagtgtcgggtaagctgtgactaacggggcctcttcccatctgtttgtcccgggcatttgcccaacttctctatgcatcggaaacgtgcatgttgaatcaatgcaagagcgaaatggttgctgtgaaatccctttaagaaactacattattcaagtaatgaaaatcactcagttctacttccagagaagaactgatgagaaaggtctttaacagtaattgaatggaacaagaagatagtatttttctgggactgtgtgtctcctttggtcttctcccctccttcctgtcactgttgcatacggtggtttctgcaatggctgatccagtttgccacattccactccggctgctgtttctctgagattttcttgagtttttatcaaaccaatccccagataaatcacaattgctctagaacaccagccctcagggtaacatgttagaaattagcttgaaaccctcaattttgagggtttcccatgactttttaaacgttgtccttcagtgtagccccttgctcctaaggaaagatttattttcaaaatagttttcaaatggatgctcttctgtgatggagctaaaaaggaattatttccatattaattaatgatgaattgaggatgcctaagtatgaaatggaagacggttgtatatttctctcaaatgtctctgaaaatgaagtgatgattatcattaacaacaatgtgataagaaattaatataatttaaagcagcaagaacaaaatccttctttccgatagctggggatttggaaacttggtcctgctcaatgctgctgctacttcttgtgtcactatgaacccatcttttggcctctctgagtctcaggtacacccccacgattagactacaaggccttataccgctctgacattaccagtcaataactgtacaacagagtctaagggaatccttttatctctttgcagaaaacatgataatattattttaattatttgtaaatgcaggcttattatgcatgtgtttaaacaaagaaaatgtagcgtttctattaaatctttggattaaatatggttgtgtaatgaagtaaatgtcatgtgtatacacttaacattctaaaaatttgtttcttttactttagaaaattcatagaaatgggtttcattgatgaaaaaagaatagccatatggggctgggtgagttgttttatattttttatgcctgttattcagttcagcaatcatcattttctgaagtgttcgtttagaaggtttctcatgaaatgttaatgttgcaacataatttaatctgtcaatggaaacagtcagtttggataatctgggcttcaaaatggtggttttaagtgtttgttcctttttttcaatcttttcttccctgtacagtaagttaactcataattgacatatttttacttaagtctttgttactagattatagcatactgaactgaaccatatccgtcagagggtgaattgcctttgttattttaaagttaaatatataccttttattttatatttctattttataaaaattggagctacaatttgaaatcacagggactttcagaatataaattccttagtacctagcctagcagtcatatcttagctgtttaattttgtttctttttatttggcaatcaaattattttagtagaccgaatgttcgtttgtgctaactggagaaaagtactatttagtttcctaattataggtcatggagataacttctcacacttgaggagctattttgaaaatacacatttaaagaaagtggcaaaacttatcgtttatgggcaatgaagtcactggaaagtttagagaaatattggaaagagttgagatttgcccattataaattatgataattacccttcaaagaagatttcctgtttcactttttggtctgaatttgtacatttgcaagtcaatttgcagccatttgtgcctgggttgtttttcttggctgttttctctgagagcggcctgcacgagaagaagggaatgaaacccaatattgaagggaatctgcaagattcagctccactcagctcagtgaccagatgaagagctgttaggaatttgaagaaagttgttacttcaagccatttggtccttcttaaaactatcaaatgttaaatatctaaacagaatgaaattcaaatgagtagaaataaatgaaatatttctatagtgaaatattccagataataccttccctatcatccatttttataaagtttcctaaagcaaatccttgaaagattctaattttaagttgaacatgtacatgtaatcattaacatttctcttagagttggactttgcttttgctgcaggctttgaaataaccataaagtagaactttttattttatttatagaacattctaggtattagtttggtagaaaaccatctacgtgggatgattttctaaaaacccactcatcacccaaaaatacatccctatcagcctgaaattcttcaataatagattctcaccacatctagttgggcaaatgccactgaaatagtacattagaacccccacccgtcaattgcttactttccaacatggtaatgactgtgaggtcgactcagagcaaatttgagcaaagaaagtaagaaatgggctgccacgtgatataacatctgagcagaaggaactagtatgtggataaagacattaatactatactgggttttaaaatcagctcttcaggtttaagatgcttattaatccatctgtctaatcactgacttgttcattctttcatctacatagtacattttctacaaggtcttgtactaggttccttaggggatgaaaagatgagtaagtcgtagtcctggccctcttgtgggggaaacagacaacaaaataagcaatggctcagcaatcttccaagtgttaagagagatgcaactcgctgtggagtacagggggacaagagtggataattatggctgtgggagctaagggaggattccaaaataagttagcatttgagattggtgaagatagctgaggaacggagcattccaggcagagtgaaaaccacattgcccaggacctgagttaaagagcatggtgcacacagggagactgagctggccagggatgcctgaaacttcaaaagtctaaagtatcttgaggaaagtatagaaaatgagtctgaataagcaagtatacagataatagtctttaggccacctaaaggagagggatttgtgcatgcctgtgacacctttctcttcattcttctgtgcctctatgattgttacaccttttttattttttttcttttttgagacagaattgctctctgttgcccaggctggagtgcagtggtacgatctcggctcactgcaacctctgcctcccaggttcaagcgattctcccgcctcagcctcctgagtagctgggattacaggcacatcccaccacgcctggctaatattccttttttcgtttttgagacaagattttgtcatgttgcccaggctggtctcaaacccctaggctcaagcaattcacttacctcagcctcccaaaatgctgggattacaggcatgagctaccgcatccggcctccatttattatttaagtattggtgtttttctgggtctggatctcgccttgaccctcattagtcttcctttccttcggcaaacccttgtggtgtcaaagatgatgatgacttccagatccctggcaccagcacacacctctcttctgtgctccatgtttcaaatgcctgctgatcatctctcccacatgtctcacatggacctcaaacttaacttacgcctaaggtaaacttgttaaagcctattttaaaacaagtcttaatcttcattaaggcttctccacacacttattcacccaaattcgaaatctgagagctgttttcaacctccccctgttcctgttcctgacttcaacattccattgattagtaagttctgtcaattctacctttaaacatcaaagtctgttctcatcatccctactgacactgccttagtttgagtttctccatttgtaatttaagccagaaattctcaaactttagcttgcacaaacatcacctggagagcttgttaagacaccagagattctgagtctgtgcttctggggtggggcctgagagtgcatttccaacaagaccccaggtaatgctgatgtttgggtccatggaccacaggtttcgcacttcaatttattctaattgcttcttacctgtcctcctgctttggcttcacaagctccaatgtggttaatgaagttatcgttccaaaacaatttttactgtgtggcttttctgcttatgtattttataggactctgcattgcctgcaacacaaagcccagatacctttcctggcatgcaaggcctttggcagtctgactccagcttagttttccaatctcatctcttgccacttctccctgtaccttaagtaatttaaattatggccaggagtggtgcctcatgcctgtaatcccagtactttgtgagaccgaggcaggcagatcacgaggtcaggagttcgagaccagcctgaccaacatgacgaaaccccgtctctactaaaaatacaaaacttagccaggcatggtggcatgtgcctgtaatcccagctactcaggaagctgaggcaggagaattgcttgaacccgggaggtagaggttgcagtaagctgagattgcaccattgtactccagcctgggcaacagagcgagactccatctcaaaaaaaaaaaaaatatatatatatatatatatatagatagatagatagatagatagatagatagatctgtgcttccttgttcccatgttttgtacatgctatttctcgcatctgcaatgtccattctcttcttccattccccaccttttcctcactcccaaatggataactcacacttgctctttaagattcaacttacatattattttctttgtgctccagtagctctttgcatttctcttataggaattaccatgttgtgtcttgtctgtctgttagtttctctcataagaatgtaagttcatcaaaggaatggactgtgtctcattttagctttgtttctgagcccaaagctagaattgtgtttgtttagcacaatgcttggccacagcaagcatctatgatgttgtttaaactgactttaatcctataaatcaatgtctcccctcaaatgtgtcccactagtaccaggagatttttcaggaaaatgtcctatagtctaataatttggcaaatcacaaattctatgtaatagtgtatataggctctagaaagactagcaaaaaaaaaaaaaaaaaaacctgtcaagttttgtttaacacagtattaccaaaaagtatttgattccacaattccttattcctccaccatcccagaacacatattgacaatgttttctatggacatcaatttttaaagtgctcttgaagtcaatagggcaaggtattggtgtcttagaaagataatcttggctgcaaagtggaggataatctgagatttggggagaggatgggccaaggggctaggagagtagtaataccagggacagatatcaaaggcctgaattagtcagtgaagtagcagttggaagaggtcatatctgtgtgtgctcttatacaatataataagcagggacctgtgggaaattggagatggaaaagagaaagacattgaaaattaccatgaggtttacttagctcttattgcgttttgtattagggaagaatatatgtgtttccatgaagtattagacagtataggagtttgggaaatacatcgcacccaacaaaattttttggagtcaattggtcaataagctccaaatcccacattactctccattatcgagttcaagaaatggggaataaacccttttatcttcccctttcattttctggctcacataaaacaaagcccactagccctggttttagtcccttgataaatattcactatgtgcccaccacagtgcctaagaagtatcagtttatggcagtggttgttaaccgggcgattttgctccttgggacatttgacaacgtctggaggcatttttaattgtcacgctgggggagtgctactggcatctagtgggtagaggccagggatgctgttaaacatcctgtgatacataggacagccccctataacaaagaattatccatcccaaactgtcaatagtgtcagagttgcaaaaccctgatatgcaatgaaaactcaacacaattattctgacaattgaagagcagcgagggttttgcttaaattattagaataacagcctcatttctgggcttcgctttgttaatataggcctagccaggtggtgttgaataagcattagttcatgatttaatcttagttcctttctctcccagtgactaattataagtaatttgaattgctatgtgtgatcaacgatgtaaaagtaggacaaatgcacctctaatgagactatattagactctgaacttacagtttccccgaaagaggttgccctaagtatagggatacagaggaaggggcatgggttgctgagacaagtgtcctgagtttgagtcccagctctgctgcttactgactccatagccactataagtttactctgagcctcagtttcctcattgtgaaatgcagcaataatttcctcaccaagacaccgtgaggattgcacaaagtaatagcaaagtcatatactcaacaaatatttattctattcctattgtgtgtcaggccatattttcagtgctgggctacattcattgacaggacagacaaaaatatctacccttatggagttgggaatggttggagagaaagacaataaacaagataaataagtaaaatatagagagtgttaaatgacgttaagcgctatggaaaaagacaaaacaagaaagaggaatggtgcaagttggtacaattttaaatcagaatggcaaagaaggctcatttgagatgacatttgactttgaagaggagaggaagtgaggcatgccagtgtctgtggaaagagcattccaggcagaaggtcacagcatttgcaaacgtcctgaggccagatcatgcttggagagttcaaagaacgtcaagagagccagtgagcaaggggaagagaaaggaaggggagaagtgaggtgggagaatggagacagattgtgtgagaccataaaggccattgcaataaccctgaccacataaatgttagctagttattattattgcctataggtaaaatgttccagtgtgcattatgcctcaaataagagtgtttcgtaaaccctccttcaaaatcctgtgcccttctaagaatgtttttaaagatatccctcatttaaacaaaatggcaaggcgtctaagtgcaaaggacaaaattccagaattctcatggccaatctgctctgtgggttcttttcttgcaacagccacccactctgcctgggagccccactcatggagggggggcaggaaaaagtcaactcgggttttcttttttccccctcttcatttctacaataggaatagcttttccaagctgcccgagaatttaaagtacaccttcttttgttgtgctgctgatacagtcgcttttgctcttacaaattcccagagaaaatttatattcattctgaaaacaggaaagctttatttaaatacaacactatcacccaatgactgaatagatacagattaataattcctaagatttttagcagaaatattcaaaaaccttttcatgatatacaaaggcttttattttaatgtcaagtctcactttatttccttctctggggcataggaaaggagaagcaggacccagtatttttacttgcagtaaacacactttgccaataaaaccataaatgataataatttttttctaaaggtctctggcttactctgctctcatttgaacttgaaattcagaaggaaggaaagccttcccatttcagcaggagttgctgcaaacctgctaatcaaaataagtcatttttttaaattataagtgaaagtttaaaccagacagagaattttcacttgcaataaggattttcaaacccaaatgtatcttctgtttttaaaatatactttttccctattaaaacatggttcagttctcctccaagtataataaaaagaggccatggtacaatctgagccccctcttttattctgtgttttgtagctaaaggtcttcaataaaataccccagagctaaaaacaaagaactgtaaattagtttgagaattcttcatttaactgttagattcagcaagattatttagctgattctcccattccatgcatttcatgaattaaaaatagacctctgccactgacctattaccagcaccatgtctgtctacctctctctctctctctttctcacactgtcactcattctccctgtctaaagaatgactttctctggtaaagatgatatgatctatcctgatctgagggaagtgattcccagaaatctgtggtcataaggtcctaaaaacatggtatggctttagctggagagtcacactgtccccttatgatttttagggacgttcttgcatcagggcaagaataaacacagagagtcacttcctaatctagtgcacacatttttttttggtccatgtcccagacaactgcttagtccacgttcccaggagaagcacctctctcacagcatgtttgtacagaccaaacttgcttctcacgaggcagtgcaaccttatttggatgccctgttcatttcttcatatttaagaaaaggttcaaatttccatgtgacatgggcagagatctctttctcttaacaggatcccatttctgaatcacctcttgattccttggagaagaaaatctatgagagctaaacttactcctgactctgcaaattgcatcctgttttgtatttatttccttttccttaaatttgcaggaagaaatataaggtttttaaagacaccaatgacttttcctcctttgagctgctatgtcagaaatccttagaacatgtaccactacaacatacacaaactatggccatgtcttaaattatccaaaaagttcttatggccttcctttggtattctgttgtgaaaataaataagtaaatacaaagatacatgttctgcctcacagaacttttgcaaactgcgaggatgtatcttacatttaaattttggtaattttttttctgtgcatctctttcaagtaaaatcttgtttttgttccagcatggtcctagttggaaagatatagagaaaaaaatgagaattttttttttgcaaaagaaaattgaaattctgtctatctcttaaactgctcctaccatgttttaagagggtctgttctgatcagcacaccaagtatttctaatgaattagggaagaaattaccattatgtctggtcatttatctgaagcttgctgccgaggatgcaagatagacatgtaatccacccttagccatattctccagctcccttcagtccggattgtgagtagagttgctataaacatatggaggaaagcttatgaaagtaaatctgagtctgactcataacaatgtctctacagtcctatggaggatacgtttcatcactggcccttgcatctggaactggtcttttcaaatgtggtatagcagtggctccagtctccagctgggaatattacggtatggaaacattcattaatgttactgtgaaagcatttaacacgtaattactctatatctgatgttgctagaaaaatggattatgcagtaaaattcaccccagcatcactggggaaaatataatttataaacaaagttgtttatatcatttattataaacatgttgtaacaatcaatgaaatctcaagagtgaggaaaggctcatccataatccactatatcttattttctcccagaaaccttgagcccctgccgaaccaaatctttaaaatcagagctaactctgtttttgcaggcacacagctacagcataattggcttttaagcacatcttcagcacggtcaggccagaggccaagcagttcacctccacgccacagttagcaattgccagttccattgctccagaaatcaaagaaacaaaaactttgttggagaaatactcctgtttgtgcctatttttatcattacatcaatgcaggatgattatttggaaggaattctaataattatacaaaataactctaataattttacaaaaattagcttcatcagattctctcctctatattggggcagaaataaaacaattgtgacttgtaggggatcttgattaagaaaaaaagtgtgtgcatctatgtacgtgtgtagggggaatagatttgagggacatattttcatcccagatgaaataagacaccagtaaaagtcctaaagatggctggatttgtgattttctttaaaatatattgagaccattctacaggtcattcctacttcaacattcttccctaggagggtagaagtgaaaaatattaagaatagtcatagaaagaaaatgtttagatgctcctgtttccataatctcttccttcatacttctctagctctattgaggctaattgcagagatgacacatattctttgaggccaaccattatagcaaagtaaagcaagaatttacctcaagagctcaagatgggaaaattgagaaacagttattaaactagaaggtcttgttggttaatgaaatgacattcatcacatgcaaacaatgcatattctcatatattttatagcgtctgtctacacagagagattcatgggtctcccaacaaaggatgataatcttgagcactataaggtaagtgtttccattttatttaggttaataattaatttctaatatgctaaataacttaaaagcagtagttcagaatttacagttttaattctgggcccccaagcaaatatcatcttttgttaattgcaaaacacatcactagaaagggttttactccttttggattctgttctttcttttcccatcctcccttccctaacctctcttttcccaatcttcctccccacccccaacccctacacagcttgagcgggcatcatttatgcctaaggtctcactcatatgtaacatatgacacataaactttcagtttttcaaactaagaatcagatggaagtaatgcaaatgatgatgaaaatgtgttgctctgactcttaaatatttatcaagcaaagcaatacataatttcagtattggtgctaagtccattgcacaatgatttagctagttttctattagaacttgcagcaactaaaatgttaatttttttctcttttccagaattcaactgtgatggcaagagcagaatatttcagaaatgtagactatcttctcatccacggaacagcagatggtgaggtttaagcaagactcttacacataaaaatactgagccagcatcactttgtttaagaaacattaagcatcctcctatgcctatgctcagggtcagtacctaagagtcagggacatttccatatctgagtgtgattactcactgctgacaatgtcaaatgcatgactagataattgttggtgttcatttccaggcagtacattgtcactctatgctttctggtatttagcagcactttaactctctctctctttgttgcagataatgtgcactttcaaaactcagcacagattgctaaagctctggttaatgcacaagtggatttccaggcaatggtacataattttgttttactcatgttcatggccttagaccctcaagctaaaaggaggggttcatatttttattttttttaacttttaaagtaaaatctgacaaagaggctgcaggatagagtaggcagaacattagcaaatgaatcttggatctttctttaactactgaaggacccgaggcaaaccagatcacctctcgtgttcccagttgagtcatgtaaaataaaggagttcacaagattaaatgatcttctagttcaaacatccagtagttctgaaatcctatgtgaataagtgcaattatatgcttagagtccctgcaaaacctgagcatccttaaacagctagaagattctgtttgttcagtaagaagcagttgcagaatgtcatcacaaacctccaaggctccctgaaatcatatggctccatttgtggttagagaacttttcacctatgtattctcatcccctggcatacacctggcttatcacagatgctcagcttcttactgagtgaatgaatgaattagctaaatgtaaaatccaggttgcttgaggaatgagaaattgaaccagaaaagaaaataaagtgaaagccaaagttgggggcggggcagcattcttggtagctaccttttcctctcacaaatgctccctcaattgcttaagttgaacaagaaccccgaaaaggagacccccatcttttcaacatttgtttttaaaaaatgtactgactgggaaagaaatgggggagggggtataagaagaagttggttaaggggtacaaaagacagaaaaaaataagttctagtatttgaaagtacagtagggaaattatggtcaatgataattgattgtataattcaaaatagctggaagagaataattataattttcccaacataaaaggaaatttgtttgaggtgatgggtatttcagttatcttgatttgatcattacacattgtattcagctatcaaaatatcactgtacccccaaaaagatacacaactattatatatcaaatttttaaaaatatacaaagagggaggtgagctttttctgaccttttttattgtgatccccaaagtaaattcaacttagtaaatatatattattacatcgtgaccactgatacctttattcagtgaaagcaataatcttagtggtatctctccaagagtgaagtttaaagttaaaatactatctttcactttttaaaaatgctatttttaactcctataaagggtgtttatggctatatatgaatacattatattgtggattttctgcaacagagaggaattagattcacaggctgaaagcctcatggaatttttgagctacaaggaatcttagggaaaatcaactccaacccctttgtttttcaaatgaagaaaccagactccaaagaagcaaaattaacagacccagtgcatcacttctggcaactctgatgcctgatcctgatcttccaggatgctggatgatgcgagatctcagccactgagatctaaaatatgtttaaagcatgtgaaacagtagtggaggttaacgaaagctcttcctgctgtaaatatttacatgtaagctattttacttatttgagtgttcttaggtacagtttccccataatagaaagattatcaggtcctgagagcacaaaaaagtccaagctaaatgcatttgatgactgcaggaataaaacaagcttttttctttgtgtttcagtggtactctgaccagaaccacggcttatccggcctgtccacgaaccacttatacacccacatgacccacttcctaaagcagtgtttctctttgtcagactaaaaacgatgcagatgcaagcctgtatcagaatctgaaaaccttatataaacccctcagacagtttgcttattttattttttatgttgtaaaatgctagtataaacaaacaaattaatgttgttctaaaggctgttaaaaaaaagatgaggactcagaagttcaagctaaatattgtttacattttctggtactctgtgaaagaagagaaaagggagtcatgcattttgctttggacacagtgttttatcacctgttcatttgaagaaaaataataaagtcagaagttcaagtgcta

SEQ ID NO: 35 - DNA, 38374 bp, Homo sapiens
ggctgagttttatgacgggcccggtgctgaagggcagggaacaacttgatggtgctactttgaactgcttttcttttctcctttttgcacaaagagtctcatgtctgatatttagacatgatgagctttgtgcaaaaggggagctggctacttctcgctctgcttcatcccactattattttggcacaacaggaaggtgagtaggtactgatttcaagaaactttatgggatttttgtctttcttctcctcacaaagaggggtgtaaaggggaaaatcagttgcctgattcaagataatttcctctataagctccagattgtgaaacgttgaactgaccatggctgtgctttttacattacttgaaaaataatcgcgttatgtgtgtttttaagagttctgtggttaagataagatgttcttgtactaacttgttttcatgttaaaggcactggaaacttttaaaaatggctttaaaatttttccctcctggattgttaacatcttggaatacttccccaggcagtctggaagttattggtctcttgcaataattttatgttcctctttgtctgctggattctttgtaaggttagaatattgagcattgttttctgaataagaatgcctttcaaatatcatggattaagaacagtctaaaggaagattctacgcattatcagaatcattgaatatatttctgtaaaatggctacaagatacctataaacattcttcaaagggatcaaactgctaaaatattttattattcctgtttttattttgtttcaagaatgattgattaattcatcttttctagtagcttgatattaagggactaatattttccacatattctacgttttaaccacattcgcattaatgaagaaaatattttttaaaatgtttcaacaggaggtttgactttgctgcaaacaaggtaaagatactagtactgtttgacttcagaaagctgttttgctatattttctaataattgcatgtaatgtttttcatattctaatttcccctaaaaacacatttgtctcattatttatgtgaaaatattcttttatttaccatagtcatgaaaatgctgaacaaattggaatacaaacttccatagaaataaatatttaagtgctaaatgtaaagatagctaggagaaattattagacaatttttattgcacataactaaacatggttacatttaaacatatagattttgcaaaggacactgcatgaaaatttggtttttgtttgtaatatcaaatgtatttgttgtcctcatagctaatacatgtaaatgtgtgtatgaggggaggggtagatatacaatgaaatgtcttcagttatattcagcccatggacacaaaagaaaagaaacacccattttccttgttcccttaatttcctctcctccttacccctcctctccttcgctttgccctcctccttatctctctccaccccttttggctcctttagacttctcttcactcatcaccccaccccttcctaggcaagcccatatctactcctctctcctcctctgtcttccctgcctgttactccctccctactccccatgtggcctccttatgcctccatttcttttttttagttctctctctccttgcctcctcaccctttctttcccctgaactctcaatccttcttcctttctcattcctctccccttttcctccctatcctgctcttcccaggagatgctacaactcacagtccttttttaggataccaaatgactactatcccccaccaaccatttattgaaaagactacaaacttaggggttttagctcaaaaaattgcaacatatttgtagttgcctcgtggttgcaagctttttataagcactgtggctatttttcttcccaatccaactttagtgggggggtgtttgccacttacagtaccttgacatcacattaagttctgtttatttccctctttctctttagatgcaaaaaataatcaataagtataaaattttgctgatatgtgtttgtgtgttcttaagctcaaaaagagttgaaagagaactgttcagcctattttttttgtcatgagtaaaagtaaagttgaagtgacttaagacagtacatcttatgttccctgtgggttttacaaggaaattctgctattagataagctttggaaaagttacaggaggtatctgaatatacagcacactgagagctgtcataaagttctggggtggggtttcttatatatgccctcataacttcagagacggcacagctctaatgaacactcacttctagttcactcacaggcattttctggatacaaacaagtcctcaaaaagaattttggtcgtcttacaaatttgtgaacattgtatttaattcatgtgttttaatccaccaatggagaaacatagtctgttttatatttcctgtagattataaacatgccaagttttaagtacaaagatgcgtcacctagtggctgacaagccaggttaccatttacataacgaatgccaatattaatgttatgtagctggctttggtagtttataatgagctttaaaaaattcatatgcgtgaattttaaatgttaacactgctctcctaaggaaattagtatgttacggataaatattgcaaacacatatactgacacgaaaacacaatggtaacaatattcagagtctttttggaaattagcttaaatgttacggccacttaaaaattctacatatgactattgtttaaatacatttttcatgtctctgatgtagtccttatttgacataagtattttattcactgcttaattgttagatagattatagacagctgttactaagtaatactgctccattagggcagaaacagaaactttattttaattaaatgtgtactaatgtttgagtttctatattttgctacagtgataattccagtaaaataaactgtaggcctctagttgttttagaattttaaaactgtaaatggactcagagaatcagtttcttattagacgtcatgagagtatatttttttcattatgctttaagagggaatttgtaacttgctcaggtaacattcaagttttctggtttgtgtttgtccctacaattaaacacactgaactaacaggaaaaggttacatacatttaggaacaattgcacttttaaagggagagaatgcatagttgctcacatatctcagtgtcagtcacctaacatggatcagtgctttatttgagattacaaaactagaaaatgacggagtcaaggctaggaccaatattctgttcagtcttagataattatagaatacacattaaaatcagatatttgaattttcttaattttgtaactatttgtcattgaaaggagatactaaaaaaattatatatcgtcctagaaagtacatgaactaataatgcatttctaaaggtgaaaaaagaataggtatttttctgtttaatattcaattttatagagagtagtacgttaatttttttaaaccccagaagctcaggatcttatcattttaaaagaaattatcaccagttctgtgtgagtaaataaagtattataacactttgtgtttttcatccatgataccttgtatttacttacctgagctttttttctagggaaagaaaaatgctcaggtaataacagagccttgaaaaatttggattttcaaaactacctatttatgtataggcctttagatcatctgatgttgaatactctttaagtgatctaaaggcctacatataaaaaggtatttttattaaattctggaattaaacatttcagcattacaagaaaagaaagcaaatccactggaacaattctgggaaagaaggaaagactgtgattaaatgcctcttaactacttcagattcctggattgatgtcttatctacaggcttctttttaaaaatcaagaatgattggctgtgagtttaccaggattatagttgaggctaaaggacagctcctcaggaaagcccctgttctacatctacggtcacatgctggaccttgagttgtcactcagagaaaagagtgccatctaccgaaactccacagtttccattgtgaatggcttctttggtgcagagttccaaaaattatgtagcccagctctttaattttgtaacatctaatgatatcaccgccttgaagtgattaaagtagattgcttaaagaattaaagctttaaagatgaaagatgttattgcttttgctggacatgaggaacagttgtaaagtttccaggtctacaataactttctggaaccctctcagtgaactgtttcttgtaaaagttttccctaagataaaagctcaatcccattgtttccacactcaaaaaaaaaaaaaaaaaaaagatcatatagtgtaaaaaaaaactctccagacttttcaaaggggaaactttgcctgtttcatgtcaagatgacaacggaaaaaatgagatagctattcttacataaatcatttgtgaactgcagttgggggagttacattaaccaccagagtttcagtctgtgtctaatgaaaacacagcagaagtggattcctttcagattaactaataaaacccttgtttttttccatgactgaggtcaagcactgctgtttaaaatgtagtcttaatgaacaaaatgaaacgttgaaagaggacgagtcaaaatgcccaaaagatgtaaacatcaaagagaaaagatccagaaattattaaaagttaaacttcccttgaattctagtattaagaaagtactgcttcagtaaaatggcatatatttttctgaaactgtttttctatagtattttgtgtggaggatgacagagactgcatttctcaagtaaattaaaatcacagaaatactctttggagttgcatagcatgttcacaacgttccagtttcattcagtgaaaacttctgatgaacttagatgtatattaacatgaatcatttagtaactatattttctgaaaaacagtgtgttaatgagacatcttaaacatatttttgcattggatgcagaagtcttttctgtctggtactattgttgttagaaccctacttttttgtatatagcaaaatgtatgcagggtttctgagtcacacatttattctgttggtggtctggatgtcatcagggtagctttagagatataacccttcttcataaggtcaagagaaaataaacaggagaatttaactccagatggcatcttcctgttttgaggccagatagaaaaatattttgcaaagaactgttgtccttcaaaatatacctatctagattcagattttaaccttgcagggataaaaaatcatatgggacagagctttggagttggcttctttaatcgtactcagttttgaaatagcagaaagaaaatagaatgcagtaattaagagtatcaaatttagagaaagccttcttacactcagatcttctttttcaccctgactgtgtaaccttgggaaaattacttaatgtttctgcagttaagattcctcatctgtaaaattaggattatgacagctgtaagctcataaggcctttgggagtatgaagcaaaatagatattcaaactactcagagcagtccctacaagataggaggtactatagcactagttttactaacgctggcaaataaaattactctaaggaagaaattaaagtacttagtaacttagtgataaggatggtgaaatgtaaaattttatttataagactatacaatttaaagttgtttgccaaatgtaataagacaagtagaatatattctcttcaatgtttttataatttgacactaagaagattttattatatatgcaattgctggtggttagatatatgatacttaaaattttctaattatctaattatttttatttttaacaggataaaatattaatcaacttaaaggacatttctaaggagattgaattctaaaagattaatcttttagacaattctaaaagattaatcttttagacaattctaaaagattaatcttttagacaattctaaaagattaatcttttagacaattctaaaagattaattgaattctaaaagattaatcaacttaaaggacatttctaaggagattgaaaaagcatatatctataaaatatgaaacaagaaaatatctacaaatgataatttatcaactttttttcctggaggtagcaagaataaataaaatcttattttctatgcaaaacagtgcttttaaattaaaattattcacctagaatgtctacagatactttcttcagagtcctttttgttaagtaatctaacatattttaagatactctgataaatacataagcagcagaaaaaatattttattaaaatttatgttttccaaacaatatcatttaaaaggcaaaccaaacattatttcaattggaaactatatgaatgccaaatacccacatgtacaaaatattcagctttctaaagtaatgaaaataattatgataatttatatatcatatctgtgattcttagattttcagattatacaacatcttttcccagataaggatttagtaagaagagaaaaggaaaaaacattcacttttcattcaagccaaattaattaatttaattaggtgctttagggaataatattattgctccaaaaatagtattaagacaaacataacattcattttttgtccaaacaatatgatttcttcaagtcagcatgatttaacatgaagaatggaaacaaaaaaatcacaaaatagtaagctttatgcacatctaaaaatataaaattatgttatttggctttatttttctctaaaattccaaaatagaaaactaggaaagaagcagctaagagtggtttaagacatgtgttagcttcaatatgttttatattatagatcccagcaaggagatgattgagtttaatacattgcttgtgtgatcacaagtaaatttctttcagaattgtacttcgtagtaaggaacagaaacaccaaatgacatgggagatggaatttaaaattaattataaattggaacagagagatttagtttaaacaactaaaataatggaaataattggaaagtccattacttttcaatagtagaatgaaattatttgccttttatttaatatttttggaaaaaattaacttatttttttaaccgaagctactctgaatgcagatatctaagaaatgaagagaataatatgagatgacttacttctaaatcccattttctattctatttctaaatgttgcaaatggctaactagagcatttttattcctctagaaacaaaacattcttttccttgactttgccatgattttcgcacatattactaggtattaaatgaaggtccatgaaacatcaatctaagagctttaactttcagtagaatatattgctaactatattttgtcatgcatggaataataaaggaagctatacaaaactatttttttcagcaaaggtaactaaggtagaaaaacagagaaagggctaattttcagccacaagtttttacaggaactgacttctcaggagagccaaatttatttcaagtggatgtgaaataagttatggcaataaataaagttgcattaattcttattttttaaacattccaactctcttttttttacttaaaacaatatgactttctaaagtaaaacaaaacatacatgcaccatgttgactgtcatgtgcaggtgagaagagaaaaatattttaagaatatgataatttttaaaattgcactaaaataatctttatattgaggcctccgtgttttaaaaagtactataatatgtttctaataaaatttagaaacaataagctaaataacaacgttaatacttataacattgcatttgacccaattttaacaaactcatttacaattttaataagtcaatattgtgctcatttatttaataattagcagaacaaatggaaagtactgtatttctaatgatgtgaggacacccttaatgagacataaacataggaggatgaatacacaggagggaaaagtatttatgttaatttctaggcagatcaagaacatatagaagatacttaaaataggaaatgtttgagcctagctttaactattatcttcatttgtctttaatatgcctttagtattcaatggctgtttttcataatccacgtgctgtattaagtgtgaaaagatatgcctgatccagaggcaatgagctaaaagaatcatctgtacaatctaacaatgcttttgaggatggatctggagggcttaaaatacacattattaatgggaaaatcttgggctgaaactaatctgtaggaatatttcatataaagttgatttggagaaaatttttaagtggttcattttgagaaaaggaaccaatgtaattacagtgttccatgtaattttactgcacaatcttccaaacccaaattttcggaccttttctgcagactggtgaacttagtacttaaatatgaaacgccagttctgtctagagaacaaaatgagtttaatgcatagactcacctgttattactcttcacaccaatgtgtaaatgactgtttgctcttctattaaatatattttccgtaacaccattcaaataggcctacttcatttccactgagataagcattttggtattcagcttttatattcactaagaattaagaaatgctgttttaaaagcttaggaaatgtatatagaaaatatatcccatgttctcatatatgtgtttcagacataggggaggaattagaataaattttctaaataaacaaattatttgcctacttaaaattgcaattaaaaaatgaagctttccttcgttagctgtaaactacattgagaaattgtaacataaaaaagaatggatttttaaaacttcttgagtagatcaagtgtcttgtacaatatcattaaatttgtatcagaacacataaatggaaatgaggtggggaagcaattgcagtactttctagagtctaggttttgaaattctttttggtgaacatttactaaatcagctaaacatttcaactcatttaaacacaaacctaaattattattaccctagacagagagatgatatagcaacgggacctcgaaaaggtgatcttttgtggctgcatgtagtgcccagatggaaaaatcttaggaccactaaaaggcctcttgaccactaggcggcaaaaactaattttgaactacttgcctactcggtagcaggcctctttcaatagacattttaaatatcttggctttgagaaaataaaaatttcaccatctcacaaaaatataaattactgaacagtacatcatttgttgtttgcaaaaatttttgcagatgcttagaaacttattatttatttactcaattactggcaaactatcatactaattgtcaagaactaaagttgtatttaaccacaatacacagctaatgccttaagaattgagaccaggttttgttttggcaattcctaagctgattcatagttaatagctgctgaaatttcagtaccttgtatataattatgaagcaagtctaaaattttggttgaagcaattttttttaccattttaagccacaaatacagatggttatgattcatattttccctattatttttacttattccttgccaatgtttattttaaaaacatctttttcttttctttttggtgatttggaaatgtctttacatccatatgggatatacaatatattatgtcatatcatgttgagctactaatgccaaatagagctaacagtgacattcaatacacataataagttctgttaaaactttcccaggaaaatctggtagagttttatgctgccaagattagctcagttttcccctgaatttctcaactaggttgataaaatccagaaagtcttcagagttagtgacaaaatcatctctttagtttaatgctcccatctgctgttaaggcaaagaatagcaattgggtagaagagcttattttcaatgttcctttaataaataaatgtttaaatgcttgtgtgatatacattgatgttaattcttactataaatgaaattaaaatatctgctggtcttaaggaaaattgactatggtgtgccaattttatgttaacaagcagatatgatattttaattaatttcttgctacttagcaaattacatagggcaagtataattttctaatgaaaggaagaaattatttgtttcaaaccttttcaactttggctattgttaatagtcctaacagagtaacaaaaatcacctttcagcaaaacctaaggaaacttcacgtcatctaacttgtttttcagctgttgaaggaggatgttcccatcttggtcagtcctatgcggatagagatgtctggaagccagaaccatgccaaatatgtgtctgtgactcaggatccgttctctgcgatgacataatatgtgacgatcaagaattagactgccccaacccagaaattccatttggagaatgttgtgcagtttgcccacagcctccaactgctgtgagtttaaagataaactgtacatcttcaatattcatatttagacacatgaatagctcctatatcataggagcctaaaagggaatgaaagtcatgttcatcaaatagccatgtttgtattacgagtaaaaagtgaccgtttcaatttaaagataaggattggttagaatctgggttactaaataatatgcaaattctgtgtcttgtttaacttgtttcttttccatttattagcctactcgccctcctaatggtcaaggacctcaaggccccaagggagatccagtaagtaaacattcttcagtagaataaaattaatactaatgataattctagtaagagtttgctttttctagatttgagctttcatcatacattctcttcattaccacatatttgaataatggcaccaaacaacagactgagaatccataattgtacgtgtaaagatttcaatttcccaaacttcatattatgtcttcacccccatgatcagtttaaagaaaatgtgtaggtcaatatacaaaggaatacattatacttaaattattcacaagattttgattaaaaagtatgtgttataaagaaaatatattacttatattgtttcctaatattataaagtagagaaacaacaatctgataatgattgtgaatcaccaggatttttcactatttaatttatttttatctcttttttagggccctcctggtattcctgggagaaatggtgaccctggtattccaggacaaccagggtcccctggttctcctggcccccctggaatctgtgaatcatgccctactggtcctcaggtataacaattacggtacttaaaaaattccctcataaaactatctagttcatcttctttctttactcgatattacgtctcactattatgagttctttgtatctgttctctgattcagtgtatttaataaatccttatttagtgcttctatgtattaggcactattctaagtactttataagtattcatttttcctcataatgctaatgtcattgctactatatccttggaaaatttgctaatttctcagcagatatatagcatacacattatgtttaagaagtgaactatgaacttaacaaaaaaaattaacctaaataatttagttagtactgtatccatactttattctcctactaataccaatgtcaaagcctctaaaagtttagacaaaaagaagttgaagaactgttagtattcctattgaacaggattatttctgcctatgaaactgctcttgctaatacttcagagcacaccttgcttctcctgaagcatggcagccaaataaatctgcaggtaaaacaaccaaacaaataaatatgacaaaatttctgttgcatggaattaggtgaaacgagaaaatatattacacaaatttttgtgaggttaaaaagtgcatttcaaaaagcaattcaacaagaaccaaagtatattgtctaagttattcttattctagtaaccaaacagaacctaactctagacctggaacttagaatttaaaaaaagcttcaaagaaatctaataagcatatgagcctttctactattttttggtttattttctatggagatgtttatttttgagtgaatcttttagtcatattaaccagaatccaggggatatgaattttacttgtatcattaagtgtttgaaaaataatttgacttcatttttttgctcaaaatgagaaggtgtattatatgatctcgagactcttttggcctcaaacagcctatgatcctatgtttgtaatgatgtagctactgcttagaaataatagcttaagtaagcgcataataggaaaaattggggggaactaacattgaacacagtggaaagatttgtgcatcccacaagaaaatgcttctgtaggatatctaacgtctaaatctacagaaagacacgataaacaagataattagtgaatacataccacatcttttggcacacaaaaacctatcagtagacagtagatgttgcatgcacttctaaatgctttttaaaagaattatgaactgtctgttaaaatgatcatatctatttgtctccttgccacagaactattctccccagtatgattcatatgatgtcaagtctggagtagcagtaggaggactcgcaggctatcctggaccagctgtacgtacaaatgtttctcagcattttggagctttattatctttctggtttgtaaaatcttgaatggttgctcttctaggaattcagtatttttatggaattgtacaaaatagcttacccctactaaggttggaaaagaaaatggtagcattatcatgttctttctatcttattcatattattaaacctatttttaatcacatataaatttttactaaaaaaaaaaaccaaagtcaacacttattaacatctcagaaaagtgtttataagagaaaatggaaatatacaaactattgttttataaatttactatcagtatttagaaacagcatgttacaaaactgaagcatactgttttcagcttgctgaaggttttctagtttaatctgtatttctgaacaatgataaatcaattgtcctatgtatgatgattcttgcatgatcatataaatctctatgtcaattaactctgtgatagatatatcaacataattatgggacttttgggttgatttacattattattttagatacttgattataggatttctagtgtgccaataaatgtttttctgcactgagtttggctgccaagcgagaaattgcttcttcaccagtgcaatataaccctaacattgcagggattttcatagcattatgtactagtttttccagatttttaattcccttccttaagagttcaggacaacattttataacatttattaataatttatatagaatctgtgagaatttcattacagtaatgtttgcttgctaagatcttcattatagatctcatgaatagttatcaaaaagttatcaaaagatgagatatagttgttcatagttttaacaatgcgagtgtcattgctttgaagcatggataaagtgtattttgcattcatttattttgtttttcattcaaattcacattccagggccccccaggccctcccggtccccctggtacatctggtcatcctggttcccctgtaagtatagccattggtggtgttttcttcctcatttttagaaaaatcaaattaatatatattctgctataattcagccattccagcatgcataatcccagttaactagagaaatcataaccaagaaactgattaaggcttcaaagatggaattccatatttaattcctttccaccaacagttattagcaattgaaatcttggtaaaattaaaccacattaatttgcatgtaatatgacttttagttcaaaaccattcagttttgatggattgcaatgaatggaatgaaatacattaacttcattctgatctaaaaataatttggtctcaatatttataaactggagtaaaatttgctgattacattcacaatcctgatttcttactgtcaagatgtaaatgaattatatgaagattttgttactttaaaattatttacatattctactcactagggatctccaggataccaaggaccccctggtgaacctgggcaagctggtccttcagtaagtaacaattaaatttatatttagtaagtcgataattccatatggaacctacctttgttttctaaaacaagtataggtctttacagaatgaagattaaatttacccttaagtttgtaaataacgaatagcattttattgagtcttttggactctttcaattgttagctatcttagagacactagttaataaaggaattccctcatcattagccatcaaaatagtccacttcccagagctgataaaaattctgtatatattaaatatagatttcatttttctgtaaacactcagttcactcatatctaatctactgataaatatagttatatatttacatatgtaaatatacatatacatatatcttagacagtagaaataaacataatcttagagagtcctttagaaggatatgctctgtaaataagcaagtaaaatagtttaaatacaacatttcatgacatttagaaatacctttatatttagatatatttaatattcctaaacgtgtagaaatgcatttggatttataaatacacatacgtaatatatgatgcttttaatttttattaacagtaagttgatataatagaggtataatattaactcagtaagtatcattttcattatcagaaacattaaaagtattttctaaaaggaggttccttccaggaatacatacactgtgtaataataaattgtaacagaaaaatttacaaatctattcattttttatttccttattttcagggccctccaggacctcctggtgctataggtccatctggtcctgctggaaaagatgtaagtttttaaaacttaaataagaatacagcaaaatttaacttggtgtattctaaacagtatatgctttatgtcagaatcccagaagaaaaaaaaatgttattcaaaatattgttgtcttaacaacattttagttaatactaatttttgagtagctatacagtatttgcgtttctatatatatcatttgttgaattccaaaataaaatccttaaagtgctttttgactgcggagaagactcatccattgaatatattatttaactggaggagaaataggtgtctctgcctgcctcttttaatgatgaaattgataccactatttaatgaacttgagaagttatagataccttcaattcaatggcattccttctttccctcttaatctccaatggcaaattcttttcactggcttatgttatttcagtgattagaagcacctgcattatctctttataagcttatatcaaagtgggaaaggtcttcctcatgccttctaccaagaaagctgatctcaactatacattttgtggaaccattttaatgagtcctttgtgagaaaaatgcaaagtaaccattttgcttattggctacaatgtattttctcatacatgagcacctacgtattctttatttctctacctagggagaatcaggtagacccggacgacctggagagcgaggattgcctggacctccagtgagtcttcagcatctaataaattaattggaataatcttagcttgaaaactattatgtaattcaatggaattaaacttaaaaacagaaagtgttttactactagattgtgattctatttgaaggttcattaatattttttcattcattatttttagggtatcaaaggtccagctgggatacctggattccctggtatgaaaggacacagagtaagtagagtttctaagttgtttacaaggtattccactgggctatgtttacttgcctaaccaattttactggacaattatgtgccaaaaaatatgattctgacaattaattaatttgatatttttaagtctactaagtttgtttgttgaccaaactagtcattttttgcaaaataaaggagttgatttctagtgtataaagtactcttgaaaaatatcgttttcttactaccactatcagaaaaataaaaacattttgtgaattatgttttttattgacttaatatgatttatagattgagttgaacaactttattctatgcaaaatatttcgtacattcaaccaactgtgcctacaacctatcaactgaattataataaaatctatgaaactcatgtttgctactctatagttaaggcaactttcttatcagactaaattgcactttctagttttcatgttttcctgttgtaaaatcagtatgaaatatcttcaacccctttaaacaagttttaaattatttaagctaattttgcaagtagtgttatgaagaccaattagaaaaataccatgtaaactttatcaatcattctagattattaacagattttaataattttgctggttttatacatttcctagggcttcgatggacgaaatggagaaaagggtgaaacaggtgctcctggattaaaggtaaatcacaacaaaaatcatattttcataagtaaattcattaaatattaaagctacatataagattcatattgtgagccttaacttgttttctgaaatttacctgaattttacctattaggtgtgaataatggtaaccaattcagatattctattaacgcttccatgaaaaatgacaacttgaagagtctagattagaaatagttgagcatcttagtataacttatcaattacttcactttagtctttaagtttttaaatacagaaattgagatttctggtaaataaaatactaacagaaaattaatattgttaaaatgtatatctttttctaggctctataaacttttccataatattctgtatttaaaaatatataatattttcttcctcttttgtaaaatagtaacatattttatatgtatctagggtgaaaatggtcttccaggcgaaaatggagctcctggacccatggtaattatgtttcttatgtataattttcagttttattattaacctcattgttacctaaaactggctttgctcccaccccaactgttcttacacatgtcaagattagagtaaaaccatatttcaattttactctgtagggtccaagaggggctcctggtgagcgaggacggccaggacttcctggggctgcagtgagtatagctgctaacatcacacaattacaacccaaagtgacagatttttacagcctcagtaaagtttcaggctgtaaaaatatgttaggaaaaagaccttcctacaaaattatactcaatgatactgtgataaagttttggctatagttaaaaggaaatgaataattgttttacaattattatctctattgagaatttttgtgttaacttttcatatgtcatttgagccattatatctgcattcagtcctgaaaacacagactccaatccttctacatttgattgttgctgtatatatcagaattgtaataattgactttaaaatacataattattaagcagattttaatgtacttgaagaaaactcaactcacttgagtcagaattttggtcaaaatattactcatgaccagccattcagaattaaaaggatatttgatgtaaacttctctttttagggtgctcggggtaatgacggtgctcgaggcagtgatggtcaaccagtaagtaactttctatctcttatgtgttgtagggtaatgagaagttatggattgtggattatttaatattttatatatgtatatactcttaggtatatatatatgcatatgtatatctctaatatacacattagcatctctgttgaccatttttacaatttaaaaagtgaaaaaatattgtagccccaatacttaatattgtatatacactcctgtgattaaaactgacactgagcccataaacaaaatctaggttctgacactcattctgcttgatcaactgctaacatttgaatggtgctcccaatgttagttaatatcctatgtaagacatggcactttaaagagtcctacaaaatggataaaatagatgttacctccattttgtagactggagtacaaaagcccagggaaaagtagcctgcactaagtcacagaattcatggcaaagtagggagaaaccaagaatttctaactttagatttcactcttttcttattttaccacattgtttctctacataatatccataaaatatgaatatcatttttatctgcataaatatcttctttactttatatgtgctcacttatttactagtatgtcagctttcatttagttgaaaaagagctcttgaaattgtatttaattttttcagggccctcctggtcctcctggaactgccggattccctggatcccctggtgctaaggtaaacatgtgtttctatagaagggtataaaaatatcttggaggcaagagaaaagcattagattgcttcttgcaactgatttttttaatcagtcaaatggatagcttttatctatacatgtctttaaagccctattcttgattctaaaagaggtgttgtccctagtattcaactatcttgatatttcttctgctaccttctttttttccccagactctttctaggaaactgataatgcaatcacacacacatagttacatttttctctgcctttacgattaatgattccttgctttacctgcagtatagagtcccactactccaacttttgggagatgtgtttaaacaggactgaagggtgaagtggctaagtgagtagaagtggtaagagaaactgactacacaaggttttaccattagggtgaagttggacctgcagggtctcctggttcaaatggtgcccctggacaaagaggagaacctggacctcagggacacgctggtgctcaaggtcctcctgtaagtatcatagttgagagggagtaagcatagtttcatgcttactccatgaaagcatagtttcatgcttactccatgaaagcatgtgcttcaatatggctatcagtgaaaattactttgaaaaaattgttgcttagtgctctaaaatgatcctcctgtgacacatactgatttgattagtagtaaaaatgatagtttttgactgttgcactattccagaattcatgattttttatgtttatataaaagaatagaggatagactagttttctgatgctttcaagaatgtgccccaagctaatcaccaatcataaaaattcagagaagaaccaaattcaaaatctcttctatttatgtatcatttaataatttatacgaagtacatattatctctaatttatttagataatgatgattcttttgaccacatttcatatgttgtgttatagttggaggattcacttaatctctacaaagcataacactcatcgatacatttattttcacacaaacaacttcaaatatatacgaactatttgcattactattaatacattatctgttttttgtatacttagggccctcctgggattaatggtagtcctggtggtaaaggcgaaatggtaagctgtccccactcctcagccttatctcatccacacattactggcttcttttgcattttgcatgacaatagatttgtgatatttaagtgagatattcataaaagaacattcaagttcggctaatatagtgtctttggtttgttcttagggtcccgctggcattcctggagctcctggactgatgggagcccggggtcctccaggaccagccggtgctaatggtgctcctggactgcgaggtggtgcagtaagttgccttgttttttctctgttgactgaaaggtatagtttaattccatcaacaaaaaattaatagcaaaattttgctcctgttcagttgaatttatattgacttcactcttgtcttataacttataactgaattatgtgttactggtgatgatttgttagtcgaatcctccctgtgtttcaaccaagactttgttatactttagggtgagcctggtaagaatggtgccaaaggagagcccggaccacgtggtgaacgcgtaagttttactgcaacagatctggttatttcttgaaaaaatgcaacataattagaaagtaaacaggtaaaaactttgaactaaattcagtcataatttctttattttaccatcttttttttttttcagggtgaggctggtattccaggtgttccaggagctaaaggcgaagatggcaaggatggatcacctggagaacctggtgcaaatgggcttccaggagctgcaggagaaagggtacgttttccatggggcatctaaaagaaaagcagcatcactgtcatctaaataaaactaccttcagggtgagacagccaatttttcttaagttgagtgttcagtgaaaatattgtttaaagcattctatgacataaaaatatttgccactcaagaattatgaaaaagaattgaaatcctttggactgaaatacttgtctttcattattttcagggtgcccctgggttccgaggacctgctggaccaaatggcatcccaggagaaaaggtagataactttagtttctatgttcctaaatgctagcaccacaaatgggcagttcttgtatacaatttctcattcatgaaaacctaaatatctgaagaatatatattagagttaagaaaaattcctaatataatgcatcctctgttcaacaactttcctggctttgtaactaaagccacttacttaccctctatgagaatcctttacttatctgttaattggaaagcatttatctgagcatcgttgcaagagtacagtaaactaaaatgcctgaaaagtctttgaaaactctaaggttacatcaaatatgatttcatagcattaagatatttgattttagctgcacataattatatttttaagcacagtgaatactgttttattaagcatgtgatgttcacaaagttgctttaaaattttttcaatatggcaatccaagctaagataactgattttatgtataaatgtttcagcaacacacgaaccctttttaaaagttcaaatgacgtcctctctttgtaaccaaaatattgttgctatctaggttagtgaaggctattttaatttttttaaaatttctttcactacttagggtcctgctggagagcgtggtgctccaggccctgcagggcccagaggagctgctggagaacctggcagagatggcgtccctggaggtccaggaatgagggtacagagaaacatttgtttgaatgacactttaatttagacagaagaaaggcaagacaaatgaagacagatcaaaagcaacttaaatcaatcagattacatattttgtaaggcaccaaacaaaacaaaattcttttaagtaaacttaagccgagatagttcaaggagaagagaagatagaacacttgccttagatactttatagacaggaaaaaagatgtgcaaatctgaggcttcacatgtaagtgaaaatatcaaaatcatacaaatagtgtatgtagtaattttttattatttcattttaaatcacctaacaactgacttctttacttcagggcatgcccggaagtccaggaggaccaggaagtgatgggaaaccagggcctcccgtatgtacatttttaaaatctcattttaaaaggccagttaaaatggaatgtatatgttggcctatccttgagtgtgtgtgtgtgtgtgtgtgtatatatatatatgtatatgtatatctatatatatacacacacacacacacacacacatactatatatatagcatgctttaatcttctctttatcaaacctttattaatgtaattttttcttattagggaagtcaaggagaaagtggtcgaccaggtcctcctgggccatctggtccccgaggtcagcctggtgtcatgggcttccccggtcctaaaggaaatgatgtgagttccttcattaatttcttcaataaatatttgactggaaggcttttattttccatatggagtaaagaaatggtcaaaactcagtctcctcttcaaagcatggaggagtatatgaaaatcaaattgcatgtaggaagggagctaaatatataattggttatggttgtatgtgtgtgtatggagcaggcagataaaaaatatgaaacaggctgggtgcgctggctcacgcctgtaatcccagcactctgggaggccaaggcaggcagatcacctgaggtcaggagttctaggccagccttgccaacatggtgaaaccctgtctccactaaaaatacaaaaattagccaggcatggtggcatgtgcctgtaatcctagctacccaggaggctgaggcaagagaatcactagaacccggggggcagaggctacagtgagccaagattgcgccactgcactccagcctgggcgacagagcaagactcagtctcaaaaatatgtatgtgtgtgtgtgtatatatatatatgagacatatatatatgagacatatatatatgagacatatatatatgagacatatatatatgagacatatatatatgagacaataatatgattagttattgccctttgaggattagtaaataccgaccacttcttctttagggtgctcctggtaagaatggagaacgaggtggccctggaggacctggccctcaggtacgtagctttcctcaatttatttctagccttctaatagatgcgttcatctccaaccttctgacttctctctgtaatctgtattatttctacttccctaactgttcttgtttttagggtcctcctggaaagaatggtgaaactggacctcagggacccccagggcctactgtaagttcactcatataaaattggagatgaaaatagggtggaggtggggcaggaagaatgcttcaaaaattacataatctctgacaccatgttgttacagtttaccaaagcaatgatgaaacttgctgacctagttatctagctaaatgctagcattgagtttagagtgtacatgtgtgctttgggtccaggtcctcccttttcttcacatcactacttttataattaagcaacaggcctgttgaaatggatactgtagactaaatataaaaggatgtttacaacagagtgtatcattatacttttctaggggcctggtggtgacaaaggagacacaggaccccctggtccacaaggattacaagtaagaacttgttatttaaatgtcacggcatatctgactgtcaaatttttttgtgtccctaatagattataatttatctgaagcttaacttgtgattctgtctttcatctggaaataaaattttaggcaatgttaataggtaggcatatcttccatgtccgttccagagcacattaataagttatttaaaagaattaatgaaactcaaataattctatttggttacacttatttttattataacataaatccatatagccaagtctatcctgccatgctggtcaatacatttttacgtgtagcaattgaaagaacagagagagatgaaaatgggtttgtaaaatatgattatcacgtatgtgtcactggattttgagtggcacaacgtttctacccctacaagaccactggaacttttttttaatatcttgcagaaacatgtgtacatatgagaagcttttctataagccatgtttgaggtaattacctaatacaaatatgattctttctagggcttgcctggtacaggtggtcctccaggagaaaatggaaaacctggggaaccagtaagttacgtttcattattcaaaactcagaaacaaaaagaatacacactgtttgtttgtcaactattaacttcttaattttcttatgccatgatatttgagatttaacatttagttttgaaatattatcaaaacaaagacaaattatttaaaagataactattatatagagtttgaattttaccataaaatagagagttcatagtttcaagatttgaaaaattatacagtatgccaacatgacaaatgtgtattttgcttatatttacatatttgcttatatttacatatttgcttatatttacataaaatgcactctgatatgggcctaatcatataatgccaatctcccagggtccaaagggtgatgccggtgcacctggagctccaggaggcaaggtagtatttcaatttattctctaccttcttcagcaggttatagagcaattgattagtagtatatttttagtatatcaagccaaaatactctttctttaaaagagcatcattgcaaatgtttggtaagtacacttagagaaactcaagacactttcaatacattaaatttgctttaatctggaaggtccaattctctgacattcataatcactacagaatcaaatacgggcttaaaatttcaaacggaaaaatattgccaatatgttgattctatgtaggaaaactgttttggtaaaaagaactttaaaatgttgctcttgtgaataaaataataagtatttcaatgacagctcacacttaaccagactaagtatccaagttttattttagacactcttttaagcttctagttcccacccagctgttcaactatttttaagtatacaaatttctagattgttcacaatataataacctagtggcctgattcaaaatgatgcaagttaaggtgctttgtttttagctttgggttgtctaatatggttatttacatatttttgtcacagggtgatgctggtgcccctggtgaacgtggacctcctggattggcaggggccccaggacttagaggtggagctggtccccctggtcccgaaggaggaaaggtaactccacagcattccattcacctaggtttaaaaaatgcatttgatttccttctgatcatttattatttctcacttattttcagggtgctgctggtcctcctgggccacctggtgctgctggtactcctggtctgcaaggaatgcctggagaaagaggaggtcttggaagtcctggtccaaagggtgacaaggtgttgacttgttttctcttaattgttcaataaatcagtcattgtaggttttaaaaaaagcaacactcctggaaagtaatcgactgtattttcaaaattaatgttatcattttatagtaagtgaaatttaagatggattcctaaagcaacaatgaattagaacacccaatatatatccctacaaatcctgagagttactcctcttcttggctgattttcactgaagatactttgaatctgatgacattggcttttatttgacagggtgaaccaggcggtccaggtgctgatggtgtcccagggaaagatggcccaagggtgagtattcccagtgaggagaagcaggccttatctatatgtcatatgggacagtcctgcacttcaactttaattttttccaaaaactactcaagagaaattagatattttaccacctaaagacccgaatgacttgatttataatgaaatttgtggtctatatctatggctacttgatagatctacagtgactaaagaatgaaaaagcctcaagagtacgataaaggtcacaaactagcatttgtgagtcactaaaatctgagataatcactgaaatttaggataatcaatgctgctcattaagaaactaaaagtcatcaaaattcaatatagtaagtactcctcattaatagacttaatatttaaaaattgtatagtatttagcaacaaaaaggaatgaacaattgatgctgtacacacagcaaattatacaaacctcaaggacaacatactcagtgaagaaaattcagtcaccaagggatacatactgcatgattccattcctacaatatttgcaaaataacttccttgtagagatgtagaacagattagtggttgctagcagttaagaatgagaaagagagagatggatgtggctatggagacatgacacaagggagtcttatggtgattgcacatttgagtatcttgattgaggtggtagtcaggcacatctacacatgggataaaattctatagagctacatatacacacacataaatgagtgtgtgtatcactggtgaaatctgaacatgctctatggatggtatcaatgtcaatttcctagttttgatattatattatagttgtgtaagatgttaacattaggggacgctgggagaaaagtgcacagaatttccctgtatattcctttgcagcatcctatgaatctataattcaaactaaaagtcaaaaacaaaacaaaaaacatctcctaaatatgattataattaagtcttttaataaatttatataatagttgccttaaagaaattcataaatgcttcgcttttgacagactaagtagataagccgtcattcaggtaaaaagagtgctcaatacttcagttttgtaatataagtaaaactactatttgaaaatttcaagttgaaaaatttaatatgtacaatgagactttgagaaaacatttaaattatcaagcaattgaataaagaaatgtactttaatttaaaaagacattactgtaagatcttacatgacatcctatttatcttctacaatggagataaagataaatgaatcaataaactattgctgaatcctattttctcccagagttatccccaaagaggcttgtgtttactgagctctgcagtatttacacattgagagaaaagcatagcattcaagccataaaaatttttaaaaagtatgttatctagtttattaggtatctatgtctatatactttctgtttgattaatgcaaaaaacgatatttgtatcttcaaaattaaaaaatatttttatttcctctagggtcctactggtcctattggtcctcctggcccagctggccagcctggagataaggtaacccttaatactacctggatataaaaagaaaatgtctctctcttttggatgcaagacagtgacatggcttctctttttccagggtgaaggtggtgcccccggacttccaggtatagctggacctcgtggtagccctgtaagtgttaaagacattctcaacatactttttaaccccatacagacagtagctacttatgcttccctttttggcagttttgccctcagttccctgagcctcaatttggagatattatcttcaaaaaccatataaggaaccatatagcatgcaagggaatgttaaatttcttaaatctaacattcacaggagaccattttaaatcaggatttctttcctaaataactttggaaaaaatacatgaattgcacaagtagtacatgtttgtaattaggtatttcttaagcctatagaatctttgcctgagactccttctagatttaaaagtcttgaccttcaggatttaagactctggaaagatatttagtaaatggtttttaaaaataaatcagttaatttttcagttaagcttctaccatatattgaaatacataaatatctatatatataaatgtgttaaatactttaaaattctcaaactatttttcttgcaaataatatcacagtaggaggcagaaggaatcaatggttctggtattttccactcctaattttattgagaagtggcaaagtcttcagaagtttattggctactctgcacatttcctgcttaaaggaaagaaaagataagatgataagatgacatttcctgcctaaaggagatgacgcacacttcactgtgactaaggaggatatttttctcttcagggtgagagaggtgaaactggccctccaggacctgctggtttccctggtgctcctgtaagtgtgaatatttatacatacatgtcccatagcccaggatctctatcttgctgaaaaattacaaaagtatagtcaagtttggtttctagtctcattttagctgctcattccctataggattattgtacccctattttgttttactttacccctattgtcgctctttgaaagatggaaataaaaacacctgtcctgcttttatgactgggtaatgaactaaagcagtatcatggatttaaaagcactctgaatttttgtaaattcttccattataagatggtactaattaaaattttctcttaaatccggtctttctcaaaaaaatttactggtgctgattttcaaatgtttaatccttagagacacttcctccctccctaatggcaaataatgcacagtttatgctttcttggtcatgttctttgatcatgaaaatattttgattggcttcattttgtcatgtcttcagaaagccttgtttttaaattttatttcaactccttccatctgaagaattctatattctgaagagaaataataataagccaattgtatcataaagagtgtcagctgagagattgctgttgttgttgcatgtagggacagaatggtgaacctggtggtaaaggagaaagaggggctccgggtgagaaaggtgaaggaggccctcctggagttgcaggaccccctggaggttctggacctgctgtaagttccttcctctttctctgtctatctatctatcatctatctatctattgattatctgtctatctctccctctctctctccctctcccccctctgtaagtcctaagtgttctaatggaaaaacatggaggtttatcagtaatttaatattttatactgagatagcatgtcatagtgtcaagaatataatctttatatgaatatagtccaagtatgaatctcagcaccagcaatctaaaagttattttaacctcttcatagagttcctggttttcaaaggcttaatgcttttcccaaattttgattttggtgctattcttacataatttccttccatttcatatagggtcctcctggtccccaaggtgtcaaaggtgaacgtggcagtcctggtggacctgtaagtattgatcctcttaactattattgaaaagcattaattgatatcaacctgtataaaagctgcatttgagacactagttccataaagagaatgtaaaaattgtaatcgctcattcatacatgagttatatgtaaattccaaggggaaacacaaaccataaatgactttcaggtacaatgcagatcatgccacacattatactttttgtttgttgtacagttatttgttctacttttgaaattcaaaaatatattaccatttcacagggtgctgctggcttccctggtgctcgtggtcttcctggtcctcctggtagtaatgtaagtaattgttaaagtcttttctcatcatacacttcagaaagagcattcatgtatgtataggatgagaaacttacacattgctacttatttctctagtaagtctcaaataaaattatttgaagtaagtaaaaaaagaaagaaaaaatgcactttttattataaatattcaaatttcaaacaattatttgtagggtaacccaggacccccaggtcccagcggttctccaggcaaggatgggcccccaggtcctgcgggtaacactggtgctcctggcagccctggagtgtctggaccaaaaggtgatgctggccaaccaggagagaagggatcgcctggtgcccagggcccaccagtaagtaacttcatttttttaaattgattctactattttgatttttatcacaaatcgattagagaaaaacactgtcacataaagatgagctaagtcttcattatctgtattagggagctccaggcccacttgggattgctgggatcactggagcacggggtcttgcaggaccaccaggcatgccaggtcctaggggaagccctggccctcagggtgtcaaggtgagtatagtcattttccactacactcttccttcctttggtagccttcagagatcacttaaccatatcaaggatgaaaagtttttctgtcactggagtaaattagccaggagataatttttttttatttttagatttttaaaagcataaattttaataaatggctccagaacacaaaacagggcatatcatagacaaaccttgaatataaacacaaataaattaatatgatgaaaacaatattgccatctcaaacacctcttttaggaaacttgtgaatattcttcaatttgttgactgtcagttttgaagggggaaatagtgttagcttatagatcttggaaagtctttcattaatgctagttatccatccattcaagtcatcttgcactcctgactctctttcactagtattatattcctataacattctagtgcttagcatctaaaacattcgtttggtaaacaggataataaaattgcatttttattagggctcgtattatggcactttaagtacttctttcaacaaaatgttatgtaatattgtcataaaattaatatttcatatttaagtgtgttcaattgatatgatatttctggtaagtgtatattcttcagatagagacaaataacctaattttaaggatcaccatacacctctagtttcatgatggctcattattgtttttccctatactaatcatgtttatgtattcatctcagattacaatgtacagtattctgaattagataatcaatgtaactattcagccctttgccatccagagtcactgagcaagttagaaaatgcaagaagcttgctcccccatattttttcccatagcaggcatagttttaattttaaaattcaatgaagattaaataaaataagttttttacctgaaaataaagatatctgataacaccattttaattgatttcttaagttgaaacaaaatgtttttcattcctttgtatacagggtgaaagtgggaaaccaggagctaacggtctcagtggagaacgtggtccccctggaccccagggtcttcctggtctggctggtacagctggtgaacctggaagagatgtgagtagcagtttttattcaaccagccaggtagaatttgataatttatttcagcaaaggtgaaattgagctttaatgtctaagagtgtaaatatggccacatagcaaagttcttctatctctaataacagaaattctttcattacaatttaggatagacttaaaagctcttgttcattagtatttacccaatgaataatcatttgtggagaaaatattatctctaactaaattaggaaaaaagttagtggggagaaccacaattgacatgttttctgagtgaaaatattctacggttatctatggttagtcttttattatttttaaagaatttaaaattaatattatttataattaacaaatcataattgtatacatttataaggtacaatgtgatgttttaatatatgtatacaatgtggaatgattaaagcaaactaattaaactgtagatttccactaacagtttagatcactatttcttaaacttttatttattagaggtctgtaaagactctttttggatatcatttttctaatcacctctcctccatgaatacactaactatctgtctggacattgtgaccctttgaagggccacactgctttgtaatatctaagatttcttacccccaagaaccaattttaacccccttgagaattatattgccctgctgagaatgcatggatgaaatggcatttggaaggtttcaagaaattttatttcctttctcattttttaatcagggaaaccctggatcagatggtcttccaggccgagatggatctcctggtggcaaggtataataaacacatgtgcaattgatttgtgttatcaaaataagtgatcatcatgtttattttgtacctatgaatttgttcacagggtgatcgtggtgaaaatggctctcctggtgcccctggcgctcctggtcatccaggcccacctggtcctgtcggtccagctggaaagagtggtgacagaggagaaagtgtgagttcccaaaagcagcatctgtcttgtttgtctatttccttcaataaagacatttgtaggtagaaggtagaatgtcagatctgccaaccaaaatatccactgtcatttgttttacagttttaatgctagttgttccttagacaaatgtgtgaataagtcaataccagaagtacttggcagtagtcaataaagaattcattactgaaacccgaaatcatattaatcagaccaactatctatatgctgggtaaatgcaaggccaagttaacagggctcttgcccaacttttctgtctagatcccctgagaaagctataaacagggctttagcactttgaaggcaaaaacaatattaacttccaataattgcatgcatactataattctattataatgaaattatttacttttgaaaacgaaattgtgtcaacacataaaactagttccgtgtatgtcttctcaattgaatgttttcatcttagggccctgctggccctgctggtgctcccggtcctgctggttcccgaggtgctcctgtaagttttgtcattttttggttttattttgttttgttctttttttaactcattctacagtgtaggaaatattttattttccagcgtgttcaggaaaaaagaatgaatatatatatatatatatatatatatatatatatatatatatatttgttctatctatagatagatgatagatagatagatagatagatagatagatagatagatagatagatagaacaaatataaactttcctttaatgacaatgatatggaaagcagttcaggatctaaaagttctttggagccaaggatagaaacatcagttgttagggatccatgcaatgatcagtccaaaatgaaaacaaccacagaaacaaatctcatttcctatctgaagtgtctgttgatgggggattttttagctgatagaaagccataaaatagatttaattattataaattctattttatttttccaatatgtatgtgtgtatatgacttcaattcaaaatatgtttctaaagggtcctcaaggcccacgtggtgacaaaggtgaaacaggtgaacgtggagctgctggcatcaaaggacatcgaggattccctggtaatccaggtgccccaggttctccagtaagtgcattcattttgttggaaaatcccttcaatgtatacaaattttagagattaagagaagaaagctttccatctctaaaaatatgtactagaagagatgagaaatggatttgaaggctaatttgaaacaacaatcagcatgacacaatgggaagattaaagaaagaaaaaaaatttcatcatgatccccatgtttcttgatctgatcttgaatgtacagtttcccagtgctttttaaggccttcactcctatgtacacttcctttctttccagggccctgctggtcagcagggtgcaatcggcagtccaggacctgcaggccccagagtaagtagcacagaaagatattacaggtccacatgtttcagatgtctgcatttcagaaagatattctggcattgtgatgtcatgatactttcttagggacctgttggacccagtggacctcctggcaaagatggaaccagtggacatccaggtcccattggaccaccagggcctcgaggtaacagaggtgaaagaggatctgaggtaagacatcacttatacgtatgtgtatttaatttgctacaatcttccaattttcagaaacacagcgcattatgtttaaattgaaatagagagacgcaatgcatccactcaatttagaaactgaacaatgactttaagacattctccatcacattaaaaatgtttctaccacactataacaggagaaaaatacctttttaaaaatttgatcaggtatccatcgtatcagaataatgacatctgcccaattaaccaaataaaccctgtccacattgctatcccactagagatctcagaattacaacattcataattatctgcgtttatgtagtgcattttacttctcaaacagcttccatggttactattttgttaatgatactatcattcctaatactttctattccatgcctttgggtaaatgaaataaaaacaattatcccaacaaattacactcccctctgtcatgtcaatattggaattgtagctcacaggtgtttgcttacatcagtcatccagaaggaagaatgatagagaaaacttgtgctctgacactactgattcttacatagtggaacaatatctttcttgataatgaattgtagttattataaatcggtgatcacgtgaccctaaaggcacccaaataaatctttagtaaaataattctgatgacacaatgaatgaattatttttaaggcattttcttggactagcaatgtattcttagagtggcgactgaatgtgcatacctcaatgatccatgttttactcattctagggctccccaggccacccagggcaaccaggccctcctggacctcctggtgcccctggtccttgctgtggtggtgttggagccgctgccattgctgggattggaggtgaaaaagctggcggttttgccccgtattatggagatgaaccaatggatttcaaaatcaacaccgatgagattatgacttcactcaagtctgttaatggacaaatagaaagcctcattagtcctgatggttctcgtaaaaaccccgctagaaactgcagagacctgaaattctgccatcctgaactcaagagtggtatgtttggtagtctttcatcttcatggcaataggattacagagaaagctgcttagattagaatgggaacgaaaaaacatctactttcaatggaaagctgaaatagtactttaagaaagttaactgaattgaaactgcttgatataaaagagtaaactttgcagatgtaaaatataacataacttcagatcatgccaaatacagaaaaatataaagacatttttgtagaagttgtagtataaattgtaagttatttgagtataaagtaacatatctttttttctcaggattaaatatacataatttgatgcagacaattataatctgattattgtaatatttacttattgcaatgaatctaattattaaaattttcaaattaaacaagtgaaaaatttcagaatactgtataaaattaaatagaatattgtaatagtttaaggttttgcatatattgggttaaatatttctgaaaagcaaaattatttcaagttttcaaatatcttgacatggaacactgcctttgctaggagtcatttctagaaattacttaaaataggagacaagcatcaatcatagggatttcagctttagaactattggaacaaatctaggttagacaaccagcttatattattaagcaagattacatataataatcatctttttttaaaggagagacttttgcaaatattatacagcaatcaaaaggtcttagcttagtgtatcatccttattagaaaccaagatgttgcattttatttcagtgctttctgtagtcatagctaactcttttacctcagcaatttcaatcaaaaagcttctctatcattctatacataaaatgcagacacattagcagtcaacattatgaatgcctttacaggtaaacaaacaaaatcactttattactggattttataaccaattcccattcttttttgtgactattcaggagaatactgggttgaccctaaccaaggatgcaaattggatgctatcaaggtattctgtaatatggaaactggggaaacatgcataagtgccaatcctttgaatgttccacggaaacactggtggacagattctagtgctgagaagaaacacgtttggtttggagagtccatggatggtggttttcaggtaggaaaggatatacctttttttaaataagtcacctctatatcctttgtattcttcctatatgttcatcacaaagcaaagttactaggttggtacaaacataattgcagtttttgctactgaaagtgatggcatgcaataaaaatattttcacacataaaatactcgtacataaaatatataaacagcccatattacaatatgcatacacatactacatgaatccctcgcgtgcagttacaactgaaatgtttgatctgttttatttgttccctattacagtttagctacggcaatcctgaacttcctgaagatgtccttgatgtgcagctggcattccttcgacttctctccagccgagcttcccagaacatcacatatcactgcaaaaatagcattgcatacatggatcaggccagtggaaatgtaaagaaggccctgaagctgatggggtcaaatgaaggtgaattcaaggctgaaggaaatagcaaattcacctacacagttctggaggatggttgcacggtaggaaacatttttctcaatataggtcataaagcagtcagcattttagtttaatcatgcaaattattttgaatagaataaataaaattaataggatgaaataaagatagcatttggtatgaattacatacattgcatctactgattcattgcagggaatgttaaatgcaacaaaatggatcttagcctccagatgaaaaccagttgaaataaaagcatttaaaatttaaatccataatgcaaactttatcagataattgggatagttactatatgttttgaataatacctgtcacattaactcagtttgaaatatctgttttttaaaattttaaaggttaacttcaaatctctcatttgttattgttatttgtgaacaaagggaaaactcacttctaatattagcgaatttcattgtgagagacctatcctctttttaataaaccatttataaacctgttagcaatggccggaaccaggcctcctgaggatgcactggtctatagcaattgccctgctgcatttactaagaatccttacaaggcatttgtttaagaatattgtttatcaactaagaagattacagctttgaagtagagcaggtctcatatacatgaataataacatggcacgatgaatgcttctttagagtaaaaaggttttctttaacttgttaagtcagagttgtctaagtaattgtaatgtcatgatcatgtacattttgtccttttttacagaaacacactggggaatggagcaaaacagtctttgaatatcgaacacgcaaggctgtgagactacctattgtagatattgcaccctatgacattggtggtcctgatcaagaatttggtgtggacgttggccctgtttgctttttataaaccaaactctatctgaaatcccaacaaaaaaaatttaactccatatgtgttcctcttgttctaatcttgtcaaccagtgcaagtgaccgacaaaattccagttatttatttccaaaatgtttggaaacagtataatttgacaaagaaaaatgatacttctctttttttgctgttccaccaaatacaattcaaatgctttttgttttatttttttaccaattccaatttcaaaatgtctcaatggtgctataataaataaacttcaacactctttatgataacaacactgtgttatattctttgaatcctagcccatctgcagagcaatgactgtgctcaccagtaaaagataacctttctttctgaaatagtcaaatacgaaattagaaaagccctccctattttaactacctcaactggtcagaaacacagattgtattctatgagtcccagaagatgaaaaaaattttatacgttgataaaacttataaatttcattgattaatctcctggaagattggtttaaaaagaaaagtgtaatgcaagaatttaaagaaatatttttaaagccacaattattttaatattggatatcaactgcttgtaaaggtgctcctcttttttcttgtcattgctggtcaagattactaatatttgggaaggctttaaagacgcatgttatggtgctaatgtactttcacttttaaactctagatcagaattgttgacttgcattcagaacataaatgcacaaaatctgtacatgtctcccatcagaaagattcattggcatgccacaggggattctcctccttcatcctgtaaaggtcaacaataaaaaccaaattatggggctgcttttgtcacactagcatagagaatgtgttgaaatttaactttgtaagcttgtatgtggttgttgatcttttttttccttacagacacccataataaaatatcatattaaaattc

SEQ ID NO: 36 - DNA, 11483 bp, Homo sapiens
gggagggagagaggcgcgcgggtgaaaggcgcattgatgcagcctgcggcggcctcggagcgcggcggagccagacgctgaccacgttcctctcctcggtctcctccgcctccagctccgcgctgcccggcagccgggagccatgcgaccccagggccccgccgcctccccgcagcggctccgcggcctcctgctgctcctgctgctgcagctgcccgcgccgtcgagcgcctctgagatccccaaggggaagcaaaaggcgcagctccggcagagggaggtggtggacctggtgagtccgagggagccgagccgggaccgccgcgctggtggaggggacctggccgcgcgccccacgggcagggcgtcagtctggctgttgggggtgtctgtctgtacagctgtgtgtcgtgtgtcttgctgcgccggggtgtcatgctttttatttacaggtgaagaaggacctggttatgcgtgcagtgagtcttggaactcagaggggagaccaaaatgggaggccatcgtggagcggacatgcgatatgggcccggtgggtctccccgaagtacagggagtcccccaataatttctggccccagggggaccccttgggaagggtgggagggatagggcggcagtgagagtaggatgaggagcttgggtacgtccgaagtggacctgggaaaaaccctggcctcgctgatcacatggacctgggcctgggccagggcggtgcaacgtgtcctttgttggggctggtggccacgtctgcctgcgagagagaataacaacccccacaaagcatccgtccaactctttgtaacttgaagactatgagtcacgttgggtcatcttcctagggagtatgggctgcaatttactttgttggacaaccacagctggggctaggaatggttcagaaggtttaaggccggaaagggaaatgaaggggcccggcgctaaccctctaaggacctgttttgcttctgtttaaaccaaatgggcagtctgtcattacacacaccctgggtcttcatatgtggccgccaggtaggagcatcacagtcaagctacgggagaaaacagtttccaggaaactggaaatgaacggcccgagtgctttccaggggctcatctgtgggaaggtatgtttgcttaaaatccttccctctaaaaatcaacaaacccagtggagggcggagaggttctctggcctgtggtatgagggagcctttcagagctaccgtagtccttggcatattataaacttcagtctcacttgcagacaaacatgatttacaggcattgcaagacataagttggggcatttttttttaattaaaaagaaagttttgaatttgttaagctgccattttaaactgagctaatataccaagttccctggcagctagttctgtattggattcaaaagtgctgggaaaaaaattcccgccatttcacacagcactttttggtggtaggctgtgtaattttgatccacaaaaggggactatgtgttcaggcaacagttctattttaagtgtccaaattattaaaactgtgccaaatgagtatggttcatgtgtagtttgcattttatgagtctgtagttatgatacacaaaatacccatttttcctgtgaagcttgctattttccccccttcaaggatttacagtacctgtggtttcccacaactctagccagacttggaaaagattttgcagtcaggctcaggtgcatcctgtaggttggatttggttttgctgacagaagaagtccacagtcattaaggtttcaacagattctataaagcaacttctttgtataggatctttcaaagcgttcctttcaagcttccacaaagctctgccccctggtggccagtgaaagaaacaggggcgtataaaagtgcgcttcccttcacatcttttttttttcattccacagacatttattgagagtactaagcatatgttgggttagcattttaaagtagaagactgatgtaacacctgcggaatcgagtcaagtaaagttatatagtctttgaaatgtatcttttagatgaaaaggtgaataaaaattcccaatatggcacaatggacatgttgggccagataattcttgtggggacttgtcctgtccgttgtcgcgtgtttagcagcatcgtttgtacatactagatgccagtagcaatcccctctcccaagttgtgacaaccaaaaatgtctctagacatagccaagtgtcccctggaggacaaaattgtccccagttgagatccactgatatataatgaagtaaaatttagtctgtgtagcatcttgccctgaggggaataatagtgaaaaaaatcaaagaatatcagaagcagtcttattcccatttgaaatgtatgtctaaacattgtatatatctgcttgtgagagtgaattaaattactaaaataaaaataaagtctaaaacacaccaaactattttgaaatattttgcacttttaaaatgctttactttttgtgtctttgaatacttttgtaattgttaaatgctttttcttttcttttttttaactatttctctgacagtaaataagtagtagtgtctttttcttcttacagtcaggaaaatggcgatgtcaaagacttaaaaagtcatttatcaaaccaaaactcaaactggcgatggagacacaaattgattagcaagcatcagtctaattatataggattcttcccagacaactattggattttatcatccaatcccagatactgtagtcaaaagataagctttgaagttactttaatatctaagaaactttgttttttgttttcattgggaaatatagttatacagaataatactaggcaacttacacaaatagaggaaatgttagagtaaacatttaaatggattgcattgggttttggagtgtctaataaacggcacctttgttcctagctgaaccaattcaggtgtagacacaggaattagacaggtggggcacaggatatcacctttaccactgatcatacagcattggcatgtatggcttatgtgtgctaggctggtgggtttgctaatgctctcttccccaggtctaaatcctgaaaggtccacccagggcagtggacacacttacccagagttgctgccttgcactggtcctggggaacataggaataataatggctgacacatacagtgtttactgtgttccaggcattgttctaagcacattttatatattattcacttaaatctcatacaaaccctataaagtaagactctttattattatccacattttacagataaggaaacaggcaccaaaatgttgagtaatttgccctatctcacagagctaatgtaaggtggagccgggacaaaatccaaagaaactggctctagaatccatgcatttaaatgctacaagatgtccttctccaaacaaacagaaaatcatagtccttacagacagtttgacagattgtggatggtcccctattgagaactaatggtcacttgaaactgggtcacttactgcttctccttggggaagaggggtgggatgagaggccagaaatgttatccaagcactgcttcccccacttaaaaacagggagaagcagggattttcatacccaagttggagctattgccagtacaagataattattgactcttaagattttattttataattatgtccctaggaatttatcttaaggaaataattcaaaagaagaaaaaggctgtatggatattttcattacaataatattcataataaaaaaagtagaaataaactatccaaaaatagtgcaatgtttgcataaaactgtaaaaatccaggtccctttgcaagatacagagttagaagaaaaaagcagaatatcaaattattcccaccttggaatacagctatttaaaattgtgtatgcctataatgagcagaagggagcaggcaaataattttgtcctcctctgatgtgtgtgtgtgtgcgtgtaaagtctgtgcactaaaaaatatgaaggaaatcacaatattttagaaataatttgaaaatgaattctctgtaataactcatctagaacacgggcatgtggtatgaagggattcttgactccaagggctcaaaataaatgcatttctaatcatactgagtctttgactcttaagtggtgagagttttctttgccttttctttctcattatagtataatggaatgtgcttacaagggccagcaggagtgcctggtcgagacgggagccctggggccaatggcattccgggtacacctgggatcccaggtcgggatggattcaaaggagaaaagggggaatgtctgagggaaagctttgaggagtcctggacacccaactacaagcagtgttcatggagttcattgaattatggcatagatcttgggaaaattgcggtaagtttgaattattttaaaattgaagcaagatttaagggttttcatattttagtgttaatttttaggtgacattttatttttttttaactaaaagacttaaaaaagagaagtaggtagcatgtgacttttaatttaaaactaatgaaaaagtttataacatttcagaatttcatagagatatttctaagacaaatgcttatcattttaaccatagtatctaaaataacatactttttaaaaatgcaaacaaaagagagcatatgtgtctgtgttggacagtaagcaactttccaatcttatcctaaagtaaatttaaatttagtctaagaaattctgtcctggcttcagacataaaggtgggaaaaaatttccaagaaattaccacattgatctggaagcagaagtccattggtgtttgtctttatttaggaagcatgcccagcttaaaactgctaagcctaagagaagtgaaatgggttagatgtgaggtactacagtgattattttaagttattctgcaacattaaggctgagtggcagagaattactcaaaatagcctgtccggtcatgtattttgactaatgtttcagtcactttgattagtgtttgcttcaaaagtaattggcaagtccactgggatggaagagagttgaagaagttgatgctatttataagcctcttttctctgttgatgaactctgtacatggttccatattcacaacatattacttcatgattttactgctaccatcaagcaattacaagaaatttgtttcataaaactccaagattttaagatgcactctgtgtataatccctgttccttatctcagctctttctgctctattaagagtttgagactgtcttgttttgtgatagaatttccatgtagcttccatagttatgatgactatgaccttttctgtgttcatgtgtgtttctagaaaacattttgttaaaatgttccctagttatttaaacatctgacattgatagactggttgtttatttatagttgttcatcaaaagttactgagttctttctaaaagctatccttgtgggttctgaattattaatatgttttcaagttccttttagcaatggtcaggatgggtatggtaaccttctatgagtaaaggataataggtccatgagccaatagacagacaaatttgcatagaccaatgagaaaataagcaaacaagaaacctgggccttatcattgcatcatatagataaagactaaaaaccctgcctatcctttactccctcatactgtttgctgttgctcgaaaagaaacacgtcaagagtcaatacgaatggacagaactagtctagaatgtaagttccatgaaggtagggattctggtttgttaactgctctatctgtaccatttagcacatagttggggctcagtaaatattttttgaatgcaaaaaaaagaggaaatatataaattgattttatcaaaagtactgaaggctagccttttttgataaaactgaaagataccctcaatggggcgaaaagttctgagaaagctgcaatttgattttcttagagttcctatatcaaaatctcttacctagcttgcagaaaatctccctccctctataaaagttaagctttatttttgtttattttaatttttttgagacagagtctcacttttttgcccaggctaaagtgcagtggcacaatttcggcttactgcaacctccacctcttgggttcaagcgattctcacgtctcagcctcccgagtaactgggattacaggcgtgcgccaccacacccagcaaattttttgtatttttagtagagatgggtttcgccatgttggccaggcttgtctctaacccctggcctcaagtaatctgcccccctcggcctcccaaaatgctgggattacaggtatgagccaccacacccggccaagttaaactttttaaatacattttggggaaaaggatagttaagtaaaattcaccagtctcaaaagctctttttaattaaaatagaaaatgttaattaaatcccatttctatgtttgtgacaggagtgtacatttacaaagatgcgttcaaatagtgctctaagagttttgttcagtggctcacttcggctaaaatgcagaaatgcatgctgtcagcgttggtatttcacattcaatggagctgaatgttcaggacctcttcccattgaagctataatttatttggaccaaggaagccctgaaatgaattcaacaattaatattcatcgcacttcttctggtatgtaaaattgtgacattgcaagatgtgcctcagatctaagtaagattagttttgagtcccactatcatgttggttcactagcctactgtaaagggacctctagcaagttttcaatgcatgattctccaccctgggttgtacttctgcattacctctcgatcttttaaaaatacatagatgcctgggccctatctctgatgaactaacgcagaatctctagcagtaagaccacagcttctgtgttttttaaaagatcccctggtgattcagatgtgccccaggcttgaaaatcagtgagttaaatgacatggcaaaatagccaataatgccatagagcagtggtctttcaaccttggctacatattgggctcactgtaggaactctgggaactttaaaaagaaatgcctatcccacccttccagggagtcagatttaacaggtctgggtgcagacttggcaatgggactttcgaagtatctcttggtaggctgggcgtggtagctcacacctgtaatcccagcactttgggaggctgagacgggcaatcacttgagcctagcagtttgagacaaacctgggcaagagggcgaaaccccatctctacaaaaaaaataccaaaaaattagtcccaactactatggaggctgaggtgggaggatggcttcagcccaggaggcagaggttgcagtgagctgaggctgccccactgcactccatcctgagtgatgacagagtgagatgcagtctcaaaaaaaaaaaatctcctggtcattctaatgttcagccaaaatttagaaccactggctcagactaataaggagactgatttttctgccttatcctttaaaagggtggatactgtctgctgaatttgtaaaagacaaaatttttatactgtttctgtattctgtttccacctagtatgaggaaaagacattcagtggtcacttaaactgtcagaaaaatatcattgggttgttttatgtacttatgtatttgtttatttatttatttattttagagacagggtcttgctctgttgctcagcctggagtacactggcaggatcacagctcactgcaactttgaacacttggcctcaagtgatcctcctgctcagcttcccaaagtgccatgattacaggcatgagccaccatgcctggcctgtttgttctattttaagattcattaaagaaagtttagaaaataccagaaaatagaagagttaaaaaaaaaaaaaactattaatctcatcctccagagacaccactatcaatattttgttgtcagccattttggtttcttgagttgcagtggatggcacaccatggtagcatcagaaagtgtacatactgttatattcatatgccttttcatagaagaaaaataagaaactatacatatggttagcatcatttccttgatttcctgaagagatttttcactaatcttataattaaaaatggttgaggggagggaggagataatctcactcttcccttccctcaaaataacatttcagcattctttagggctccaagtcaggtactgaaccccaaaaccaatttattcctaagcaatcaagggcatcccctccacattttccctcagatccccacaatatccttgaaacataaagaagagattttaaccccctctctttgcatattgagaaacccagggaaatacagcgtcttacacgggacagtagaatcagcgttcaggagagcagaaaccaacgccctgttctcttggctcccagttctctttgtaatcagattaaaaaccctcttcactaagtacttagatacatgtgctggaaaggaagaagtgcttcccatctaagaaatagtctttaaaataagaagaatctagatattaaaaataaaatttgattaggaagtgatatgttcagacagtcgttgatataagcaacttacattctattctgttatctttaaggtgtgtgttaatattttgctaatgtaagcccttaggcccaggaactgtgtcatatacacgcatatactttataaataatttaacacagcatttcccaaccattgtgtgcaaactcatttggtgtgatcagttgggtggagtgtcacaagtaatttgttattaataacagtttttgtattattgtggattaaaagttacctctgtaacagaatcactttttctgacatactgatagtctctcttaagggaaaggaaaggggtgcacttatagttagcatatcagaggatggcttaaagccttgatatgcccatgggagtttgacaaatggttgtcatctgttacatggtctaggaggaaaacaggttgagaactcccaatccaacatatcgtttttacttaacaagctatcatactacattatcacagcaaaaatgttcattcaacattatttcatctgctaaagaccatgaagtgaccatttgactgtcctcagatgaggctgatgcaagacccaagcttgtctgacgtccttaggccgtagggggaagtgaacaagtttctaggccatggctgtcaagaccctgggaaaacatgagcatttgtaggcattttcacttggcatggtactaagaataccagattaaatgggattgtgggcctactatttagttcccccaacttgggaaggggactgaaccagagacaggtccctggattctgagagacttgctctggatttactcctgtgatagtttatgtaagcagattgcttcagacctacatctctgggtctcagcaggaatgcactaacctcaatcaaataggaagcctaaccagtcacataaagtcatccactatatcaggattcattttcttttttttctttagtattattattattatactttaagttctagggtacatgtgcataacgtgcaggtttgttacttatgtatacatgtgccatgtttgtttgctgcacccattaactcgccatttacattaggtatttctcctaatgctatccctcccccagccccccaccccacaacaggcccggggtgtgatgttccccgccctgtgtccaagtgttctcattgttcaattcccacttatgagtgagcaaactatcacaaggacagaaaaccaggattcattttcttgaatctgccaacctacagtttcttctccagctttacacatacatcaaaggtaccatgtctttttgcctgctaaaatgactgagggattttttttttttaatttaagagaagactttggtaagatggaatgcaacttgtattgttagtaggtgaaagtccagaggacatgtgaaaaggtgcataattgtaatgcataaaaacacagaggaaaagcaggggggattttctgttttatgttttttcactatgaggaaattctgtgtaaaatgggattcccagattgaaggactggtgtaatgattatgtagaatttcttttaatgttataaaagttatttcttctggctgggcacggtggctcatgcctgtaatcccagcactttgggaggccgaagtgggtaaatcacgaggtcaggagatcgagaccatcctggctaacacgatgaaactccatctctactaaaaatacaaaaaattagccaggcgtggtggcaggtgcctgtagtcccagctactcaggaggctgagacaggaaaattgcttgaacgtgggaagcggaggttgcggtgcactgagattgcgccagtgcactccagcctgggtgacagagcgagattccatctcaaaaaaaaaaaaaagttatttcgtctacttgtctagcatcacttatcagcagataagtgtcggaaagggctttctttttttaaaaaagacttgcatatcaaatgaaagtcttggcttttaaaagtatatatagcctttctttgtttattcaaataaattgcttttttgttttaagctatctctgtaagtatacaaattctggttttatgcttgaaacctgtaagaacactgcttgttaaacttatatcatagaatggatatgtatacatcttttaaaaatatttatgtaccaatttagaaaaagaggacttcattataaaaaccttatcaagtattaaaatttttaagtagcattacattaaacagaattacaaactagctttctgaagttataaaatttaactaaaggattttgctctttgttctaaagaaagatgtaactttcatctttgtcttgcagtggaaggactttgtgaaggaattggtgctggattagtggatgttgctatctgggttggtacttgttcagattacccaaaaggagatgcttctactggatggaattcagtttctcgcatcattattgaagaactaccaaaataaatgctttaattttcatttgctacctctttttttattatgccttggaatggttcacttaaatgacattttaaataagtttatgtatacatctgaatgaaaagcaaagctaaatatgtttacagaccaaagtgtgatttcacactgtttttaaatctagcattattcattttgcttcaatcaaaagtggtttcaatattttttttagttggttagaatactttcttcatagtcacattctctcaacctataatttggaatattgttgtggtcttttgttttttctcttagtatagcatttttaaaaaaatataaaagctaccaatctttgtacaatttgtaaatgttaagaattttttttatatctgttaaataaaaattatttccaacaaccttaata

SEQ ID NO: 37 - DNA, 376075 bp, Homo sapiens
cactaacgctcttcctagtccccgggccaactcggacagtttgctcatttattgcaacggtcaaggctggcttgtgccagaacggcgcgcgcgcgcgcacgcacgcacacacacggggggaaacttttttaaaaatgaaaggctagaagagctcagcggcggcgcgggcgctgcgcgagggctccggagctgactcgccgaggcaggaaatccctccggtcgcgacgcccggccccggctcggcgcccgcgtgggatggtgcagcgctcgccgccgggcccgagagctgctgcactgaaggccggcgacgatggcagcgcgcccgctgcccgtgtcccccgcccgcgccctcctgctcgccctggccggtgctctgctcgcgccctgcgaggcccgaggtaagtcgccgaactagggcggctcgctgcccgccccgccgagggcaccgcacgctgcgcctgggcgcgccgaggtccagggctgccccgaggggcgacgcgccccggcgcatctccggagccccggggcttgcgcttccagcgcggcgagaccgaccccccccccccaggtgccaattccttggggaagggcgacacttggcccgcagccccacaggagccagtacctgccccggagggcacagcctcgggaccgctcccccgtcctcaccctcttgggtgacatttgcagatgtctctgtatcttgacatttacacgtgtcactcgggacgatgcgtgtcgggtcctcttgctggccctatcccgcagtgaatatccccaccccaggctccgggccagcccttcaccaggtttcctttccagccccgcctcccccgctaacacacttaggggggcgcgcagcggccccgcaggtgaggcagccccctcctccgcaggtgtgcctgctgctctccacagcaggctctattttcataaactgactctcttacctacttctttagtttcctctctgcccctcttcctggcttccaggtcactccctagctgtcagtcgcaggcaaactttagcggaattctccctccttcctccactcagtttctccgccgtaaataatcgcccccatcaacttggtgcacagcgagaacttacttagtttaacgtacttagttttacagacttaggttttcccgagttgtagccccttaaaatcgggcacctgtggctcccgtttgcacagtgaggactcacccagcaggtgcctttttaaaaatccggcaacttccccgggtctccgccgccgccgccttctttctgccgcccggggcgctgtcggtccaccgatgaacgacttcccttggccgcaagctctcaagttctgtgattctatataacaggcatttatttttcaacaactggcctaaatcacgaaccgttaccactttatgatacgttttattttgcgattgccactgctgccctccgcccccaccgcgtctactgtaatgtggctaaaacccagttcttgttaaaagccacactgcgaagaccaattcggggataaatgattaaatacaaagattgcacaaagcaatgagaaagtcaagaaagaatcctgctgagggtttaaagaactctacgacctgtagtgaattgtgctttgaaagacttttaaacaaattggtccttttgaatgtttattaagaaagaactttttaaaaaacggaaagtgtctcaaagtgtgcctgacatggtctttaacttggcacgtgctttgtacacataaagagaagtctactgagcagggacaaattttttttttggaagaaaatgtttattaaatccagctaataatgggaaattatttcttgtgtgtgtgggcgggggaggacttttactattttatgagttcagctttggtagagagagtgtttccttaagacagatatgacccaaaatagaaaaccagggaggcctaagcactttgaatgggttacctattgtgatatattccaggattcactgcttgtttacccttagattctcagtatcaagtcttcaatcaatcagtgccccaaatcataccattgaggccgtataaaacgccaaacatataatgaaacatttctttgcattggcaagagaaaaggaggaattactacctgttgagtctgagcatattctgagtttctccctagccttgtctgtaccctgagccctggcacagttgcctacttggtactttctggggcaactcggcctaacaagtccaaaacagaaccctagatcccagactctctagttgcaaatcattccctccccagccttcctgaacccagtaacaacctcctctgccttctccacatgccttgtgctgacatgcaggaagtcatccctgtgtccctctttttactccgtaagccaccaacctcctaagtatattcccacctacccacttccttacatcccgaagtgtgcctttcccagtccaggccacattataggaaaaatctcttctgcagaagcctcttatccctcttacccaacgggcctactggcttttcaccttatccctgcatggtatattttcctccacaatagagccaaagttattattttcaaacatgagttagagcattcaagtttcctgtctaaaactccccagtggctctctagcacccttaggaaagaaaatccaaacctcagcatgacctaattcctgttttcctttctgatctcctttcttaccattctccctttgctcaccctactccagacacactgccttctcttcttttcaactacccaatatagtagtgccatcattaaaaaaaaattcaatgtttgcactaagaagactttgcaaatacttttcactgttttgccgtgcagtgttttatggcatttcatccctcttgtaactttttgcttttcctagagttaatgattgccttgtcttgatttttgtttgctttattttctgtgcaccaagctgtgatattgtgatataataagaaatatgtctctgcccctggttcctggcacagaactcctaaaatccttggaatctctggggtattaagagtgtcttttgtatgctaatgagcttgttaaggcatgattagagttgggacttttagtgccacctcccttgcaacctccagggaggggagacggattgaaggttgacttgatcgccaatggtgtaattaatcatggctgtgtaattaggcctccataaaccccccaaaggacaaggtttgtagaatttccagattgctgagcaaatcaaagttcctggagggtggcgtatctagagaggacacagaagctctgtatccctttccacattctctgccctttgcatctcttccaactgtttttcatctgtgtccctaattacatccttcattaatataataaactggtaaatataagcaagtgttttctgtggttctgtgagcttacctagcaaattaactgaacctgagaagggggttgtggacccccaacttatagctagttggtcagaagtataggtgtgacaacctactacttgtgattggcatctgacattggggggaagtcttgtgggactgagcccttaacctgtgtgatctgatgctttctccaggtagatagagtcagaatagagttaaattgtaggactcccagttgatctctactgaagaactggtggttggtggggagaaactcccacacatttgggtgaccagaggtgaaacattcggtactgagagtgagagtagggagaatacttggtttttggtttttcccatcccttacgcaacctctattttacttccacactttctggaagaactatcaacctcctttcaatatgatccaacacatcaggtagtctagccatgattttttttttcctgatgtcatctttcctagagcccctcatcctcctgttccaatgtgactcacgggttactttttaggcatacattacagctgttatctcaggactacccttattaccaagacgctaagaattcctcttgcatccttcctgtgttgaatcatctgtattctgagcactgtaaatttttcttagttcattcctcatttctgtggagcacgttttccagtaacttcctgaggatgggtgttgggaagatacaactttttttgataacttgtgaatatgtcagggatgctttcagctgcaaataacaaaaaaacatgacagcagcaatttttacaagctcgtattctttacaagcagttgcaaagtaagtattttggtggctggtgtaactggtgtgtcaggtcactgatgtgatcggggacccaagcactttcttttatttctatctgcgatacgtagatgttgacttttgcctttatgcttacttcctcatggtctcatgatagctgctgtacctcttggcatcatatctgcattccaggcagtaatacagcagaaaggacaaaaggcagaaccagtcaaatctattttcatcaggaaaataatatttccataagcgtttgtagtagattttgtcttagatatcattggctagactgtgacccagggcccctgctagcttgtacagaatactagaaaagtaaatatttttaactatgtacattgctgcttcaaacaaaacagttctgtgagtaaaaacaaaggttggaatgtgtctctggcataccttgtataaaatatatagataaacacacattcattcattccacccttgattgctagtttgtttaggtataaaattccaagaaagaaatcatattttctcagtattttataaggcatttcttcaatgtctctatggccattactgcttgagaagttgatggtattctgcttgtcaaacctttaaatgtagtctttttttctttttggaagtgattatcttttttcgttgtcactagtatttttgcgttttatgattatgtgctttagcaatgctcttatcagtaattgttaggaactcagtgggccccttcagtttgaatattcatgttgtcaagttttagtatactttcttatattcgttcttcaattatttcttcctcactgtttttaccacagcttttctgaaactgctattagctgaatgtcccagcctcctgaaaacatcctttaattttcttatctatttttcatccctttacatttttgttctactttctgggacagttatttaatttcatttcccaacccttctatttaaattttttggctgggcacggtagctcatgtctgtaattccagcactttgagaggctgaggcaggaggattgcttgagcccaggagttcaagaccagcctgggtaatatagtgagccacaccccccaaccccaccacatctcaacaaaaaatttttaaaaaattaactgggcaaggtgtcacacacctttagttccagctactcaggatgctgaggtgggaggatcacttgagtccaggaggtcaaggctgcagggaaccatgatcatgccgtgctactccagcctcggtgacagaatgagaccctgtatcaaaataaataaataattttaaattttatcctaccacatttaatttccaagaggtttcttgtgcaatgaatgttcttttattcttattatagtgtcctcttcttttttgtaatggatgtaaaattgctattaactctgaatgtgttagtcattacttgttaaacattttttgttcacctctttctcattgttagctttgagattctctttcccccccatttgtttaatatctgtctgactttcttcaaatgtctgatttttggctctctgttgatatttaataacggggcattaaagagctgattagaagttctgtgtacttccacagatggatttactgactgatgaacattcattttgctgagagacgtccacatatcacagactctatttttcttaggctggtcaatttctccaaggaagaatccttcagcttcctgccaaggcgatttcactctggcaatttaagcctggctctagggcctgtgaactgagcaggggaaaagaagatagtgttgccgttaagtatgcttgtattgtttaaacttaatccttttgttttccgtttagcactttgctaacccaccttcacgattcctgggagtccttatgtacagaacttctctacttcagtgtcttcaggaaatacacctcccatgttggtcggagtaggacaggcaacacctagctgtgttggctttgcaggggatctagggctctatcttctccttatacaggttttcagcctcagcctgtattggccttggcccatacagtgccccctgttccagtgcccagtgccccctgttcccaaacctttccagggttctgcttatccatcccaccttctgatggctgccctcctttccaggtcataagttcccattctctcttccctgctaaataggtaacaacttgtccatcccctttccatcttccaaagctttgctgctttgtgttttaattattattattgtttttttttttttgagacagggtcttgcattgtcacccaggctgatgtacagtggtgcaatcatagctcactgcagccttgaccctctgagctcaagtgatcctcctacctcagcctccctagtagctgggactccaggcacacactaccatgcccaactaatttgttcttaatttttaaatttttggtcaagcatggtggctcacacctgtaatcccagcactttgggaggccgaagcagatggatcacttgaggtcaggagtttgagtccagcctggtcaacatgttgaaatcctatctctactaaaaaaaaagatacaaaaattagccagggatggtgtcaggcacctgtaatcccagctactccagaggctgaggcaggagaatcgcttgaacctgggaggcagagcctacagtgagctgagatcgtgccactgtactccagcctgggtgacagagtgagagtctgtctcaaaagtttttttttaaaaaatataatttttaaatttttatacagacagaatctcactctattgcctcaggctggtcttgaactcctgggctcaagcatcctcctgccgcagccccccaaaagtgttggaattacaggcattgaaccatggtacgcagcctattattgttattacaattattcccttatggcagggtttcaggagggcatacagataaacacctgtgactccgccatgtacatttagaatttagccaaggctttgattaccatgctcgacatatagatgtattttctttctctcacttgtcatttggcactttctaactccttccttgtggaaacaaaaattaaactcatttttaaatgtttcaaaactttcttttcaaaatctataaaaactcaaagtcaacatatacctaattagataaatgttgcagctgtggaaactgtaacaaaatttttcttaaggaatgtagctacatcatttaaagaagctaagcacattccttcctggtgtagatgatgctgtaatgaactcatcagagttgcagaaaaaaaattttgtatcagagtgtgtttcagaggcctccttaagctaaatggtttctgcagcgtccatgatttacaaagacaggtgtagaattttcagatgtttcttctgtaccaaatggctaagccctacaaccctttggctgtgtgcccacagggagctatatgaagcagctctggagtatgtccatgctctttaattgtcaggtctctgggctggagaagtgaaattggtataatctagacaatgtttttgagagtagttgctgtgcatttttcatagttgtttcttcatatgtttggttagtatttttttaaacctaaaattgtcataccagcacattgttacttaaaaaggagtttgtcgagtgcgtcagtgccaggagcggtgcgcaggtctttgcgtgcactatctcctgcaattctgctgaaagaatcttgttgttcctgttagtaccctcattctacagaaaaggaaatgatagcctcagatagtgagatcagcagtgtcagaggcaaggcaatctagtctacctcacgctggagactggatcttaacctagctgtggcaaacagttcataacctatctttgccataactatagcagtgagattgtaattagcttggatctcagcagaacggtaatgcagttcaaatgaacattatttgccaattgaaatgtgcacattgaatattacactttctcacaggctgccatttcaatcttcatactttctccagcccatttttcaccctgtttcttttgtgctttgttgaatgcccaatataccttgcctccagttgatagatgggatggaaaagccgagtaattcagcatcatattgatattttttatcctttaagcttttatgtcattccaaggctacattaagagctcagcttcttggcaactatttaaaaaattggacagcttcattggataacgttttctgtctgtttacctactcctggaagccttgaactgcttaatcagtttagatgatccattcttagaaatgttgaaacaccttgacatgtcttcccctagcaggcatggtgagcactggtctgcaatttggccaaaagattccttgtattatgtgttgctatgtttgtaattaaagccaggataggatggagacattgcttttgagagatatgctcacttgaatctgaatgtgatctgagaatctagtcttgctttaaaaaaaaaaattgaaatactgggagtacatgaaggattgcctagatatatgagcaactttttttaatatactttaagttttggggtacatggcagaacgtgcagttttgttacataggtatacaggtgccatggtggtttgctgcacccatcaacccgtcatctacattaggtatttctcctaatgttatccctcccctagctccccatccccctgacaggcgccccagtgtgtgatgttcccctccctatgtccatgtgttctcattgttcaactcccacttatgggtgagaacatgcggtgtttggttttctgttcttctgatagtttgctgaaaatgatggtttccagcttcatccatgtccctgcaaaggacatgaactcatcctttttcatggctgcatagtattccgtggtgtataagtgccacattttctttatccagtctgttattgatggacatttggattggttccaagtatttgttattgtgaatagtgctgcaataaacatatgtgtgcatgtgtctttatagtggaatgatttataatcctttgggtatatacccagtaatgggattgctgggtcaaatggtatttctagttctagatccttgagaaatcaccacactgtcttccacaatggttgaactaatttacactcccaccaacagtgtaaaagccttcctattttggttttgttttcatcctgggttttttgttgttgttggtagtgttcttcagagcctgcattaggatttagggtctacattatacctcaaaatgcagctgttgtccgcctatggaaaggtacattcctgaaattaagcatactaagtaaaacttttaagctaaaatcattatttcagccaatttcagtataatttgagaatatcatataaaagatgattgaaaaagaaatctggccccatcattcatttctaaaatatgacaattttaaagttgaaaaatggacatagaataagttatacacccatatttttgccagccagattctactatatgtacttcagaactttcaacatttaaagatgtaaaatgttaaagatatatttatagccataccttttctccccacccattcagactattttatctcagtcttccttttgcagaggctatactactgtgaagttggttggttcgtgtgtgtgtacacacacacatacccctaatcaatatctgatactcttcatgtatttaactgttaagtaaatggtaccctactatatatgacaaccttctgcaactttttaaaaaatcaatatatattttagacttattcatatatgtgcttggttcattccttttaattgaatgactaaatcataatttgtgtactcctctgttgataataaatatgttttccccaactttttgatattgcaatggtgagaggatccttgctatcttaggtatgggtgtaagctctagggaacctattacaagtgaattactaagctgtagagtacacaaattttttactgtaacgtattttgttaagttgctttccaaattggttgtaccaatttatgtgcctacttattggagagctctggttacctatgtggttgttaatacttggtaatttcaggctttttaaatgttgccaagctggatgttaaatatttcattgttttaattggcatttttctcattactaaagactctaagattcttatgtgtttatatgttcttcgtatttcttctttgaattatttatctttatttactcatgtttctttttaagtttagtttaaacaatcctcctctctttcctgagctccgaaataaatgttgataatttcttctaaatttaaaatttttgcttttcgcttttagaataactggaatttaatttttatttcttgtatgagatccatgtctgtttccccccatctggaaaaccaattgctctagtaacatttgttgaatccttttccacttctgataaccagcaagcacacacagatatgcttctgggttctttgtcctactgttctatttacctccgttccagcatcatattgttctcagtatcccgtacttcacaataagccttcagtgtttagattggttggcgtgatggttaagcttgattggattgaaggatgcaaagtattgatcctgggtgtatctgtgagggtgttgccaaaggagattaacatttgagtcagtgggccgggaaaggcagactcacccttaatctggatgggcttcatctaatcagctaccagcatggccagaacataaagcaggcagaaaaaaaaaatgtgaaaagactagactgacttagcctcccagcctacatttttctcctgtgctggatgcttctttcccttgaacatcggactccgggctcttcagctttgggactcagacgggcttccttgctcctcagcttgcagacagcctattgtgggactttgtgatcatgtgagttaatactccttaataaactcccctttatatacctctctattagttctgtccctctagagaaccctgactaatagagttggtatgtggtggtgcagagggcagacactgaagccagcttgctggagtttgcagatcagctctgccacctggctcctgacatgtgatgttgagaaagtaactaaccatcctgtgtgcccagactttcctaggtttagcactgaagatgacacatcacaggaaacctctcagtgccaggcaaattgggatcgttgctcaccccaaaccttgaacaaactatgtaatctttttctttccccattttcccttgatgaaatggtgataaagatcatatctacctccacagggccgtagtgcaggtgaaatgaaagaatacatatacagtgctttgaacagtgctcagaccatgctaagtattcaataaagtataaagtttaatgtctcctttccttctcccctcctctccttttaaagttatcttgactagccctgaaactttagtgtttccatatgaacttcagaatcttcttgctaagttctgcaaaatactgtatggggacttgtaggctaatttaggggagaattgacatcctcatgacatcaaggcttcccatcatgaatgtggtgatttctctatttatttgttccctttaatgctattcaataagttttcaataatattctcttcaatgttcttgtgcatctttgtaagatatatttctagatatcctaagtacctaatagatttattgtcactttagatggtatcactatttttaaaagattttaactttttaatatgaaatttttaaacatacacagaagtagacagactgcaatcaatacctgtgtttctatcactcagtttcaacaagtgccagttcatggctgttcttgttttatctgtggagtcatttccttattgaaagttgtaattgatgttttcttttcagtgtatatgaatgttacttatttttgtaggttgactttgaattcagaaatcttgctcaatttttttttaatcctgatgattcaaatcataggtaggtgtttgctcaatttttattctaatagtttgtctgtagattgacgtcatagaaattctaagagaataatcacctgaaagggtaagttttgttttttcctatacattccttattcattctacttcctttatttttcttgtttcattgggtagcatatccattacaatgataaacaaaaggattagccaggcccagtgactcatacctgtaatctcagcactttgagaggctggggggtggggaggggggattacttgagcccagaaatttgagaccagcctgagcaacataaggacaccccatttctacaaaaaaaaaaaagtcatatatgtggcatgcacctgtagtcccagctacgcagggaggctaaggtgggaggattgcttgagcccaggaggtcgaggctgctgtgatcttgcactgcactccagcctgggagacacagtgagaccctgaccctgtctcaaaaaagaaagaaaaaaaaaaaagaagaagaagaagtgattgctagtctccttgttttttttttttttaactttaatgaaaataactaacttttgctatctttacacctttcttttctttcttctattgttgtaggattatttatacctactctttcccagttctgttaatttagaggttacatattctgtttccacagttttagtagtaccattaaatttttaacatttgcatttcagacacagagtccaaaggtagtcagtaactttggcctcctcccaaacaattacaagctaaccatggtttagtgcccttcattgtgcctcctgtttttttattattgtctagaattttagttctgccattttgaaacccatctctcatcaaaaaagatagtggggaaatactaggctttgttctgtgctgagcagtccaggcttatgctgatttatccaatgcaactagtttcctttctttcctttctttttctttctttctttctttttttttttttaaccatggcttcttgcaaaccacttccacttctggatccagtcgcttcttattgaagtagtcttcattgaaggtctctgagtagcaaattccctatatttgtttgcctggaaaatgtttttctttttcatgaatgttagtctaggtatgtatggataaccaaaccagaggttggcgatttttttcttttagcagatattacctgttgtatccttgcgtctcctgttgttgttaaggagtctttcatttaatgactgtgcctttgcactaaacctgcctttttctctggttacttttaaggtagttctttggtggtggtggtggagtgtgtgtgtttgtgtatgtgtagttctgtattttattcgtgtgtttttatatggttttatattaaatttgtgtatttctggccttgtggtgcttcttgaatccaatcaattatttaaaaaaatgtagcaagcatctctttaattactgccttgccgtttttgcttcatcacttcctttggaacttttgttatatgtagttgggccttataattcagtcctcctgtttttagcttctcttcatctctttatcactctttgctttatattctgggtgatgtctacaagtctaaatttcagtttaccaattctctcttgagctgtgtctaaatgctgtttaaactgtctattgacttcacatttttcaatatctttactttttcacgtatggaagctttgttttgctctttttcaaacttgcctgatcttcttaaaatgtaatattttaaaattatcttttattatcttttctttgtattcttacatgtctttaataatttgggatttatatattgttatccatttcaggttattatttaaagttcttaggatgctgattctgtattactgtggattatctcttccaatgccttgcaattttaaattgtgagttcattttcagcttttttccctccactgctaccctctccatgggagtcctatgtaccctggattagaagagttcctgtggagcagagtctgtttactcatgacagatgcctcagggatttcccttgtctaagcccagttattgtgggaattttacaccacatggctattctaattttggtctccatacccatgtggcaaaggcttgaagtttctatttctcttgcgaaactccctaaccctcaccagatctctggggagacatgtcactttgaagtttccctgtggcatttggtagaggttttctagccctggtgacttgggaagggcagcctgtctgggcttggttttattcaaggatctagctagagttctctgacttgtgtgttcaagatcatacctcctgttactgaactcatggtttccaggctgaagtcctatgtctgccaggcctttgggattccatgactttggcagtgggtggatgctctggctaggaattccttaattccctgataatttcctttcccttctttctagttcagttatgtaggttgtcacattttatttaacatttttctgtgtttgtagtagaaaggctttctagctgtgtcaactcagtccactgtgttttcagaactagacatctctgataatgattctttgggtcttttagtcaacacatttgttggctgcctattgtaatcccagatttgtgccaggaactggggatacagtgttgagaagaacagacaccctcatttcatggcctctagagcgagtggatcataaaaatgtacagaaaataagttgaacccgcttggcagcttgattctcaacttccagtactccaaacactcagtcagaaaagtcagtcagctgctttcctgctggcatgttagtcttggccttggcagctgcaggggtgagatgtgctaatgatggggccaagctgagctttgggggtgaagccatcagctgttcccatctccctctggcggaggcaaaatgagaacagctgggaagcaaggccaacatccactcccagaagccgctcctctgccagcagaggtgtcaacagaattccagtcatgtgagccttccaggagtgtatagtgaattcattccatacttaaacattctagtatacaaagaagattgtacaatggagtaagccaacaatggagacactcatttgtatatttttgtaaccttcagaatgaatgctatgattccatatagattgatttctccactaatttatctacaggaaaatcagacgcctgatttgccactaaaatttggacatgtcagatttagtctattcaattcactaagctttacttccagtttcttagtagggagagtctgctccttggagcataatttattcagctgcaatagatggtactcttgaaacttttttctcacatactttagtctcttttctgtttcttgtctctgctctcctttaaaaaggtgattatcatccttctttctccctcagtgctgctgaagactaagccattggttatagaggctcagtgagaaagcaatttcaaaagagggaggcagaaagggctgggataggatatggtctgtaaagctaaatcaagacaactgttttcaagcacaaaagctcctagtagaagcatctgcttctcttatggacttcagtgacataaaataatgagatttcttcagcttatctcccctgatgttacttccttatggatttagtgggtcaagagtgctgtgtgttctggcgttgtagttataaaattgacaggtggcttggatcatggccagaattctggacttggagtgagaagtggctctgagttctggcttggcctctttatggctgtgtgaccttgaggaacccactaaatctttctgaacttagtttatttgtcaacaatgagcaaggatgcagcctacctccctgggttgtggtgaattccaaatgagggagaggttggggaatgtgttttgtaatttaaggtcttctcttttgatggtacagggggcacatggtatcactgttcatatgttcattcagtgctgaggtttgtcctcatgccttgaacggcacaagttctcagcatccatgagccaccgtccccttctgctcatggtagatgggtatccaagttaatcccaaagcttgacagagggggtggcagagaattgggagaggaaggcagtttctattcgtttttctcctaccttaaatctcatgtttccatctttgttgtttatcagtctaccattaggggcatctctgttaaccaggactatttgagattgtgttaataatgtgaactctttcaaatatcatttacttatagcacacaaaatggtcaccagtttccttcttctctgctatatgggactcactgtgggctaggcataagggctgtagagaatgaatggtagcagatgcccaggccaggggcatgaattttcctagccttcagcttccactggctttttgagaaagagatgtgggagggaggataagcgtagaatggcaaggcaaataaaatttaacatgcctctcagggtattgggttggcatgaataagaattgctgcagaaataggaacctcacatttgtgggtgaagcagacacataagctcttgacttatatcttaattaccagttagagcaggtgattgcagcagtaaagcccgttaagcactctacatccttgtggctctaaacagtacacatttagaacatccagaatctgacagaaatgttccactctaagaccaaatattggtggtgttttcccaatttacagcaaaacgtaagtgaatggaaagatctctcccacactactaagattgttcatctgaatctttctgaaactaagttgcagctaccattatcttctgacttgcacagcagcaaatgaattttctaaaatgtttactcagttcagtgcatgatcagacaacacccaagggctcctggtgacaggtttatctgtgtacctggaaaacaatcacatttctgagtggtaattgctctttcttcataggatagaattgaggaattccataaagggattttgcctgtgtggtttctgtgctagcactggttcagtagcttctcatacattctcaccatgccctgggaggcaggcactatgaccactctttcttccagataggaaagccaaggctaggacattcagcttgtgcagttatacagctacaaggtgacgcagctgagattatgcacatgaattactgcacaaatagggaatatactagaaatgggacttacacgaataactaatagtgatgacaccggcatttaacaaaacattcagcagactctcgactaatccctttacatgaattatgtggttaaaatatccctatggcccttagaggtatgggccattattatttccattttacagatgaagaaactaaggcatagagaactcatgatttgccttagcccttgcatcttataagaggctgagccaggattgaactaggcagttgattttcagggcccacatgctaaaccactgggctgccaagggaggacctatgatgtccaggaactcttccatactccagaccctttgcagctatctcagcttgtgtttatcttgggacattgggatttgaggagagaacctaggaagacactgagatagaacaatacttgagtctttagctgtgtgaatcccaggaacttgtcctgtgggctctgacctgcaaggactggcaggaaaaacaggactggagacccatttgcagggcctggtatctctgacctttcattttcgcatcaaaggaacatgtggacttaccagctaaaatttattcttcctgaaggagaaacttactgtttaataattaagtatactatcttctgtttcctctcacaaataaaatgcaggactcaacctaataactgctacctatgatggctgtagaaaatacttgtaaacatgataaatgcacatgcatgagtgcatttgttatttattgctgtatgacaaattgccacaacttagtggcttactatcacacctgtgtacaatctcacagcttttgtgggttacgaatctaggcacaacttatctgggtcctctaattcagcttctttcactggtttcagtcaagatgttagccaggactggatctcattcaaaggctcaactgggaaggatctgctttcaagctcacagaaacatggcagaattcagtcccttgagttgttgaactgaaggtttcagttcctagctggttcccattttcctaatcagtattctctccaatatagaagcttgcttcatcaaggcctgcagactgagaaggcaatataatctgcaaataagacagaatcacaagttgtataatccaatcatggtctgtgaatattgctatagtctactggttaaaaacaagtcactaagtctcttaacctagtgacttgcttaattctaaccctaccagggttacatatgagagtgaataccaggaggcgggggcactgggaaccatctcaacagtctagcacagtgagttaattagataatcagcattgtaaataccaggaatggctttgacaggtgaaagcgtctgttttcagaggtgtccactcactatgtacaagtcctggagctggcagcagcatctgattggtaaggtggctctgtttctgcatttttgttgcttagctgtttcatgtccttttactgcagtgtcttcattgcctttgcctgacagttcttttcccactctcactccaacacttggctgaactcctccttggcttagacttcacttcctcacaggcagccggttcttggtccttcccacccaaccccagtcaaggaaaggtccccctgctaaatgttctcaaaatgctatgtctctgtcagagcacttatcacattctaatcaacggtttgtcttctaggttagaatttaagctctgtggtgacagagaccacatccatcttattctctgttgggtcccccgtgcctagcacatcacagctgctcaataaatattggcatgatgagtaaatagtcccacttggtgtgctgctttttcatttcaacaaatgtgattcactaaagctctactcttaaattttttgtgtttgtacaacctttcatgtaaatgaattttcacatttggaaagtctttttgaaaaaaaataccatgtatccaaatatttgatatggaaaaggtagttagtatatattagtgatacgaaaggaacatcttaaaggaacatcttttggaaatactatgatgctgtaatggatgctaattttcatattgggtagaaaatgtgagctgatagtctaataaaaatcgcaagaggtctctattaattttagcttgttcttatctccctgagaaatgtacagatgcgaggatgggcatgaagaactctatgcatttgcttgggtttggatattctatagctagcatttagtgatctggtgatgataaacttaactatatgtttactttttttcctttttatttcctctaccctcattttaaacttttgaagtgattttagcctaaatgagtaaaaattcaattggggaatgaaatgactccttctaaaacagagctcaccttctgcaactacaaaggcaaaaaaaaacaacaacaacaacaaacttacatcaggctgatttgcaaatcacaagttttactttgttttatgctgctttcttacattgaacttggttattttatttacatccacaatggatagtttcagtggtttgatgaaaatcatttttatgtacaaaaattggaagacttaacatgaaaggttattattgataaactcatagtaattttaaaagtacattccttaaagttgtaccctatttgttgttacaatacatttttcttttggtggtttgacttcagtcctttgtaaaaaaaaaaaaaaaaaaaacaaatcacacaatctaagctgggatcataaaacagtgaattaagttatcaaaggaataatgaaatttatgtttctgaagagttttaatataaataacaactgggtagcctgattagttgtagtcctgggaatatgaactatgagacctacctaggtttcacaaattagtatgcccattcatttgttgtttatcctatattatatatacacatacacacatatatatacacacatgcatacatatacttatatgcacacgtttatatatatacacacatacacatgcacacatatacatttatgtacatatagagacagatctgggtttattacctaatattttaaggattttatgtctgtttttataagagatagtgctatttttcttattatattattgtctagttttggtatcagggttatactggcctcataagttaaggttttctcactttctgtattttgtgaaagagttcgtataagattgttattatttctctcttaaatgtctaatagaattattcagtgtagctatctgggcctggagattcaaaaaatacgtccatgtcatctgagttaacaaacatattggcataacatgtttcataatattttcttatcacttaatgcctgtattatctgtaatgacgtacccctctttaattcctaaaattggtaaattatgatttttttctcatttttttcatcctgctaggaatttaacaattttatcaatatttgcaaacaaccaactttggtttcaaagattttcttttgttatttattttattgatttttgctacttattgttgcttttcttctagtttgtctttgatttgctctttagctgcttttggttgatccttacttagaatattaacataacattctcaatttctagtacagccatttggaaatacaaatatccctggtgcagtactcctttagctgaatattacaaatttgtataggttattttttcattatcgtcagtttaaaatattttaaaaaattctttcataatttttttctatgactcgtggcttatttagaaatatgtttttaaatttctgaatatttgagatgttaagatttttgttattaatttctaattttattttattataatcagattatgtcttctttattacttttatctttacatttgttagagagttgttttatactccagcttatagtctttattgatggatattccatgaatggttgaaaggaatgtaaaatctgctgttgttggatagggtaatgtcccgtaaatagcatagttagttgatggtgttatcaaatctcatattaagcttactaatattttttgtttgttatttctatcaattattgggagaggagtaacacctttaactgaagttgccaatttatctatttgtactttcagttctgtcagtcttcttgatgtattttgaaactctttttaggtttatacacatctaggattgttatgtcttcttgacgaattgacctgtttatcatgatgaaatttcctctttatctctggtagtaatttctgtcccacagtccactttgactaacattgatatggccacctcagctttcctatgcttagtgtttgcatatgtatgcgcagagcatttttttcattttttaaaattttcagtatatctatatttatgctcaaagtgcattcttttaaacagtgtgtattagctttgcattttaatcttttctgagggtcactaccttttaattgaaatatttattccaattacacttaattattcttatggagaattacgttcattatcttgctgtcttttactgtttgcccagtatgtttttgcttttttcccttcttttcccattttcttttgtactgagtagttttaatatttcccttttttagctgtagttcttcattttattattatattttagtgtttgccataggaattagaatatgtatctttaacttagagagttatagaaaggatcacgcatcctgctgtgacatcctaaaaggctgcatggaattaatatggaagcagtgttttcatacagtagttttatagttttattttttgtatttaaattattcattcatctgtcatttttacacaaaaggtgaggataggaatccattctcttttcagatgactacccagttatgaccactgactgttttatttccattgatttgaaatactaccttgtttattagatttttttatacatatttgtgtcaatttttctcacttttatatacttatattgatctgtctattcttgtacttggactgtatgcttaattattgctatttgataattctaacacctggtagatctaaacctcgtataatattctttcagaattgttctgtaccttcttgattactttccatataaataaactttagaatctaaaagaaatcccaataaatgtaagcaggattgcacttgaaaagcaggtgatttaagacaggagtaagcacctttaaaatttgtgctatgtgttgtaattggctttccaatcgctgtgctccttgatatggtttggctgtgtccccacccaaatctcatcttgaattgtagttcccataatccctatgtgttgtgggagggatctggtgggaggtaattgaatcatgggggcagttgccccgatgctattcttgtgatagtgagtgaattctcatgagatttgatggttttataaggggcttttccccctttgctccacacttctccttcctgcctccctgtgaagaaggtggctttcgtcacctttgccctttgctatgatcacaagtttcctgaggccttcccagccacacggaactgtgagtcaaacctcttttctttataaattacccagtctcgggcatttcttcatagcagcctgagaacagactgatacacccctttatgttcttcctggcctgtttctctgaagcttcttcattcctagctagtggcattattgttaccaattattatcatatttactttgccaattttctaggttaaaatattctaatttgcattttaaatttattgttggggtcttaggagtctattaaacaaactttccttcccctcttaggttcagaagtaaacgatggcaccggaagcagaatgttagagaacaaatgatcagttattaatacacagctgatcatagaatttggctttaggtctttggctgtgtaggcttactactgttttacttccaaatttgagagtcaccaatcatactggataatattaacaatgtagtatcttgcccaacagggtcatatcccttaacatatggcaaagggcagaccagaatgagtgtgctgtagacacatccaggatgacagggagatcccagaagaaatgagacacaaaattaagttcctcctttcaaactcttatatacatcactattctttacctgggggagttaggggaagggagggaggcccggaatattaatctaatggaaattcatgtacactaaaacaaggacaaaggtgggatggtgagggaggagttgagggaaggaggttctctttaaattcttaataatgcagtttaatttccccccttatttttatcaataatttttgatttttttaaattgttagttcatatcctttggtcactttgttattgaagatttgtcttcttttaattgatttgttaagagctgtttatatatgagcactacccttttgtgagccataatttggaatgaacagcataccattcatttattacaaagcactttttaggtgttatttttctagttatttttcttcccttgtcattataaatgggatccaattttcaattttattttagtaatgatatatcttgtattagtttatatacacacattctgggactagcctgtttattaaaatgtcttgctggttttagtagatattcagttgactttcttgggtttcctaggtaactaatcatatcacttataaataacttttcttttctaacatttatttccctgaaatgttattgctttattgcagtgtctcaaacataaagaattgctataaaaatgtgtacaaacagcaataattcctcttttgttttgggttttaatggaaggctcctgatatttcaccattgattttaatattgactgttgatttaagatgtgagtttatgattttaagaacctatttctagttttcaaatagatttttttaaaaaaaaaagtattggatactgaattttattaactttttttagacatgtacagaggtaccatatcttgtctctctctttttaaatcttgtgacctgataaaaatattaattgacttattgatataaatattcattcatggatttccccttatcaaaatattcttatatttttgggacacatcctgctctgtcaaggtgtatcatatttttaatatgctgctgaatttaattccctagtgttctaattaagattgtttgcatctatattaggaaggaaagtggtcttagttctctgtttatacaaactcagtggcttaaaacaataaaacccatctttcgctcatgtgtctgtgagtcagggatttaggctgggcaggtctggtctccgttaggcttgctgccatgtttatgggcctgctgagtataatagagtgaccaggcccttctccatgtctctcccatctccgtagcaggctaacccagcatgttctcatagagaaggcagaggcataagaacagacatgtccttagacacaagcccatttcaagcatctgcttgggacccacctgctaacattccattgacatgtcagggaagcaaactggggaaggaggttctacctcttcagagcaggagtggaaaagccatatcccacccccagacaagggactccttggggctcagatagagggatggtaaagtattagagcaattttagcaatcagccataatcctaaagtttcttttatccagtcttttactgtgtgttttttgggacagtaaaaattatatgaaaataatctgtcacattggggctttaaaaaactctctcttaaaattatctggccccaatatctttatggaacataaatcttgtacagatttttgaacttcttacagacttattggttttgctatttcttattgaaccagttgagataacttatcttttcctagaaaatcatttattgtccccatgttttcagattcattagtataaagaacatgtaatacttgattacaatttaatttttgtagcaataattatactcatttctttttttaaaacttatttttattatgagttgacaaattatatggggcccaaattgatgttatgatttataaatacaacatggaataattaaatcaagtgacttaacatatccatcacctcaaatatgtagcttttttgtgttgggagcatttgcagtttatttccttcaagaatttgaaatgtacaacacactgttattagctatattcatgtcactgtgcaatagatctcaaaaaacaaaaaaccttattcctcctgtttaacagaaacttagtaccctttaaccatcatctcctcatttcccccatccccagacttttggtaaccaccattctactctttgtatgagctcgattgttttagattccacatataaatgagaacacacagtatttgtctgtctgtgcctggcttatttcacttagtatgatctccaattccaaacatattgcaaattacagatttttttctttttaaagactgaatagtattccatttgtatatatactacattttctttattcatctgttgacagatgcttgggttaattctataacttgactatcgtgaatattgctgcaatgcacatgggagttcagacatctctttgacatactgatttcaaatcttttgggtaaataccgagaagtgggattgctgggtcatatggtaatattgcagggtcatatggtaatattattttgaggaacctctatagagtttttcataatcatcatactaatttacatttccaccaatagtgtacaagtgttttcttttcttcacatcctcgctaacattcgttatcttttgtctttttgataatggccattctgacaggtgtgagataatatctcattgtggttttattggcatttccctaatgattatttatgttggactttttttcatatatctgttggtcatttggagtatgtcttattttgagaaatgtctagtctggtcccttgcccattttaaaatcaggctaatagttttctttctacagaattgtttgaattccttatatattttggatattaactcctattagatgaatggcttgcaaatattttctcccaatgcttacattgtctcttcattctgttaatttttttcttcattgtgtgaaagctttttagtttgatgtaattccatttgcttatttttgcttttattgcctgagcttttgggacaaatctaaaaaaaaattgcctatagaccaacatcatgtagattttctttgtttccttctagcaatctagtttcagattttatatttaaatctttaatccagttttagttggcttttttgtatatagtgtgagataagtgtccaatttcattctactgcctatgattatccagtttttccaacaccatttattgaagagactgcactttttctatcatgtatccttggcacctttgtcaaaaatcaattgaccgtatatgtttgggttcatttctgggctctctgttctattccattggttgatgtgtctatttttatgcttagtaccatgctattttagttgctatcactttgtagtatagtttgaaattaggtactgtgatgccttcagctttgttctttttgctcagtactgctttggctagtcagggttttttgtgattccatataaattttaggattgttttttctatttctataaaaaatcacattggacttttgatagagattgcattgaatctgtagattgctttgggtagtatggccatgttaacaatactcattctttcaatccatgaacatggactatctttcatttatttatgttttcttcagtttatttaacattttataattttcaatatacaagttctttaactccttgcttaaatttatttctaatattttgtttaatttttatagctattttaaatgggatttgataaggtttggctgtgtccccaccaaaatctcatcttgacttcccacgtgttgtgggaggaacctggtgggaggtaattgaatcatgggggcagatctttctcatgctgttctggtgatagtgaataagcctcacgagatctgatgcttttaaaaatgggagtttccctgcacaacctctctctttgcttgctgccatctgtgtaagacatgacttgctcttccttgccttccaccatgattgtgaggcttccctagccatgtggaactgtaagtccaaattaaacctctttcttttgtaaattgtctagtcttgggtatgtctttatcagcagcatggaaacaaactaatacagtaaattggtaccagtagagtggggcactgctgaaaagatacctgaaaatgtggaagccactttggaactgggcaacaggcaaaggttgaaacagtttggagggctcagaagaagacaggaaaatgtgagaaagtttggaactccctagagacttgttgaattgctttgaccaaaatgctgatagtgatatggacaatgaaatccagactgaggtggtttcagatggagatgaggaactttttaggaactagagtaaaggtgaattttgttatgttttagcaaagacactggtagcattttgcttctgccctagagatttgtggaactttgaacttgagagagatgatttagggtatctggaggaagaaatttctaagcagcatagcattcaagaggtgacttgggtgctgttaaaagcattcagttttaaaagggaagtagagcataaaagtttggaaaatttgcagactgacaatgcaatagataagaaaatcccattttctgaggagaaattcaagccagctgcataaatttgcataagtaatgaggagccaaatgttaatcccaagacaatggggaaaatgtctccagggcaagtcagaggtctacatggcagcccctcccatcacaggcctggagacctagggggaaaagaatggtttcgtgggtcaggcccagggtccctgtgctgtgtgcagcctagggacttggtaccctgcattccagctgctctagccatggctaaaaggtgccaatgtgcagcttgggctgttgtttcagagggtgaagccccaaaccttggcatcttccatgtggtgttgagcctgtgggtacacagaagtcaagaattggggtttgggaacctccagctagatttcagaggatgtatggaaatgcctggatgcccaggcagaagtttgctgcaggggtgagtccttcatggagaatctctgctagggcagtgcgaaagggaaatgtggggttgcagcccccacacagagtccctactggggcaccacctagtagagctgtgagaagagggccgccccatcctccagaccccagaatggtagatccactgacagcttgaactgtgtgcctgaaaaagctgcagacactcaacaccagcccgtgaaagtagccaggagggaggctgtaccctgcaaagtcacaggggtggagctgctcaagaccatgggaacccaactcttgcatcagagtgatctggatgtgagacatggagtcagaggagatcattttggagctttaagatttgactgccctgctggattttgaacttgcgtgggtcctgtagcccctttgttttggtcaatttctcccatttggaatggctgtatttacccaatgcctgtaccctcattgtatctaggaagtaactaacttgcttttgattttacaggctcataggcagaagggacttgccttgtctcggatgagactttggactgttgccttttgagttaatgctgtaatgagttaagactttgggggactgttgggaaggcatgattggttttgaaatgtgaggacatgcgatttcggaggagccaggggcagaatgatagggtttggctgtgtccccacccaaatctcatcttgaattcccatgtgttgtggaaggaacctggtgggaggtaattgaatcatgggtgcaggtcattcccatgctgttctggtgatagtgaataagtctcgtgagatatgatggtttaaaaacaggagtttccctgcacaggctctctctttgcttgctgccatccatttaaaacatgacttgctcctccttgccttccaccataattgtgaggcttccccagccatgtggaactgtaagtacaattaaaccgctttcttttgtaaattgcccagtcttgggtgtctttatcagcagcatgaaaatggactaatacaggattcttctcttgatttcttttttgaagagtctctttttagtatatagaaatgctactgatttttttgtttattttgtatcctgcaattttactgaatttgtttattctaaattctagcagtttttttagagaatctttagaattttttaacatgaagaaacacgtcatcaacaaacagcaacaattttacttcttcctttcctatttgggtgtcttttatctctttctcttgcaaaattgctctggcgaggacttccaacactatgttgaatagaaatggtgagtgtaggcattcttgtcttgttccggatcttagaggaagggctttcaattttttaccattgagtatgatgttagctgtgggcttattatatatggctttattgtgttaaggtacatttcttctatgcctaatttgttgagagtttatcataaaaggatattgaattctgtcaaatgctttctcttcatctaatgagatgatcacatggtttttgtcctatgttctcttaatgtgatgtatcacatttattgatttgtctgtgttgaaacatccttccatctcagggataaatcccacctgatcatgatgaatgatccttttaatgtgtttttgaatttggtgtgctaggtttttgataaggatttttgcatgtatgtttaacaaggatattggcctgtaattttctttactttttttttttttttgagacggagtctcacggtcacccaggctggagtgcagtggcgcgatctcggctcactgcaggttccaccccccggggttcatgccattctcctgcctcagcctcctgagtagctgggactacaggcacccgccacctcgcccaattttctttacttttgaggtgtttgtctgcctttggcatcagggtaacgcatttggaagtaatctttcctcttcaatttttggaaaagtttggattcatatttgtttttctgtaaatgtttgtagaattcagcagcagtgaagctaatatagcttggctgtgtccctatccaaatctcatcatgaaatgtagttcccataatctccatgtgtcatgggagggacctggtgggaggtaattgaatcatgggggcagttagtcccatgctgctgttcttgtgatagtgagtgagttctcacagatctgatgggtctttttataagggtcttttccccgttttgctcggcacttcttcttgctgctgccatgtaaagaaggatttgtttgcttcgccttctgctatgatcataagtttcctgaggcctcccctgccatgctgaactgtgagtcaattcaacctctttgctttataagttacccagtcttgggtatgtctttattagcagcatgagaatggactaatacagaagccatcaggttctgtattagaaaagccatcaggcttttctttgatgggagactttttattatgcattcaatctctgcttagcttttgtttgtctaggaaagtttttatttgtcccttatttctgaaatacagccttgctgggtaaggtattcctggtagacaggagtttttttttccccctccctcagcactttgaatatatcatcccactctctcctggcctgcaagttttctgctgagtaatgcactgatagtcatattgagacttctttgtatataaagtattttttatcttttgctgctctcacaattttttgtctttaagttttgacagtttgattaatatgtgttatggtggactcctccttgggttgaatttgattggaaacttctgtgctttcaggacctggatgttggcatctttccccaggttagggaagttttcagccattatttctttaaatgtattatgtggcccctttttctctttcttcttctgaaatttgtattatgcaaaagttaggtcatttgatggtattccataattcccattggcttccttcatttttctgtttgttcctctgattggataattttaaattatctgcttcaattcttttgcatcttgctcaagcctgctgttgaagctttctattgcatttttaaagtttagccattgtattctttatctctagtgtttctatttgttttttgattgtttctgtttcttcatcaaacttttattcatgtattgttttccaaattttatttgatttttaatctgtagtatcatatagtttacagaatttctttaagaggattattctgaattctttatcactttatagatatccatttctgtagggttcatttttgcagttttgctagtttcttttggtgttgtcatgatttctgaatctttgtaatgctatgttcttgcactggtttttgcgcatttggggagacagtcacctcttctggatgttacaggtgttctttggcagaaatacacctttactatttagtctagcctgtgattccggatgggccaattggtaatgaccccaggcaggcaaagcttgctttccattctctagatggctgggatgctgcctttgctttgagttctggtagagctaagctagctgggctcaggtgtcaggtgagagcactagctgaactctgtaattaggcagaactactggctggtcattgcaatttcctctgattgggctgggctacagggtgtattccttcaccaggtggtacttttatttgaattcttcagttgtacagagttgcaggaggttccctggggttaggtggagtcattgctcaggaaggatgggattatctggtgcttcagtagaaatgtatgcttgaggtttgcgtctttgcctaaccagggccttagggtaggctttgaggttaagctgagtgctgtttgaagttttgggtgttgcagaactagctcttgctctttaccaaaatgtgtagtcgtggggagctctctccccaggtggagccttcaagtagagcctaaggctgggcctggaagatggctgttgggattcaagccaggcacaacttttcaccacttgggagtgaccatcttggctttgcaggtgtgctatgctgtttgctggtacctctcactgggggctgccactggaagatacacagagatatcaccagtatctgctgtgggccctgtctccttgctttgtttctaactgactccagctggtctcgccatgccgctacctcgagcattctttatgaagtgagactgaggtgggcttcctgggaagcatctcagaatgctagagaagctagatgtctgcttctggttctccctgcccactgcagaaaccatgggccctgaggcatcctctctgtgtggcaccatgctgaatgaaaggatggagggagaagcagtgtggtcaaagtgagaccatttctcctacccttccaatgcagacttcattcatttctgtagtctaggcaggtctctcaggcttattcccaagttttggggttttgacccacatgttcctgtctgtagataattgctagttgaaatttctgtgggtgatagtaaagcctggggccacctgttccactatttttgcccacttctctttatttacaatttatctttccccttgtttagacctgtcggagatttagatatgtatttggcctgtcagaagaatttagtcttggatttattaatcaacactattccttttattcatagcttttaatttagtcatttctggttttatttcttaactcctttgtctttttattgttgtgattttttggccgaatgtttagttcatctatgttcatatttcttgataataaaagcagttaaaactatacattttttgttagtcgagttttggtttcattccatatattttgatgtataaattcactcaacacaattataaaaattttttacctttcaacatttttttcctgtggggaattgctatttgacaattgacataagaactcttgtgggtcagattttctgtgaactatgaattccaagatcaatgcaagttttaatataaatatgtgaaaagctcccatctccctattttgcctcccctccaacataaaatgagtacagatttagaatttcattggttaaatatatctttgagtattcattaaaaaaaaaacaaactttagcagtggttactcaaaatcttgccatagtcagttctgcagtatccactaaaagacttagatttttatcaaaatttctttccccctaaagtctatgtggtggagctttcttttagaatcatcaaccagtttgttcttggcattaaacattatcttttctcattaaagctctaatttttttaaaaaaagctaatgatgaaaattttagttataatttaaatgaaatttgcatgtacaattgtcagtaaggactatgaaacataaacaattacataatttttgagatgcagcagatcctagaaactcactcagtcctgtggttgccaacctttctccatctcccgcagacgttctactgcatgccagataccatgtgcagtaacttctgaatcctctcatccccctacttccagaacacaggactatgagttacttgaaagctgaggcttggtagagggctggagccaattgcgttaaactaactaacattattgcaaaatatattctagggcttttactctaataaaaatgactcctggaactgcagtactatattcttggaaccccaagaaaccaggtgacaacccataaatttaccatcacttttcagatgaggaaggcaaatctggaaggccaaattacttgtccaaagatagacaccaaaccagtaaaggagcaggatttgatggagggaggatgaagtatcaatgaaaaaataagtctaagtaaagaaatgcaaatatctttttctttaaaaaaaaaaaaaagcttgttaacattataaaaaacatttcaaatatggcatctcaagtttgaattggttaacttcctttagggatttggaattttctgtcaacatgattcccctggccaggattaagacatggtcttgtagacttgtaaaagggtattatccctggaaaatatgctgttcaaaataagggcagctggaagcctacagatgactgtttgtgccagagcagtcaattgattaccgcagggagctttcccttctttttaaggactctggagagttcattatgaaatcttttgaaagatacatgagcaggaccaggctagacctggattccattagctttgtctattcacaaatagtggttagtattagaagagtcataaatctcttatttattttgctatcagagaccttcataaaactcagctctttaataaacaggttgagatactcagcaaactaaatggaaaaaatgataaactaatgtaaacacagcatttgccttgtttatcattgagtgcctgtctgtgcttgttgctttctgaaccttgaatgctgttactgcagaccctccctttgtgcctagtagcctgtgtcccttgggaaacctccttcaccactgtcctctcacttcagccttggctcctttctccagattgtggaagacattctccctgggagctccaccatcttagtatgacactgttgctttccccacttgtaccgtaacatctttcagatctaggcatgtgacctttgattccaacctcaaggacttggcctagcacatagctggtgctaaataaaagctcctggttacacaatgatccatccatgaggttgtgagctcattgatatcagtgttcaagtctccactcatagggtgttacagccatttaagtatagggagtgatggcaattccttttgaatctgtgggctgcatttggtatgcaggagatgctctgatgttccacgaatgggaggaaggatgttctggagcagtggagagaagcctgctttgatcacagtgaggatgcacccacagcaagagcagcctttgtgctttgactttagctggtggtcagagatggttgtttcaaaggctagggtctctgagactgctggtctaccaaatggtctgcactgaaaccattccctgggagcttgttttgaatgtacattcttatatcccaccttgaatctggatcacatcactgccatggtggtgacaccctattgtttattcctgttgtttatggcaaggtccccagcctccaaggctcacttcccacccagcccttcccctgctcagcagaatggggtgaataaaacctactgtgacatctttgtgcactggcgtgaggtgacagatgcaggaaacactttgtaaactgtcaagcgcctggcaactgaaagacatccgacacaagacagccattaagtaattacatgcatagcaacgctgaccagctgtggtccaagcagttcatatagtaccaagtttcctaacttggtgtcatttgagaacttactttcatgactttttaataaatgtatatcacctgtgccatacacaggtttgcttttcttagtttatcttaatttttcttaatttatcttaaactttaagtcagtatacacattttgcttaaatttgtttaagaaggaagttgtacttcaatattctaaataggccagtatcacttgacataaatactataaagataaattgaaggaaaacaaaacaatgttattaaaatgcagccagacaatagtgtctgttggtgtccctgagcccaagacctgttctctttgtgaaaaagggcagagagccagtggctgggaggttttaggcatggaataccaaatggactttttcctaattagagggcttgacgggaaactgaaaagtgaataatttgttccccccttgaccttatgttaagtgtcagcaccgccgaggacacctccatcaagccagctgggtgtgtctggccctttgaggggtgctgttgagtgctgggttctgaggcttgaggccggaggtcttcagtgaagtccctgaacaactcagtgagtctttgtctaaagcagaggggacgaggccggagtcctatagtgacccgagagtactttctcagtccactcttcctgtgtgtgtccaaaggccagatgagggctgagtgctggagtggggggattataaataacccctgaagccaactagagtctttgggcactcagcacttctcactgggggtgggggtgcagggagagcaatgcacagttgaaggcattgtcttgatgaggaggtttgagatttgttcctggatcctggatccaaacccatcaaccagggggtgttttcatgcaggtcactggagggcttctggacctcccccttctctatcacatctattcagcatgttgatgtagcatgtgggaggtccaaggtgcagtgctgggggatccgaggagaggaagcggcagtctctgtcgcaaggagtcagctcccctccagtgtggccaggtagtaagcacatgccatgcatgggctctgtgtcaggcagggaaatccagcaccagagggccagagcaggagggaccatttcttgtaggaggcttcagacagggatccattgtagtgcaagcatgcaggatggtgaccaccagtgaggccaagaactggcctatccagtgggaaccctcttgatttggatagggctggcagaggacagagctcccagaagccagtcacaaccaggacacatctggtgaggtccggacagctgcaggaaagccgagactaaagggggaagttgggacagaagggaagggcagggtggggtgggggagcagggcacatgttgtctggtgccagctttgggctgaacaggtggggtctgggcctccgggctgagggcactgcccgtggacacctctgccacagcctagcttcgcttgaaatcctggccatggcctgctttccacaccctgcttcatttcactatgtgaccgatatgggtacactgtggtgggggaacatggcccagactgatggaagaccagcatgagcaaaggtgccatgcaggagagcctggacaggggaaggggcagggctccgggggtcggcagcagttcaggtcacaggatactctggatctgaggtacccatggcaaggcagagccctggatgtgagcctgagctctgcccactgccagaggcgtgaattctggccaggtgcccggcctccaaggctcacttcccactcaccctatcccctgctcagtagaatgggatgaatcaaacttcctgcagcattcctgtgcaccgatgtgaggtgacacatgtgggaagcactttgtaatctgtcaagtgcctggcaactgggagacatccgacacaagactgccactgacaacagacacagctgctcacacatgcaggtcactgcggaaaatgctccaagagatggacagagtcaggctctggagcaggaacttcctagaatgatggagttgacagggccaggtgagtctagttgtggtggccatgcccaggcagctgtctctgtcccggggctgaattcctctcccctcttcctccctttctcaaagtcagccttgtagagaacttgcttcactcgggcttggccgactctgtgtgtgggtgtgtattttcaagaggagagtttctctccatgtggctctgatttatgctgatactgtcaagttgaaaaacacaaattgcttgattccacagaaaatcaatttgacaatttctttgctccccacccagcccttgacatgaacagtaatctttagggcacactggaaaagttaggaattacaatgtgtgccagtgtgtggatgctgctttgttttagttgtttcaattttttccagtttcttcttggggacagggagagcattgaaatatttataagaatatcattggccggccagtgacaagtaccctcaactctctcttagatggaagctgtgtccacgtgcaatcacagagttgaaggaaagatgaaacaaaggctactatgtggcttcttggctctaaagacaaatatctagatttcaatcatatgcattttccatctagaaatctgtcttctggagaaaacccatacctgaagagcaagccagcatacctgtgtgattctgcccacggagagttccattatgtaatctttttctgcttagcagagataaatgtaatagtatttgcattgttatagatctgatagatctggtgtcgaaacagtttgcctagatggaagagatatgcggattgttgaggctgtaagggacgttgaaagttcatcaaaataggagttgcttcctttgataatttcattctcaattggacctttagagggaagtttcctctttgtataaggaattatgcaaatgtttattttatagtggatatatttggattcctgtctcttattttataacaactgcatactaaaacaggcacctctggcaccagccccctcataaacttagctttctttaacatgttttaaaagcaaataattttggtattgtggtctgctgcatacatcatttgttgttgagccaggatattatttgagaactgcaaagctctctaggtattacctccctatataaaccatgtgttagaaagatataaattcagttttgaaatatttgttagactgcttttggctttcagtccgtgccaaacatgtgctttggtgacagatggagtcatgtgggcccctgaatgaaacactgcattgtgtatagactttgtcttccagcagttgggttgcagaagctgggagataaagaggatccaattgctatgaggtgtgttctccagtgagcataggatccttttccccctcaaatatgtcactaggttatttggtctcaaattctgtgccatagaaaatagtgctgtacactctgaatttatctagaataattaaatgtaaagcattctcatgttaacttcaaattttgaaactagaacatgtttcctaagaatctattgaaacgtattggctttgcgggcctgtaaaccattcaaggaagcatggacctaggattgccagataaaacaggactcccagttgaatctgaatttcagataaacaacgaattttttcttagcgtaattatatcctcagtattgcatgggacatatttatcctaaagaattattcattgtctatctgaaattagattcaactggaagttctatattttgatttgctaaatttgatcattctacttggatcccaatttatggttcgctctcataaacagtgactgtcaaagaacattcctcagtgatgaaggctctgtgagtttgcaagtccacgtggcacagagacagaggaaatctcagttcagtcatcctgcagaataaaaagagtgttctgttagaacaaagtggacgtagatcacatctactgcacttctgattgggctcggttgaatacttttttctcctcatatgcatccgttctctctcatctccccctcttgcatttgttcccacattgtataggcagagcacggaggtgagggcataactcggaaaggcatgcttgggcccattctctttccatataagaagcttcctttccctcccccatcctcccacgtgaatgcccagatcctgcccattcaaagcctgatatcattggcatccctgttgtgaagacatcctggaccgcctcaactgaatcaggtttctagcccaactccgattgctcttaaaggcactatccctttccgtcttctttaccagactctgtgctcccagtaggcaggatgcagtctaacttaagaaaacacccagggaggagcctccaggctactgacattcagaagaggtttctttttctctcttctctctgtccgtaacttctaattgagcactaaatgtacaggtgctaagacaaaggctttccacaaatcctctcctttctcaattgccccaggggttaagcaccctgtactccaaaggtcccacctttggtgaaaagcagagctcactggaaggtgttgttctagactcccatggaaacctgaaatgctgttgactctcagcctgtaccattggtaccccatttctgagcagcagcagagaattcgtcactggatgtctgactcccagcctccactctcagggcaggattcagggtgacccagaagtttgttttagaaataaacctgtttaatattcttaacacataaagtttcaaataaataagagaaaaacaggctaattaaaaattggcaataaatgtgagcaaacaacccccaaattaagaaataaaaataactgatgaaaatatgaaaaggctcaatttcagtgataagtaaatgcacattgaaacaacaaagaaatttgttttctttataagtggccaaacatcatttgtagggctttctctttataatgattggctattgacaaggcaggccaacattcaaattcaggaaatacagagaacgccacaaagatactcctcaagaagagcaaatccaagacccataattgtcagattcaccaaagttgaaatgaaggaaagaatgttaagggcagccagagagaaaggtcgggttacccacaaagggaagcccatcagactaacagctgatctctcagcagaaactctacaagccagaagggagtgggggccgatattcaacattcttaaagagaagaattttcaacccagaatttcatatccagccaaactaagcttcataagtgaaggagaaataaaatcctttacagacacgcaaatgctgagggattttgtcaccaccagcctgccctaaaagagctcctgaaggaagcactaaacatggaaaggaacaaccggtatcagccactgcaaaaacatgccaaattgtaaagaccattgaggctagcaagaaactgcatcaactaacgagcaaaataagcagctatcatcataatgacaggatcaaattcacacataacaatattaaccttaagtgtaaatgggctaactgctccaattaaaagacacaaactggcaaattggatgaagagtcaagacccatcagtgtgttgtattcaggagacccatctcatgtgcagagacacacataggctcaaaataaagggttggaggaagatctaccaagcaaatggaaaacaaagaaaggcaggggttgcaaacctagtctctgataaaacagactttaaaccaagaaagatcaaaagagacaaagaaggccattacataatggtaaagggatcaattcaacaagaagagctaactatcctaaatatatatgcacccaatacaggagcacccagattcataaagcaagtccttagagacctacaaagagaattagacttccacacaataataatgggagactttaacaccccactgtcaacgttagacagatcaacgagacagaaagttaaaaaggatatccagggattgaactcagctctgcaccaagtggacctaacagacatctacagaactctccaccccaaaccaacagaatatacattcttcttggcaccacatcgcacttattccaaaattgaccacatagttggaagtaaagcactcctcagcaaatgtaaaagaacagaagttataacaaactatctctcagaccacagtgcaatcaaactagaactcaggattaagaaactcactaaaaaccgctcagctacatggaaactgaacaacctgctcctgaatggctactgggtaaataaggaaatgaaggcagaaataaagatgttctttgaaaccaacgagaacaaagacacaacataccagaatctctgggacacattcaaagcagtgtgtagagggaaatttatagcactaaatgcccacaagagaaagcaggaaagatctaaaattgacaccttaacatcacatttaaaagaactagagaagcaagagcaaacaaattcaaaagctagcagaaggggcaagaaataactaagatcagagcagaactgaaggagacagagacacaaaaaaaccttcaaaaaatcaatgaatccaggagctggctttttgaaaggatcaacaaaattgatagacctctagcaagactaataagaaaagagaaaagaatcaaatagacgcaataaaaagtgataaaggggatatcaccaccaatcctacagaaatacaaactaccatcagagaatactataaacacctctacacaaataaactagaaaatctagaagaaatggataaattcctcaacacaaacaccctcccaagactaaaccaggaagaagttgaaaccctgaatagaccaataacaggctctgaaattgaggcaataattaatagtctaccaaccaaaaaaagtccaggaccagacggattcgcagccgaattctaccagaggtacaaggaggagctggtaccattccttctgaaactattccaaccaatagaaaaagagggaatcctccctaactcattttatgaggccagcatcatcctgataccaaagccgggcagagacacaacaaaaaaggagaattttagaccaatatccctgataaaatcaatgcaaaaatcctcaataaaatactggcaaaccgaatccagcagcacatcaaaaagtttatctaccatgatcaagtgggcttcatccctgggatgcaaggctggttcaacatacgcaaatcaataaatgtaatccagcatataaacagaaccaaagacaaaaaccacatggttatctcaatagatgcagaaaaggcctttgacaaaattcaacagcccttcatgctaaaaactctcaataaattaggtattgatgggatgtatctcaaaataataagagctatttatgacaaacccatagccaatatcatactgaatgggcaaaaactggaagcattccctttcaaaactggcacaagacagggatgccctctctcaccactcctattcaacatagtgttggaagttctggccagggcaatcaggcaggagaaagaaataaagggtattcagttaggaaaagagggagtcaaattgtccctgtttgcagatgatatgattgtatatttagaaaaccccatcgtctcagccccaaatctccttaagctgataagcaacttcagcaaagtctcaggatacaaaatcaatgtgcaaaaatcacaagcattcttatacaccaataacagacaaacagagagccaaatcatgagtgaactcccattcacaattgcttcaaagagaataaaatacctaggaatccaactcacaagggatgtgaagaacctcttcaaggagaacaacaaaccactgctcaatgaaataaaagaggacacaaacaaatggaagaagattccatgctcatggataggaagaatcaatatcgtaaaaatggccatattgcccaaggtaatttatagattcaatgccacccccatcaaactaccaatgactttcttcacagagttggaaaaaactactttaaagttcatatggaaccaaaaaagagcccacatttccaagtcaatcctaagccaaaagaacaaaactggaggcatcagactacctgacttcaaactatactacaaggctatagtaaccaaaacagcatggtactggtaccaaaacagagataaagaccaatggaacagaacagagccctcagaaataataccacacatctacaaccatccgatctttgacaaacctgacaaaaaacaagaaatggggaaaggattccctatttaataaatggtgctgggaaaactggctagccatatgtagaaagctgaaactggatcccttccttacaccttatacaaaaattaattcaagatggattaaagacttaaatgttagacctaaaaccataaaaaccctagaagaaaacctaggcaataccattcaggacataggcatgggcaaggacttcatgtctaaaacgccaaaagcaatggcaacaaaagccaaaattgacaaatgagatctaattaaactaaagagcttctgcacagcaaaagaaactaccatcagagtgaacaggcaatctacataatgggagaaaatttttgcaatctactcatctgacaaagggctaatatgcagaatctacaaagaattcaaatttacaagaaaaaaacaaccccatcaaaaagtgggtgaaggatatgaacagacacttctcaaaagaagacatttatgcagctaacagacacatgaaaaaatgctcctcatcactggccatcagagaaatgcaaatcaaaaccacaatgagataccatttcacaccagttagaatggtgatcattaaaaagtcgggaaacaacaggtgctggagaggatctggagaaataggaatacttttacactattggtgggactgtaaactagttcaaccattgtgaaagatggtgtggcgattcctcagggatctagaactagaaataccatttgacccagccatcccattactgggtatatacccaaaggattataaatcatgctgctataaagatacatgcatatgtatgtttattgcggcactattcccaatagcaaagacatggaaccaacccaaatgtccaacaatgatagactggactaagaaaatgtggcacatatacaccatggaatactatgcagccataaaaaatgatgagttgatatcctttgtagggacatggatgaaattggaaatcatcattctcagtaaactattgcaaggacaaaaaaccaaacaccgcatgttctcactcataggtgggaattgaacaatgagaacacttggacacaggaaagagaacatcacacaccagggcctgtcgtgggatggggggaggggggagggatagcattaggaggtatacccaatgtaaatgactgacgagttaatgggtgcagcacaccaacatggcacatgtatacatatgtaacaaaccctagaacttaaagtataataataaaaaaagaaaaaaatataatgattggctattgagttgtcaacttgccagtgcctggtcgttgctgaatgaagggaaaccagtcacatttcaggaccagcagagaggaggagggaaccctgcccatgccccacccctccaccctccctccagccctcatcagcggattcaccttgttgatttatggtgctacactgtgtgatcagacgccgaaaggagaaaaactgctcccttggatgacatattaagtgctcatcttgcagagaaatgaaaatccatttagaacaattaatgcatcattagtgtggattttaaaccaaggcagtgttctcagcctacaaatgttcttgctctgataaaagacctgccagccgatactggattggaccagttctcttgtctgtgggaatagatcagaatcaagatgggtattgttgagaggaaattatttagaagttcctaaaatgaacagttttctttactcttttggcttctctatgtaagatgaagcaaggatttaaacagttaagcacagtgtttagtttcaaacactaagaacaaaaaaaattctcattagaattatttaaaatgttcctgggtcaatctatatgcctaataaatatctgtcaaattgaatagaatgaaaagttcttcaggacgctaattctaagttgtaatagttttgtttatcctgtttgactatttaaattatgattgcccatttgggtcctccaaattcaatggccaaagtcaatggctagaaaatcaaaggttgtaaaaatcatgtcagcacctacctctagatagccacactttctccttggccactggaacttaggcaggtgtcccctaactttgtgattccaatcattgcagtgcttgaagtcccaccttattccccatctcaccctattccccacctgcatcctgcccaagccacagtcatccctgcaagtggggaaaaagggaaatgaacattcctgctgtcgggcatggggcataggatgtgccccttcttgttgtcttttggaattcagattctattttcccatgaaaacgcatgaggtttcagatctagaaactattacccacattagaagtcaaagtgcatttttctcatagagaaaatgaaatgttctaaatggtgatatgaaagtcaactctatgagttaaaaggcatttaagagttaaccttcaaaaactaaccgagtctataaaaaatacatttcaaattcaaatcatcaccctgtgcccactgccttctggtgtgtagccacgtacatgctggggcttagcttcccctcagctaatgaagcaggcatggatccttaaacagagaaggaaatatcaggctactatgatggcaattgctattatggtcccttagttctctgttctcctcttaatttggcttctcaaggaagctttcctgctgggtagataatgaacaaaatgttttagatgaggactctggttgacttggcagttctttctcattaaaaataagcaaattggaattctggcttataaataaggctcatgtggatttggttgtgtgcatccacctgtgagggatcagacattgcagggtgagctaaaagtcaatcactcatcagagtgtccatgagaacgaagccttggaccccattcctgtctcatcatgatcacaatgaggccatggaaatttttaatttgtttgataataattcattgcacaaatacttgtctgcacatgaagatatagcagtaaatttgatagacgaggcccctacctcttgttattcctatttttgattgaggggtggtagagacagacaaagaggtaaataaataaaacaagatttgatactgatagtggctgtaggcgggataaaggatgacgggccgggaagcaacttgggttgggaggaaaagtatttaaatagggaagactctctgaggggtaacatttgagcagagacttgaataacaaggtttgggggcatgcgaaggtttgagagtagggtattctatgcagagggcacagcaaatgcaaaggctgtggccaggtgcaatggctcacacctgtaatcccagcactttgggaggctgaggcgggtggatcacgagctcaggagttcaagaccagcctggccaagatggtgaaaccccgtctctaccaaaaatacaaaaaattagccaggcgtggtgggggcacctataaacccagctactcgggaggctgaggcagagaattgcttgaacccaggaggtggaggttgcagtgagctgagattgcaccactgcactccagccttggcaacagagtgagactccacctcaaaaaaaaaaaaaaacaggccacgaggtaggacatagctgagcactattaaggggtcaggaggctggtcagtatggtggcagtagagagaggaagatggtgctatcaggacatgaggttccagaacttaggaaaaaagtctgaatcatactccaagttttcctaatcagcatgagtgtttatttatcacacagtaggattatgagcacagcattctgtaatttggctgtataggtcagccccctggcttcatgatttgtgtgatcctgggcaagttacttaacttctgtgcctcagtttcatcatctatgagatggggataaatatcacagggttgttgttgggtttaaacaaggtaagcttataaaagattagaatggggcttccttgcatagcaattgcttaattagcattcgttgtaatcaataactatttcttgtttatgtaatctatgttcaacactccatgtttgccttatgaatagttctcatttatccattcttcaggctttatacaatccattcttaggcagagaatgtgtccattatgggtcagagttagcctgcttaaaagccctagaacggggctgggcactgtggctcatgcctgtaatcccagcactttgggaagccaaggtgggtggatcacgaggtcaagagatcaagaccatgctggccaatgtggtgaaaccccatctctactaaaaatacaaaaattcactaggtgtggtggtatgcacctgtagtcccagctactccggaggctgaagcaggagaatcgcttgaacctggaagtcagaggttgcagtgagctgagatcaggccactgcactccagcctgggtgagagagcaagactctgtctcaaaaaaaaaaaaaaaaaaaaaaaaagccctagaatggcttcccacttcactcaaataaaatttaatttccctgccttgaaaggcccgccacagtctgagccttgtctaccacctggacttctgctcctccctctctgcatcccatctctcactccatcttagccatactgactgcctggctgttcctggaacccacaaagcactctactgccttggggttttcacattcatgttctcttgatgagaaacctgtcatagatgtttgctcttgttaaaggtccctctcctttaagattgaaagagggagaacctgcaggtgatgaggctatctagaagtattcagttaagtactaggagcatcttttagaagacaaaagaacaaaagcaaagcgcaaaacaccaactggagttttgtaagaagaggactctgccaaagaagtcagtcatccagacacgtggcttaagaaagggcgatgaatgtggatggtattgacaagacgtgtatgattgaaaacgtgttggtttttcgctgggagatgaagattaaaaacctttgatttttaaacacgttgaatttgaggtggtgatggtgacaagacattgaaattaacatgtcctgtagataaaatatagactgtgcttgggtgaagtggccagatgggaagaaaatattgatttgggcaacatcagcttaaaaattaatgagttctctggggaacagtaagggtagaaagggaagatggccaagagctgagacttggggaatgttcaagtggaggaggcaagacctgggcagaggaggggaagaaatccagaatcacagagtgctgcccaagttggtgtgtattttggcagaaggtggtcacagatacccagtgaagcagcagggatgtgagagaatgcctttacatggagctggggctttagtgtagatgcagaatgacttgtttttcactgttgtttaattccatttaataagtttacaggacttaatgacatatacaaggttccattcttgttgttttgctgttaagatccaaaaattattcctaggtgtacattttaacaattagtttcattttccccttacatcatttcttgcaaggtaagcattgaagaattctgaccctctgcaaaagcattacaaagtgaatgtatgtatttgacatgcaaagggcttgggttttgccattaattccaccatttatattattaggcaactttgagaaaaacctatacaactctatagtttagtctcacagtgtataaaatgggattagtatctcactcaccagtaacggttataaaaatgtaagttacaggccgggcgcggtggctcacgcctgtaatcccagcactttgggaggccgaggcgggcggatcacgaggtcaggagatcgagaccatcccggctaaaacggtgaaaccccgtctctactaaaaatacaaaaaattagccgggcgtagtggcgggcgcctgtagtcccagctacttgggaggctgaggcaggagaatggcgggaacccgggaggcggagcttgcagtgagccgagatcccgccactgcactccagcctgggcgacagagcgagactccgtctcaaaaaaaaaaaaaaaaaaaaaaaatgtaagttactgttgtaagtgactttgctccccacagctgggaggcaccataggcatggacagttatgtttatgtgtagtagagacagctcgtgcttggggtatgaatctatttagacatttatgagaagctataactagctttctttgaatttcaaaatgacacataaaacatcttttccaaattgtaattgttccatagcacttgattgcttttatttccaaatggctctgtcctctaacacgcccaaggctgtgtatctgtggtgccagaagaattgttgttttgtcatcataagtccaaaggatctttttaagtttattttttcatcataaaagtaataatgtgccagttatagaaaagccagaaatacatacaaacataaagaagaaaatcataatgaattcatagccccagcactcaaagaaagccagcaagagcattttggtgtatttctttccaatgactgataaggagtaaacaaaaaaaacaacctaaaccaaatgagatccatgtgtgatggttaatattaggtgtcagcttgactggatggagggttgcctacatggctgataaagtattgtttctgggtgtgtctgggagggtgttgccagaggagattggcatttgagttggactggaagaggaagacccgccctttcccaggctggatgggcagcatcccatgtgctgccagcacagctggaacaaagcaggtggaggaaggtgggatgatctggcttgctgaggcttctgatttccttctttttctgtgctgaatgcttcctcccactcctcctgcccttggacatcagactccaggttctttgacctttggactctgggacttgcaccagtgacttcaaagcaggaagaggaaggtgggataagcttgcttgctgagtcttctggctctcttccttcttcccattcctcctgccctgggacatcagacttcagggactgaagacttcagactgtgggacttacatcagtggcttcccaacctttggctgcagactgaaggctgcactgttggcttccctggttttgaggctttcgggctttgacagagccactaccagcctctgtctttcccagcttgcagacggcctgtcctgggacgtcgccttgtaattgtgtgagccagttcttcctaataaactccctgttttatatacacatattctgttggttctggaaaacctgagtaatacaccatgtacatgtttgcatctatgatctcatttgatcctcttgccggccctctgtggcggatgttgttccatagcccagctccactcaccaaggatctgaatagcaaggaatgcaagcaacttgcccagggtcattgagagcgtgtggtggatgcaggatgcgtcttctgactcaaaatattatgctgcttctcttacacctgcctacatcttcgtaattcagcctgccagcgtggtagctacaatcttaggctctgagagaagctatattctgtattgacgtggttttgtcaatgtgtttgtgtgtgtgtcacttggtgtcaccttcccaaacctagtggcagtttctccctttaacttttctgccatcccagacccttgtagccaatgatgcaaaaaatcttaagtttttatttcaacttgccgtttctgtgttttctagagtatgctggagagtactcagaaggccctttaagctgcttgagaatcaattattttcacatcctctgcctttttctactctaggaatccttgtcagtgacaaggttttagcttgcctgcaggtactgcatcttccgtctgagtaaatagcaatgtcagaagagcagtgaatggcaaacatgccatctttctggtatttggagcccccagtgataaccagtcatccctgagccttttgatatgtactgaactgctccagaatgacatgattattcttgtaaaattcagattaaattttaaaaattattcttagtagacttcatttttagaacgattttagagtgacagaaaaattgcaaagctagaacagatggtttccagacaccccacatcccatttcccctattcttaacatcttaccttagtattgtacatttgttacagttagtaaaccaatatttgcatagtattttaaattaggtttatactttattcattggttcttactgagtgcattttttctgttgctcagtcccatccaggatacattacatttagttgtcctgtctccttaggttcatcttgtctgtgacagtacctcagactgtccttgttttttatgatgttgacagttttgacgattactggttggtatattttagagcgtacctctttgggaatttatctcatgattagacgggggctgtgggttttgaagtggaagatcacagatggaagtgggactgtcatcacatcacgtcaagggtcgtaccatccacaggacttatctctgttgatgttgaccttgaccatctggctaaagcagggtttgtcaggtttctctattataaagttacttttttcagcttaacttttgctattggttcttttgtggatccttcacttacgttattttaaaattgcattactaatttacatgtagggagcgtgcagctaaaatgaaagaactacatcattatttggttaagattgaaaatgtgaatctgaaaggaaatcttgctatcatttataggagcatcaccaccatattgccctgagacaaggagctgctcagttctgtaagatttcctttaggtctcggatatttaggggctaaaaaaattgcttcatcagtttccgaagccttgtccctggcttcttggcaaatggctgccccaactttttgctttcacttagatttttcaaaaggatgtttatcttaattctactttttgcacctcagattgattctccattttaaagttcatgtaggtgttgataatgatttccctttcaagccagaactccaggtgtgatatttaagtttctcttgactaatgatctcatcagagtttattttctcaatggcccactgggtggcttaggaggatgcccactggcatccacttatacactggcattttcaaatgatcaatatggagttgtgatttttgcaccaatagtgtggtttggttaaacagacactgcctcaaagtctagaaacttggattctgatatctaagacggatttcatgcattaagcttttcgaaagcgctttactgtgttgacttatttgagctcccttaacctcatgagaatcttagaggagagaatgcagttttcattttgtagacggtagagcctcagatgtcaggctttgacaaaggaaaataaatcgaggaggagtcaggaccagggtcaggtcttatggctccaagatgtcccctcttcactgtgtatgtcttagagctgctgcatcagtctccacctcttgtgaaatggagcttgcgcggatgtaggcatcagggtggtgtggacttggttatagcctttcctgtttcccttcataagttaccaaaggaaggttggctagagcaaggatggggcaggactcatgcaggcagccaggctctgggtgacatgaggggaggatctggagtcactttgagaggtttcttctttgcctgctttcccataaccttaaaaactttcattgcaatcttgactagcctgaatcagatctgaaaatgacaaactcagacaaggagacaagcaaagcaggcacacacttcccatgggaaagcacaactgatgatcacagcagataactgtcagagatgaacgatctaatatgtgtttttccactctgaggctgaagcaaactggccattttatcaaaactgcaagcagtgtatcaggttacgcagtggcaaaaaagcttcctgcccagtataatctatccacatttcttatttaggtaactatgagttctgttgatgcccaaatatatattatgaaaaataaaatatatgcaaactgtgtattttatagggtcatattttttccccgggtttctcaggcttgaatgtatccatcattcaggtcccgtgtttataatttatcaataagatcactccataaaatatattctgatacctcacagctgtgtataatttattctgtctatccgtgcagtgaaataaaatttttatttgcatcatctaaaagaaataccagtgtataaatacataagaaaagctcataagaaacggtcttctgactacagatattgctgaggggctgttgtgcagccaatgaaaaagctgagagatggcttgattatccatgtacatagataatacataccgtactcagcaaattgtgcagtcactcaatttctcaaaaaggttgcaccacattctacaagggctgccacagcctgcttctaaattctccttcgaatatttggaaataaagcctcttcaaggaaaacatatttgccaaaaagggctccttttggattgagatactggaatatgtaggtgaaacaggaaatgtttcagtggttggaatattttgccttcaggaaactaaataactgtgtctttctcagccactaagagccttggaagaaacagtccagaggatggaggatgttctttacacttggtttctgtagcctcaccctgattatctaacaggaggccccaccaacacctcctgaacttccccaaagtcaaggtgtggagttgctgcctcccctacacccctccctgcaggagcacctgcaaacagttcgactagaagacccggatttcacgcatcatctccttcctcctcacacatacagcttctcaagggaagtctattaagtgcaaagattcttcctccaggcatctgaggcctgggtgaaaaccttccaggccttttggtagtgtggctggaatacccatggaaaccatcccatcctccccattactggggttgggttgggagtgacacaggattctagttttggaactctttctctgcccagtttaacacatccttggcaataggattgatttgtggttattcagtttaacaattcacttgtgttggaaactcagcgctgccaggagtaccttataattaaactggttcgtttatgtggaggatattttaaaatgctcgcgatcgctttgacagttttagctgactttccaaagactacgccaatgcccgtggtaactctcggcgtggtgtggtttttcagcaggtgaagggaaagttcagatggatctccagttttcaccccataactgctagtattttaaagctgccttaatccaattccaataacatgacagctgtcttataagttcagttaattgcactctgtagtcggcctctgcaggagctgtatagctggatcagaactcactttgtttctctgcattccaacgtgtgaatcccgtggggtcctgagcaagagaccctggtcttggcaaagcttcgagaacagtgccgttgaaaccggccgatgcgtccctcacacatcatgtgatttccctcgggctcaccacgctctgcctcattttacggaaaaggaaagtcttgcgctccctctactgctgtcgatcctcgtggctatatgtgcagctggaggcttctcatcatcagctctcagcttataagctcaccatccccaacaaaaaaggggggctttcctggcctgtccttcagaaataccatccccagccattctgctgtcaccctgtttttcttcttaatttttttttactttgaaataatgtttgattgacaagaaggttgcagttttagcagagttgctgtggtcctgctgtttcacagcacttctggctctctgaaatggtcttcttttcatcgtttttctctcccagtacaagaatgcaagtcctgagggcagttttctctacgtccctctctgaaatgcacaggacggagagagaggcaagccttctgggatgaagctgtgttcaagagatgagggtctcagcagtatagacggagggagctggctcactttggggctgctggcttgaagaagaaagaatgggctttttgaatagaaggcatcagatctagagtcactgacaagagtgcctgtcaccaggtagacagttgaatacttggtgagtggtgagtaaacacgtgggacacaactggcccgtggccccgcagctgatgtgtggtagagctggtgctgctgcagggtgcgtcttcctccaaagcctgggctattctgcctttgagcacatggaaggcatgggctcaagcgacaggaggagggagacacacttactcaagatctccatgctgccagtggttgcacccttgcagccaggagaaggacttctgatgcttcccattcagagagtcgactcttttcacctccaagcagccgttcacgggtgtcacagatatcaccatcagagccagcacctccacttgctctgccagaacccttctcgcttgaatgcaggttcatccctgaagactcagcccatccacaccctgaagaccacacgtcctgggcccatagtcccctccctccttccttccccatgcggtcgagggttgcagctcagccctctcccattggctgtatttcggactttcagttcattcctgttccttgtcctcttggtcctcaacacctgagagttttaaacactctgtgaccagcttgagaatttctcagaggctgtttcagacagtgactacgggagtagtaatcctttggtaacctgaatataactgcagacttccacattgagcatgataaaatggtgtggatttaaaagtatttggggaactgtaaaatgtctaggattaaaatttcaataccatttgtgcccaataaatgtgaactctttagtaacttaaaactgtgctattatgactcaggtctgaaaattatgagtcctgcttgaagaaatgggaataacatgtgagggaatctggtcccatccttcaccttgagggatatactgtggtcgaaccaaatagcaggagcatgacctcataggagagcaagtccagagaaattagcgtatttgttgagaaagtgatacaccctccagaagagaaaaatgttatactttccgtgaggattgtttatggaaatgggtctaaattgaacctgtgttggtatattaactggttcaacagacaggaccccaagaaacaagatcatataatagtttattgaatgacttgatttttttaaaacataaaccagtctagtcagtctgaactggaaaattaattttgtctatagaatcacttactaaagcatataaaattagactccataagtgcagagaggagaattggcattatgtttaacagattcactgggacttaaataaatggatttagtcttaatacagctaaagccatgtgacttttaatacagagcagatcctaaataaagtatcaattcatcatttcaaaaaagtcacttttgcatttttgttgcttgttgaaggactgaattatatatcttgtctatgataataccccagcacatgttacaggtcttgaaggaacaaattaattaacttttgttttctttaagttacaaaattttcatggttagattgacagagaattcagcagttttaacacttttcatgacttaatgggttctagtgtttccctgggcttatttaacttccaaatattttcactgtgtcatttatgtaataagcttctgatgccaaactcttcctgactagagtgaaatatagggctgttttccttttgattcaggggtgagcttatggaaccaaggaagagctgatgaagttgtcagtgcctctgttgggagtggggacctctggatcccagtgaagagcttcgactccaaggtgagttcctctccttttctcagctttgagactgccgaagcttttaaatcacattagctgctttggtattctctcattcaagggttgtctctactcactttaatgctaactctatccttagagaatggaagctttattcttaagccaaaaatatgcaaaccaattttgatgtgacagtgctgatgagggatccaacattatttgcatctactgaaaattagtttttgaacaaaaaccaggggttacagtcccagatatacaacttccatgttcagtttaactgaatgaatgatgggcatttttctatatttatgtctatttaattaacattgatttcctcgaattgattattgctagaaatatatttatgcaacttaaaaacccatttgtcatgagttttaatgcaatctaaactttatttactttgacatgtttgatttgagccttttatgatgtaaaagaataatataaaataattgaaataatagtgattaaatttaatatcttggtgcgttttatctgctaaactgacatgactttcttaaatttcagtgcttgtaggaacagttggaaagtgataaaaatctatggaaatatgagctctttgaagagatcatacagatggcttggtccttgcattatatagaactatttttagatcatttttcataatagcagattttttgaagagcagttgagattgtgaacatcctctgtcacttcctggaatggttgcagtgggccacctttatatgagtaatgataaggtgatttccatctagggagcttaccttggaaactgagcttttagaaaggttggtggtttgattaaaaggcccaaatgccaaatgtgcacattttttctaactttgttgtttcacagacattgttgcaaattgaatatacaaggtacaagtcaagtatagtggtgttgatattttctggaagaaaaacttaagatattaaagaaaattccatcatgctattggtcagcaaaattaaaaacaacataatagatacagtaaaagaggagtgggctttcgttataaagaagttgatttaaaatattgatatacatgaataatagaaaaatatggaataatctaaagtttcttggatgttgggagccattatgtagactttccctggggttagagttgccagatttagcaagttagaagtacagaatgcctggttaaatttggatttcaaataaacaatgtatttaattttagtgtaaatatgtctcgtgcaatatttgggacatactttttttttttttaagtatttgttgcttatctgaaatgcacatttaactgaatgtgtcctgtcttgtttctgacaaccttccctggagggaatcggagggacaagctgctgagggctatgggcctgccgctggggtggaccagctcaggccttctctggtttgtgacccccagcttcctccttcctaccctccagccacctggcagacatcacaaggcatgttggaggagggactggcacatctactgctggccaagcttaccacctggtgcttgtgggtcacaagcatcatcttttagaagactaggaagaaccatgattattaggtagctgtcccaactcttctgggtttctgtctccagaatgagagccctgtgggtgacaggcatacacctactgcactaaagaattccaggttagtgacgttatgtaggggcatgatgacttaggtaagttgggaacagcattttgttgtaatgccagtgggctcatctcaacatatagtttatggcatcagtgtatggccataaaattacaatatgtactcatatttggtgggtaaccccgaaagcttgtgtgaggagtggtgcatgtcaatgtctgttacgtgtgtgtacctgtttgcaggaattccccatggggaagacgtgtatacatgctgtgggaataggcattctggccaaaggtgtgtatgtgtgtatctgtcctcattaccagtaagtcaagattttcattttgaactgaatcatgcagtatatcttcagtatacaaaacatactcacgtgaagaatatttttgcagaacaacggtgcctgctgtgcctcagaatatagacttttagatttgcttctcactccttgcctctttctgttcagccagtttttaactaagcacctattatgtgccaggtgctaggcatacagccaatgcagaaggcagacacgctttctgccacctgcaacttacgttgcagtaagggaaacataattaaataaattcacattgtgataagtgttaagaaaaaaacaacaaagtattctaggggccagcagggaagatggattttgatagtttggccaggaaagccctttctaagaaggaaagatagttttttcaataagttctaaagagccagccatgagaagagccagagtgtaagaggctggaggagcagggaggaggcaggtgtgtctagagcatggaaaataagacagacttggagtgatgcgggagcaacaggggccaagatttcccacagggctcctcccatgtgtgaactcactgtggaagtagtagcctgtaggaaacagacattcaccctgagatagcgacataaactgtgaccttctttctctggtaaatattctgattttatatgacttaccaaatcataacattaattttttgtgactctttttccccagaggtgacatgcagtgttcacaaccatgaaacacattccttatttatacagaaatgcctagctttttgatttcttcgtattattatttatttatttattttggtagagatgagggggtggggagggggtaggagacaggcctcctttgtcacctaagctggtctcaaactcctgggctcaagcaatcctcctgtctcgatctccccaagtgctgggattataggctgaaccactgtgccctgccagaaatccctaactcttaaacattttatctgatggccatggcaagtccagtaagccagatctggaagtttggccagcaatttctggctgggaatgccatgggaacctaaagaaagggggcctcaaattccaagtcacatcctttctggctttcttccggacagatttccacaactgttttcctaaaatgaagatctaactcatcatgattttccttgaaaacctcagaggcattcctcacatccgcatcctagagtgtgaagacaaactctaggcttggcatgaaaggcacgtcgctctgtgacccagaggcactaaccacagccccacgccatggctccggggctctgactgtccctccattctctcctcatgtgcattcttcttcatcctatggtgccatagcatggggccacccctgtgacctcaggcagcctggtcacctgccccgctgtgctttgtctcaaagcactttgggctaaaaagtggtaacaagttcctgggggttcagtgactcattcccaaatctggattatgtgcctgccatgcacctggtgctggagctgcatctctgccctgagggtggtcaggaaaggcctctctgtggaggtgacatctgaaggtgacctaaatgacatgaagggtgagcctgccatgtggagttctggggaagagcatccaggccgaggaaacagcgacagagggagccaaagagggagcgtgtagagaggtgagcagggccctgacaaggtagaacagccatgagaaggttcctgggggcttggagcaggacgtgcaagtgagttttaacagtgacctctgacagctgtgcccagactgcagtgtagggccctgaatggaaatgaggagagccatggggaatccagtgcaactgtccaggaaggagagggaggcgtccacactctgaccacggacagcaccagaagcgattggactggagacgtactttgaagggaaagtttgttggacttgcccgtggattcaaggtgttaaggacaacccctgtgttttggccctggctacataggtggcaggagcttccatcatatacacccccaaagagaaaggaccccctgtctaatttggtgttcaccacgtcattgacttactatgtatactggttctcaccctagctgcattttagaatcacccagaaacttttacaaataacagtgttcaacctccagttgttgagagttaatttaaatggtttgaggcaggtccatgcagatttcttaaaaaaaaaaaaaatactccccggtgattttagtgagcacccaaggcttagatccacttggggaaattgatgctgcatccaatgccagattgctggtcaagtcgattcggctgatttaggtaaaattactgtcaagttctctgtctctttctttctgaatgggatgttagaatgtcctttccaaatcaagaatcaagccatcactgccactgataatttagtggaaagagtagagggacaggaaaggaggtgaccttgtgtgtgttggagagcttgcacttttttgttcattggttgttgtctataatgcagggataaacttatctgcattccctccctctaagggtcattgtgagaatgagatgaaacgatggctgtaaaatacgctagaaacttaacactactacagaaatgtaaggtgacactgaaagtttacagtgtctttaggaaccaaattccaatttcatgtcttgaaaaaattaaccgcggaaccagcgaagacatgtcaaaatgtgattgatcgtgagatgacctcacttgagctcggcctttgaatacttcaggaaatgtccaatttccagcttccttgagtgagaatgaagttacagaaagagtataagaaatggaaaatggaaggcaaacccattagaacatgaaaccaaagcttcccttagcatatggcaggtctcaaatatcaaatagcagctaattaaaatgacagaggcacattctactccatacatttccatttgcctttttttacagctgagaaaacggagccctgctctcccctccaataaccatccccattctttccttcacagccagacttcccagaaaggtgatccgcattcactggcttgcctccccccagttccctcccaacccttggtagcagctcccattcccaacatgtcattggaatggcctttgccaaggtcagagatggcttcctaatttccaaagccagcacacacctttcactctttatcttacttatcttgatacccattccctctcctcctctgaactcctctcttctttgggctcctgagaccccgttctcatgtttcttctcatatgtttttgtttttgcttttcattagctttcctggctctgtccctcattcttggtgtcctctgagtttctttgtggccccacttctgatgaagggtcccgctggtgatgtccctctcaactgtgacctcatggtctacttgcacctaggggctcacataagtgaaaatagcagtgagagctaccacacgtggagttcccactgtgtgaaccgctgtatcaggtgttacgaacaataacttcggcttttgtcatctagcatgcattgacttaaaatccacacctctcattctgctttgacccctgagatttgatcatctacttccaatcaattacaggtacctccagctgaaagttcccaattatgcaaatgtattgtcccccaacgtagactctgcctcccacttaatttaattgtccctagaagataaggttgtcatcttccttctcccctgaaatagtaaggtttgaaacacttcttaactctactggcccagtatcctgacatgtgcttcttctttctgctgtctaccactgccttcattagtcttcctccattctacaaaaggaggtagggtactctgtctaaagcacagatagaacctgttcccttcctgctttccagtccttcggaagtcccggatgacacctgaattcaaagccaggcttcttagcatgatgcccatgggactgggtagcctgggccatctggactctagagcccccacccctacatcttagccatgaagcttgtcagggcagccagttgcctaaataggccacgttctttacaccatgcttgcactatgttctgtccccatgtcccctgactccctcagtcctactcattcttgaagcaccacttaagcactcattcttaaatggcaccttctcttgtgaaacccatcctgaacccctggcctcctggccaaattcttccttcccatacctttgtctttataagttgtccacatctctgtgatgtgcaatcatatcatgcacacatttaattcatgcaaattcagccttgcacatggcagaaacagatgctgcagagacgcaacttaagtgacataggtgatcacatccccttgggtccccaaggagcatgtgggcatctgctgttttcttagttccttctgcctctcatgaggcaagcttcttacttcctaagagcagttctagttctttctgttggatatcatgaaatagcgcaacccctaaaataagccaactcgactatgctcaacccaataagcaatgccccagtgctctgtggagaagaaatgctgaacctgtataaaagcatgaaagctgtgaggctttcaaagattaatttggactgtgcctcaggtgccacctctaccttctatactggccttagaccccaaccatgcatgactttgggattcagctctctggcgcgatcacagagtaccatcattattagtttttatccctgcttctcccaaccagcctgtgccctccctcagggcagcagccacagctctgtgcccttccaccttggtgcagtgcttggcacagagtggagtgattgcaggatgcttgttgactgactctgagactttatccgtgcctggatcctgagccttgcaaaccactctgactaccacaactttttagatgtttcctacctccttttggcaactctgggtcctttaaaatcatttggaggctgcgtctagctgatagaatgctaccttcttcactttagtgctatgtggtatcttacctgggacaccgccccaagtgtagctctgtgccaagagcagtgctgttactctacatgggtgggttgacatagccagacctatattttttatctaagggattattcgagtaattgcaggagttgctcaggctagatggtagcacctccagcttggctgaacaggctcaatagttagcctttcagacttaggaagcatctattttacattagcttccaagccagccaatggtgtttcctcttaagaatgtaatgactaaaatacctactgtggaatagatatcatcatatgacatgcacagtggctcatggttggaacactgttcccagactctctgggttcctgggtatggtctgtcccactcagtttcttaccttctgtgggaaccccaaccccacccttggcctgacaatcctcatgaagctgtgtctgccacacaggaggctgctggaggccccaactcctgcaccagacctcatataacccatcattatggagagaggatttggagaggtaaaagctggcacccttgtatcttgtctgggagctcagctgtttaaagaatcatttccatgcatggtgggaggagaagaaccgtggatgttggaacctgcagaaatggattcggactccctctgccttgctgtgtggcgttgggcttgtcattcgcccttgctcaggctttgtttccttagctgtaaaggagatggtgatggtggccttgtgacctgatgccatgccctacacatgctggatcctcagcaaatgccagcctctctcctgtccctcaccgggtcctcctatcactgccccagggctggataagcctttgctgtgtgtggggggagggcactggcctgggagttcctggatgtgtagcagcatccctgatacacctgactgatgccagcgccaccctcttctagtcacagatgtctccaggcattgccacgtggcccctggggtgtaaaattgccccgggttgagaaccactgcacggtgagaaaagatgtggaaggacaggaaactggcagttactgggatccccgtcttggccttggacggagccagactggggttctgcagatttttctgggaagagctgaacagtaaatatgttcagcagcacaggtcacaatgatacctgctgaagcgactcaactgggctgttgcgtagaagcagccctagataatacataaatgaatgagcatggctatgttccaataaaacttactggacgttgaaatttgaatttagtatcattttcatgtgtcatgaaaaatctttttaaacaattttagaatatgaaatgagtcttagcttgcaggctgaaccaaaacaggcagtgcattggctttgcccgagggccatagtttataacccctagactagatattccatagatatcagctcgctggatgcccccagcagccctgcaaggtggatgctgttgtgcacatgaggttgctgaagccccccccccgacccccaggtagaaagttaagcgagaagactagcatctgggccaaggcctgtcagatttgaaatccagtattctttgcatattcctctgctacctttcagaaaaatctttaactttctttcccctgggcatcatatcaggactgcttcatacatcttgactccagacagctgaggtcatggttcagggggcagacgtggtgagcactcgccagcgctctctccctccctgtctgtcttgcctccgagggagatctggctttcttcaacaagatgtgattgttgcatcccaactccctgccagggtctttcctgttcactcctcctttttggccaacacacaaagaggagaaagcaggccaaggtattgtacttgtttcaactgtgtccctggcttagggagctctcattcaaccaaggaagggctctgcatttccaacaacactcaccacccactcgcttgtttcttgtgacctcttagcaaggccttaatatcatacttttaaattgtttttattgaatcgggttgtcttagattctgtaccttttccttcccctacaagcttctgtcatcatcattaaactgggtccttttgaaaaaaaaatcatattttaaaataactgaacaaatttggataatgcaggagatatcatgatttaccttcttgagacagaaattgtaaaatatatttttgtaatcctgagtaatgctttttatgtttgactgacatgtagggcttatagttacttgacattaggagagaaggagtttgatgaattctgttttcagttgtacatttgcccaaggacgtatgaatgcttgttgtctttgagacccgaggtcaggttcccaggaagcaaggatgaatgggacccaatcctgcccttgagaagctcacagactgtagtaaatttgaataagtacttagtcagacatatgggattttaaaaaataaacaacttattttaaaaaagttttggatttattgaaaaattgcaaagacattacagagaatttttatatactgcataccttggttccccatttttcacaattatctttgtgtagttcatttgtgacaatatttttttctttttaagcctgacattttttaataagagagagaacattctggggattgaggtcatttggaagaacatataacttccagaaaggattaggattctaaaatcttactttaaactgaagagcttatcttcccaagagatttaatggtattaatgttgcactttataattttatgtcagaggaaagctgaggaagccttcatctacgtgtttactgtggaatttctttgaagttgcaacatataaccagtgaggaccgttccttaataatcactcaataagtagttgtgatagtgatgaagatgtttttgttcaaccaaaatgtaaagttcagatttttttaaatcctcctattctttccctaaaaagtgagaaacatttttatacctatcctgacagtgcctgcaaccacgtatataaaattatattaaaacaacgcttgactacagcaccgttgtagaatgtaacatatgcctgcatagagagccgctgtgggaagaatttccttttggatatatttaagacactcctcatgctcttgtgtcttgcacgtgtccctgagaatgtgaggaagacatgcattgttggtggtgcacactagtgttttaccagcattttttgttaccgcctgcctaaagagaaaaactaaatgaatttaaatttagtttctttctaacaagagaacttgaacactaaggaataagattttattgggttgtgctaagctaaactttggagggtaaaaacctttgtaatagcgaaggttttcgtccccttcctagtaccaattttgctcatccccgttgagaatgcatggtgggcaccacacgtaaatggtcaaaaggaaacacgtgtctcccaagactacatgtgtttagagaaatctgcccattagagatttggggcaaggaagaataaaagtcaattcccacccttccatcctcccaagactgctcttgctagatctttaaaaataagctttttatataagaacaatttttaatttataaaaaaattgcaaagatagtatggttctcatgtacctcacaccaagtctcccctgttgttacacttgtcacaattaacaagcccttatcagtggattattaggagctaatgtccgtaccttattctgattttcttagctttgactcaatgttcgttttctgatggttcatctgggacctcacattatatcgtgttcagtgtcgtgtctctgaaggctcctcttggttgtggcggtttattgggccttccttgtccttgatgacctagacggttttggggagtagagatcaggtgtggcatagactggccctcagctgggattttccagcgtttttctcatgatgggactgggcttgtctgttttgggcagcagatcacagaggcaaattccccatcttgttacaccatatcaaggggacatactgtgcatatgtcttatctgtaggtgcttcagcacctggctgaggttgtgtttgctgggtttctccacttacaaagctcctttttcccccttcccatgctgtgttgcctggaaggaggtcactgtgcgcatcccatacttgaggagtggggagttacgctgcacccctggatggcgaggtagctgcatccattatttggaattctcatgcatgtgagatttgtctgtgctccctatttatgtttttaatcatttaacgacattaatgtggtcttatggttattgatatggtttggcagtgtccccacccaaatcttattttgaattgtaattcccacaatcccccacatgttgtgggagggacctggtgggaggtaatttaattacagaggcaggtctttcccatgctgttctcatgatagtgaataagtctcacgagatctgctggttttttaaagggcagttcccctgaacatgctctcttgcctgccaccatgtaagatgtgtcttgcttccccttcgccttctgccatgattgtgaggcctccccagccatgtggaactgtgagtcaattaaatctccttcctttaaaaattacccagtcttgggtcgtctttattagcagtgtgagagtagactaatacaggtatttattttatactttagaatataatccaatactcttatttattttattgttcaaattgttcctactttggctattgagagttcttttcactggctcctgtgtctctttgacatacacccatggatgcatgtgtgaaggtgtgtgagagagtgtgtgggtgtatgtgagtgtgtgagtgtgaatgtgagtttgagtgtgtgtgaaagtgtgtgttagaatgagtgtgtgtgagagagtgtggctctgagaatgtgtgaatgtgtgagtgtgaatgtcactgcatgagtttgaatgtatgtgaaagtgtatctgtgtgttagaatgtgtgtgtgtttgtgtatgacagagtgactctgagcttgtggatgtatgcgagtgagagagtgtgaatgtgtgtgagtttgtgtgtgaaagtatatgtgagtgtgtgggtgtacattagtgtgtgagtttgagtgtgtgaaagtgtatgggaatgtataagaatgtgtgagagtgtgtgtgagagagatggtatgactgttgagtgtgtgtgtgtgttctagcacttccttcctttctggcactgcaagctgcactgggttcatctggtatatttcctgtacctgtcctaaagtcagccatttctccacgagcccgattccttggagaatggtattagagactctaggtactagataggctcactgctactgggcagtcattgcttctaggccttctcagctgacagagtgtgggaaatatatgtgtatgtctgctgtgggtagattataaaagaaacagatctcaagtgctggctcatggctgagacacaccctatcttttcacataattaatttaaaatggcataaaattgggaggctgaagcaggagaattgcttgaactcaggaggcggaggttgcagtgagccaacattgcaccactgcactccagtatgggtgacagagcaaaactccatctcaaaaaataataaaataaaatggtataaaaggaaatatgccaggaatttggctctttatggatgtacctatagacataaataaaatagctatgttcaataagttaaatcaattacttagaaacctaatcattaggctcttttccctgggggaaaaaaacatttcttaaaaaaattaattcccaactcttcagtatttgacctagctctggtatttcacattccttgcattgatccatgcctcaaggctgcctttctgctaattacttgaaattaaattgacccttttctaaagttggcacacaaaatgtttcattcagctggcataatgtctgccatatgcactttttactcagcagaggtactaagggtcttctttttgcttgaacctactaattttccaagcatattgtttaaagatttggtcaaaaacccaaaacagagttggtgagagcacagagctactgagatccagggttgtggattgggtctctattaagatttcccgtttccatgggagccattagcttggctgtgttcctcggcctcacctggcaggtcccaccccagaggtgtctcaggaaggactcctcagaagggctgtgggtggattcgctcaattgcagaaacatcacaggtacagcacttcccatcattgatggactcgcggtgatgtttctgtatatggaggcaacatagtttgcatccatgtttctcaaacttcagtcacccaggacccaccagcgtgaatttaacctaattataaaagcaatcacatcattaatattacagcttatcatatgaatagcttatacatgcttgagatacttagtgattttttttctcaaacactaaaactgattaaaatgaagtgtgctgtatacctcttaaaatgtatttgtctgtcatgggggaacacattataccacttggaaaatgctattttagctattgtagacttttaacaattttcttttcttttttttttttttttttgagatagggtctcactctgtcaccaatgctggagtgcagtggcacaatcagtgcaccatcacccctggctaatttaaaaaattattttttgtggagataggtttttgccatgttgctgaggctggtctcaaactcctgagctcaagcgatccacctgcctcagcctcccaaagtgctgagataacagtcatgaaccaccgtgcccaaccaatttctttaatttttccaccttgaacacctcatcaggtgtatgttttcatcaatttacatgtatagccatgtaaattgagccctgcgcaacttggggcttagagttgaatggctctaaacctgctcagctgctgagggcggaggccctgcctaggatactattgggtggaattatctccatgagttttgacttaacacttttgagggggaagaaattacgattagagattaccctgcttttctgttgagtcctttctgtatattcatttaatcaacaaatatttattgagaatcctttatgtgccaggccctgtgctaagtgatagagatattttgcccttttaaaaactgcattaaaactggccatttcatttcagagctactttgcaacttgctcaaacagaactcttagaaatgttaactcctcctgcactacaaacataaggaagagttaagagcccatcaggggtaaaaaattctatcatatctcctttgaaatccagctccttcttttgtagttcaaaacaagaccacgggggcatataatctctggtcgtgcctattcagctaataggaatgcgtttgcattgccaaaagttattgctggttttagtgttccttgacacaggcaaatctcataagtggacttcgtgggaatgcatcggatcgctgggagctgtcggtcagccagacactagctgcccatgtctgtgtctttgcttataaagagcattgagagtgggcatttgctgtcctgcgattttcatgtctggatctgctgtggaaaagtgaagaatcacacatctacagacacccttgccttgcagttttaagtaaaaagagaagggagctttgtgaggttgatctccagaacggtctcggtggagctccagagactgagtttccagcctgctgtttcattggcaggtactgagcctcgtctggttcagtctggaagtgtttctgggaatgcagctgccatgggaaacgcctgtgatgggcaaaacacaaactggtcatcctcccagctccaaggatcaaactaatattctgatttttatgccacatacttcagttgcccagacagggttataaggagccatcggttggaaaggacagaaacagcatccttaagtcaaatacaaaagattggatgcatttttgttggttataacagacaggaacacggagacgttcttttggctccagcaggcattacgaggaaagagctggcgagcagagttggcaggtggggaaatgagttggagaaactttaaagatcttttcctataaaataaatgtccagaagctgtggaaacgtacgtctttagttaagtaaataccctcgaagacaacacatgtacatttttcagtgaaagctgactagctacaactgccatgttttcagattccaagaatttcagcacacatagaattgacctatcatgctcattaacctcagagcaactcctttcaagaagctcttgcaaccatgacggcaaatgagtttaactgtttcatttcaaatgcagtgacttggagcggcatgcttaccgtttccttgccctgcatctcaggcccaaatgagaaggaacgttaattaccttaccagtcctagcttctgtacaaactggggcagtctgctgaaacccccgcttctccctttccttccatagaaagcctcatagcaggggttttgaacgaggctctgcattgactgtgctctgagaggcaagttccagtcctctgtttatgtttgcaagtgactattaagtacctattccagctagatttggggttgggttgaggagttttcagattaaacaaggccctgaatatcatgctgggggcttgacttcaattctgaaggcaatggggagccactgaaggtttctgagtagtcaagtgacattttgggggtgtaattttagacaaggtttgaaaatagagtattgaaaattttatatagacaatgggctctcagacaaatcttcttttcctgaaaatgtccatgtcgtatctcttgattgatttgagtgtgtctcatttatgagtggagggtgctcccaaaatttgtcccaaattcaaagcagaacttcttaatgtgtggccccattgaggtgatgttccaaagggcagccagacgttggcctgcagccctaacactccctgtgccctactctgtctgcattgaaactccctttggagcacccccctcacaccatatcctcaccccacagcatccccagctggtttctgctctccctcaccagggacacctggtctcctctctaacaatcgagctggctacttttcccatggttgtgggacttgcgtccatgtccctctctccaagcttacttcctgccccaccctcagctcctccagcagtcctcagaccacgctactcctgccaacctgctcaggtcggtggtgatgcctcatcctccacacttggcttctcatcttattcctggcttggctcctcctctggcttttgtccaggagagccctgggaatgtccttgggaatgcctgttcctgacctccatccgtgagtgcctacagcaccccatctagttgcatggtgaatgagtcccttctcgtctctgccttaaaaccccttccttagggaagtcttccttccctcattatctcatttaagcagatgcccactcgcttggttgctgtaattattctttgtttcttccacgctctgcctcaccattttctttatctgtttatgtcctcgtttaatgtctgcctttcagccttaactgtccatcccatgaggagagagacttatcttttttattcaccactttttcctagagttgaccacagaagcttctgtgataaataccagtgatatatgtgtaggtggatagaagggcaggtgggaagacagacagacagatcgacggatggacagatggatagatggctggatggacagatggacagatggatggatggggctcacaccttgaagcaggtggtgttgatgaggtgtatgtattctcttccacccttttatatggtcatcttatatgtctggctattccatatgagatcttaaaatgttctgtttcccaggtgggagactttgaccccatactttgcattttcaaagttaaattcaagggctttgtgatagccagcttccaaggtgatccttgcccttccaaggccctctcctttgtgaggcagggttggtctgggtcaccaatagaagaaggcagaagtgtgtgaccttgaggttaagtcataggagacattgtacttttcaccttggtttcttggccctctcaactggtgggggaaaccagctgctgagccatgaagatacttaaacagccctgtggagataccatatggaaagccgacagccagcgctgacttgccaggcatactagggtgccatcttgcagtgggtcctttcatcccagccaagctgcaggctcaggtgatgactgcaccctcatgagagaccctcaggctgggacctttcagccaagctgctctgcatttctgctgcaaagaaactgtaagcaaagtagcaacgtgtgatgttgtctcttcatctgaaccaacatggctaatttatgcaagtaagtaataatgtattactgaaaagtaaaagaagaaactgcaaaatctgaagacttgaccataactacctgttagctttggcgatgtggctcacatatgttcacgtgcatatgtggctgcgatgagagggcatcgttcctggtttgtcagcgcctgagatgtgctgatgtccccgggtttgacggcaccattgtctaacaagagaagagaaggcagttgcttgctgctgaagaagggcaaagtctacaacataaacagtatttaataaagccagccacaatcttgatatcatgtttggcttagtgtttaggtttaattacaacgaattcagagagacttctgcctatttatgttctcctcctccttaaaggctccccacaggcctgcctcctccctgaagctttccctgaccacccagactccactgaccacacggcatccatatctcattaaccacatagtcaggaccatccagccacacacagcatttcttctcttgtgtttggtttgttgaagggagacaactacctaaattaagtcacattcatccagaggcacggccaggttctcacttcaggacttgctgttctggagcttgtggaagacagaacccaggtgttggagagggaaggagcaggtgtgcttggaaggccccgctgtcgggttccctctgcacccatcttgtgtcccccgctggtgctctgccatgggtttctcacagcctctctgacgtcgtctcattgcagctgtacagaaaatgcaaaccgtggtcttgacgcttatacttcacttctggtcaccaaacgtgggtttttttttttttttttttttccacaccaaccaattctccaactttggacaccagttgggtgtcctacagttcagttatgatgctgactacctggagttagcaccgaccccacaggcaaagggttccatcccacaagatgctccacttcagacgccaattgcaaatagagggtccccaggtgacccacacttctctctgacttggctacaagtgaaggggtcccatgacccccttgtcaggctcaataatttgctataatgactcgggactcacttatttacttagtcttgctactttattataaaatatatggtaaaggacaccaatgagcagccagatgaagaggtgcctatagagcagggtctagagggtcctgagcgtgggagctgctgtccccgtggagttgcagtgcaccaccctcctggcacatggatgtgttcaccactctgaaacctgaatctcctcttttcaggatgtttatggaggcttcatcactttggcattatcgatttttaactccagctccagctcctctcccctccccagaggatgggggtgggctggaagttcccagcttctaatcatggctcagtctttctggtgaccagcccccatccaggagcccaccaagagtcaccttattagaacaaaagacgttcctgtcacccgagaaattacaggggttttagaagttctgttccaggaacagggggcagagaccagatacatgttccttatgccacaaaggtctcatctgctctgccagtgctgtgccctaagcactgtgctacttttttataattgttttttggagattagatttaaaaagaattattttcctctcccaggtttctcctcccactccagccccagttatacttctgtatttattcagcaaacatgcatggaatgtggcattgccaaataaaatataggatgcccggttaaatttaaatttcagaaaaccaatgaggagtctttgagtatatctcatgcagcttgtgtgcgtgcaggtgtgtgtgtgtgtgtgtgtgtgtgtgtgtgtgtgtgtgtgtgtatttgtgtgtatgtataatgaggaagacccataacccactaaaaaggtgggcaggagatttagtattagctcagctcagaggaggcatcctagagattttccctgcaacgacccttaatgaagactggcattccctaaaggcagggacttctttcctgctccttagggtccaccatatccccttgcacaataaatgcttaacaaaaatgtatcatccctctcatagtgcacaatttcatattttggtcccattctcaccaaacagctatgagactatgttaataatttccctgtacctgtgctactctgcattacaaccttcttttatttactgagaaagttcttttgtaccttcccattgataatgagacacatcccacccagtgatccataattaaaaacaatatgatggtatttacataattttgagagttagcactccagtttccatactgttacctctgcacccacctgcctttctgcccctacctcagccaccaggcatctcagaggcagctgattgcttttagtggctgctgtgtaccatgggttttgctgtgtaactattgcagcctggttctaccctaccacttgcttggaacatcttttggcaaggtcaataatgccttggtaaataccttgcttctcttacattctctggggtctttaattattggtatttgtcattggtgatttctttctcttacttgcaattgctgcccctggatttcttggtcccaggttttgccttgttctcctccgacccctttgaccactctactagcttcttttcccactcctgttctccaccagccttctaaatgtatgcaactcccagggttctgtcttctgtctgcttgttttttactgcattgcatctctggaccctttcagaatactccaaaatatcatctatcactttttttttttttttttgagacagagtctcactctgtcacccaggctggagtgcagtggctcagtcttgtctcagcacatcctccgcctcctgggttcaagcgattctcctgcctcagcgtcctgagcagctgggattacaggcgcatgccactatgcctgggtaatttttgtatttttagtagagatggggtttcaccatgttggcccggctggtcttgaacttctgacctcaagtgatctgcccacctcagcctcccaaagtgctgggattacctgcgtgagccactgcacccagcccatttcatctgtcgcttctgttaacatgacacaaaatctttacctgcagttctaatattttgcaaggctgaagtccatatttacaactgtcttagatcatctcaatctgattatttaactattctctctaactgctagtccagcccctaaaactgcatttctctgctcctccaaagcttagtggcttattgatgtccatatttgcattgtgacagagccaactcccaagaatggattcccactcagtgtaatgcaataggagcactttaattttatctccattttctggacccagtgcatcattctagcccttttttcttggaatgaagtctggctgagaatgatgatccattagtaagaattacttaataaatcaactcttggttatgagtggcagaaaactaaagccggcttatgttacattggaatttgttttctgtttacaatacccaaagtccaggggcattttctggctttagatatgagagactccagtgactcaacaagtgttcccaagactggaatttattctttctgttgtctctgccctcagagagagccgaccttcatcatggcaagatggctgacaacagctacagtcttgtctccccttctcaacaaccccagctgcaaacattgtcttcctcaacgatgtaaatagaagtcctcaaatagagtctctgagatctcatttaggtcatgtgccctcatttgaaacgatcaatgtagtcaaaaggtgtagaatacggtgattggccaagcctgggccatgtgtccactcttggcatagggggaaggagatagtccactgaaatcacaggactgggtgggagaaccgtggttccccaaaataactctgggttctgggatgatataagaggtgaatagaaggcaagcaggcaaaaatggcagatatctactcagttgtataaatgcatctctctacttgtcccagaaggggcttcatgacagctgacacatacatcattcttggactggtaagggataagatctgaccttcaacaatggatacgatattaaagggtctccaagacatcacagctgttacttgcagttgctaactatgagatgataatgcctcttatctgagatgagatgttcagttttcttctaccacaaagtacaccaggcatcggccaagttgcaatgaatatttttaaacttctaagatatagtttgagggcatttcctcaaatagaaaatcacaatttgaaaaaatagtcaaaacatcacttaagatttgagttaattttaaatagtggctgtgtaaaagtttgcttttatactatcaaacaatattaagtcagtcaatagtaaaagcaatatgtctatggtgatgcttaaagtgttaatagtgaaaaaagaaaagacttgtgttgaaagtttgcttgacaaagtagtataaatttacatataatttctggcatcatttaggaggctgaggtactgggtgagaaaggcagagtgaaatcttccacaatctgctggtaacttgggagacaaggtccagcaagaggaatggggcttgcaacaaacacataactagtctcccatgtcatgtttcctgcccaagttgcatgggcaagaaagctaaagagtacgcttctagtttgcaaagataaaactgaacttcatctgtagtcttttgtagtgtttgtgggccaaaaagacagatactccagatcctaaattaaaagcctaggatggtcaccgtcaaggaaccatccttgaggatgagccttactaaggcttggactgagccttactagaagtgcagcccaaccctgacccagctcaattcctggcaagtgagagactgatcacatcagtccaattttcctacagatgaaaggctgtgctctctctggtgggaaaatcatctggatcctttatggcactgccatacacagtgtctagcataaaataaaaagtagctagacatgttttcaaaagcaggcatgagggccaggcacgctggctcatgcaagtaattccagcacttttggaggccaaggcaggcagatcatttaaggtcagaagtttgagaccagcctggctaacatggcgaaactctgtatctacaaaaaatacaaaaattccccagcctggccaacatagtgaaaccctgtctctactaaaatacaaaaattagctgggcatggtggcatgcacctgaagtcccagctactcaggaagctaaggtaggagaatcgcttgaacctgggaggcggaggttgtggtgagccgagatcgcgccactgcactccagcctgggcaacagaacagagtgagactctgtttcaaaaaaaagaaaagaaaagaaaaaaatacaaaaattgtcggatgtggttgtgcatgcctggaatctcagctagttgggaggctgaggcatgagaatcgcttgaaccccagaggcagaggttgcaatgagtggagattgtgccattgcactccagcctgggtgacagagcaagactccatctcaaaaaaaggcaggcaggaaactgtgactgacaagagaaaaaaacagagccaccaatatataaatattgaaattagctgagaaggacttgaagctaattagcattggtgtggtaaaacagcaaaaacgaaaaacaaaatctctgaaatggagaaaaatatgcagaatttcagtagtgacctggattctacaaatatgattctataactgaataatatgatcaatatctaaaattaagtactcattggaatggaaacagaagttgttgggaatagtgaacttgaagacagatcaatagacatgaaacacagtagacatgaatggaaggaacagaacagagcacagaagccacatggaacggtgaaaagtgtaactacatataactggaatcctataaggaaaggagtgagagagactgggaaagaagcaatgtctaaggagataatggctgagaatttttcaaaagttatgactaatagttaattataatttcaaactcatttagccccaattagagtaaatgcaaagaaaacttcatctgagcccgtgataatcaaactgttgaaagtcaaagtccaagagaaaatctattaaacattcagaggaaaaaagactttcaaaggagcaaagttaagactggtggttgacatttcaatagaaaccgccagaagaaaatggaaagatatcttggaaggtcaagatgtaagaaaaactgccaatgcagaattcaaactgggagaaaattctcttaaaaatggaggaaaaataaagatatttaaaaaccaaaagcaggtgataaaattcgtctctaacagaatcaaactgtaagagctatgaaaggatgtccttcaggttgaaggaaaacgatgccagatagaagcatagaactatagaaagagcataagaatgtaaacatattggtaaatataacactattaactctttaaaacaataatgcaagatatttagggctttacaacatatggataagtaaactatgaatagcacaaagggaggaacaaatagagctcaactattataatatttttgcttattctgaaaacagtaaagatactaagttaataataagtctgggatcctcatttttatctccaaagtaggcactgaaaggatgacagtaagatataagaagctgctataagagaaagatgaaataataaaaatataaagtttattttaaaaaaacaggaaaaataaaatactaatacacaagaaaataagtagaaggatgccagacttaaacccagctctgcaggaattatagtaaaattaaatggaaaaattaaaaaacaaggattatcagatggggttaagaaaccaaactccctgtatatgatttacaagagatacactttaaatgtcaatacatacagaaatgaagtatatataaatatagaacttcctacaggaatcaagtaaaaggagagaaaaatatatatgccatgcaagcaaacacatcaaaatgaagctgaccagctgtaacaatattaaatatagtcgatttaagacaggaagtttgatgagaaatagtcctatctcataataataaaatgagtctactagcctggtcataattctactcagtatcattttccttcaatctgaaacacttgctttaggattttttcaaaatatataccatagaaatttgtagaattaaaaagagagaaaaccatatcacagtggagatttttgtaaaaataaactttgaagtaaaacaataaaaagataaaatacacataagtggacagtttaatgaattttgacaagtatatacacccacgtaaccgtcacccaaatcaagacattaaatatttccctcatcccaaaaatatttcttcatagtcagttcctttgtagtgttccttttcaatcagtctttcttatcaactctggcttcaagtaacgaccaatctgttttatagcactaaagattagatttctctcttctagaaactcatatgtacgaaatcatgtgattgtactcttttgtgtctggctccttttgattaacataatgcttttgaaattcatttgtgttgttggtatcaggagtccatttcttgttattgcttgagtagtaactcattgttggatattctgcagtttgctcatacattcccctgttgatggatatttgggttgattcaagttttgagctattaagagtaaagctgttataattaactctgtgtaagtcactgtgtagaaatatatttttatttcatttgggaatatacccaggaatggaattcctgtttcaagtgtttagctttctaagaaattgccaaattgtctcccaaagtctaccattttactttcccgccagaaatatatatgtgttctattgtttctatcctcaccaaggtatacattatatgtcggtggtggtggtgatttataatttacacttggtatattcagtcttcttcaactcaaccattataatggttggatattggtatctcattgtggttttagttcacatttccctgatatttcatgaaattgaccatgtttacatggaacttattggccattcaaatatattttttttttgtaaacgttcagattttttttacccatttttacgtgcgttaaggtgattaacagttctttatatattctggatacaagtcgattgtgtagcaaatgttttcttcaacactgtggcttaactttatattttcttaatggtgtattttgatcagcagaattttaaaattttgaagtccaatttatcaaatagtatttcatcttctataatatatcatttactgctctttgctctttcagttttaatctatatgcattgttatacttatagtgggtttcttgctgacagcgtgtagttaagtcttcctttttcactgcctgtgaccatctctgccttttattttggagtatttagatcatttatctttaatgtaattattaatatggttggcttttttgaagttgctgttctttattttctacttttccatctgtttgggttttttgtttttctccctccctccctccctccctcccttccttctttccttccttccttctttcacttcctttttgttacctggttttggatttttaaaaaatcagtattctagttttctgtatgttggtttcttagctctttgtctctattgtattatttatttgttaactaatttattacttttgggtgtttgtgtgaggcacggcctttcttagagtgtttcatcgtaatcacagaagacagagaaaaatgattgagtgtctttctcaattctcccaaggatgatgcataagtaacaccattctaaatgcataggagagacattaattcatcatatatgatggatgtgttaaggtattacagctcaatctctggaggaggtctgatcaagaaagactgtgaaatttatagtatggttctataatgtattcatagtctactgtcaaataatagtataccacagtgggagaatttaaaaatatcttcagtctaggatctttgcccttctgtgaaccagccaatttggtgtataatatgatggtgttctcacaattaggacaaacaaggtgaggcatcaccttacaatgaattaaggaagccaaacccaccacaggtaaagagaggctttgctatgcagggttaatctgtctcaaagctgctctgtggctaggccaggattcaaacatattgcttatttccctgtcctgtgaccttctaaagcctgtgcaaaaattattttcctttaccacattccctggttttgctcaaagcatatctcacttcaaaaatgcccaagagccaggaatagggtgattttcttaattgccctgaatgctctgtgtgaatcttctcctctcggaaagtaatttaatgacctgtcttgggaaatggactgggatccctgtacaggctattacattactctttctaataggatttctacagcgatttaactcttcccactaatcacaaacaaccaatttaataaaagggaaaatgacagttttgcttagaaagctgtacaaacatgtttgcgcttttccagcacaatgacagcagcaataaaaacagctgttgttacattggtgatatacataggatagtatgagcaactggaaataccaaaaggattgaaagctcccagtgatgaatggggattttacgcatgtaaaaaggaatatcgatgcttcccaaaacagcaatggatcacattgtactttaacactactttcaagtaggtaaaaatgtttcacacatcaaatatcaaaaatgatcaaatcagtcctgtctcccttattttcctctgggtgtcagtgtcctcccaggcacccagctccctactttgctccattcttgagttcttttttatccttaatgcccagcctgttccaaaaccatgccccctcttcctttgttcccttcttttaaaagtcacttcttttctggcgtcactgccattgtgctcaactagtgaaaactggaagtactaaagtctttactgcattatgcctcaaaaatacacacagggcatttatcattctgaaatgacacaattttggtaatggtacgtgtagcctatttccaaaaccttttcctttctttctaaatgttatttttcaggagtgatttataatttagcataatgaaacatcctcaccattggtggtttccttttaaaaaacaattgaatacaaactgactctagacaggagacaactgtgcttttgttttaaacttgcagagatcacttcaagctcttcagacgtcctccccttccaccctcctgtagcttagacccctgctcattatcctaagtgtcctcacgaaaggggtgaaatcttcccatctatctgtgttcttctttctttcttctcgtcatcatttctgtttttgccgaaacacattgatcccattcaaagtatcgtataataaaagaccaattactttctaaaaaatgctgactttccattttagtccaaatgccttgagatcacacacaaaaggaacacagattagaagcacatctgggatcacaacaggaacaagttagtgagaatttaatctgagcccccatcttgtaaaaggatagtccaaaggctgaaggcttaacttgcagaatttggcacagaaacagacttggtgaagcaaaatgaacagtttggacggacaaaaccctgggggtggggttggtggggtttgaggaacaaagagagaaagccaaacgattatttgatttaagcatcagaattggatgaccctgagaatccctctggagaacacactaaagattgtttctccagagaatgtcgaaattttagataagaccaggatgtttttgtatacgatttggacttgaaagttttattaagtggctcaagctgtcccacggtcatgatacatgctacccatatatgttccatgaatttgaaaagattaagtaattaggccccaggctcagagtataaattatgatttaaggaggcagagtattaactacgcctggaagttagggaggatgtaagagtatgtataaagggcaatgtctgcaatctggatgggaagagagtagaccaatgtgtttttgtcttctgagtatttcttagtggactcgtaatggttgctgcctttttattgcttgggattaaatataacctttgatgatcatcctcaaagcttcttaccagctggtcacatcctacaagtcttgacctcctataaatacaacctgcttctccaaaaatccactgattcagctatgtcagccaccccaccccttaccccatgttcctcatttagcctagaaatgtggaggttcttctttccttattcttcctttaaacaagaactgaaggcctaactctcaggaaacctccccatattaaatgcactgccacctaatttccagtgtgtcttcatttggggactgaatgaaactatgctcaccctgacatagattgaatgtaattacattttggcaagttttcttccattcaaaggtggtcttaaaaagaacataacacatctgtttgcatatataaataaaataacaagggtgggagctgtgtaagccagtgtgttgttagcacttacaaggttatagaccatctggttaaatgcagctattcaagaagaaaaatttaaaccagggtttcttagcgatgacactgttaacatttggactgggttattctgtgctggggagagggagggtactgtcctgtgcattgtacaatgtttagcggcacccctggactctacccactggttgccagtagcatctttcaccctgttgagacaaccaaaaatgtccctagacattgccacatgttccctggggggcaaaatcgccccaagttgaaaccactgatttcaaccaacctatttaagtcgttgcttattttgaatacttgttttacattaagcaaatcaaactgaaaagacctgaggacagaaagcttcaagctgccttagaagttggtctttctcatcatgatatactagtggaatctcgtggaatactccggcaatgttaatctgtggacatgggaagagttaacacactcaacctatgtagccttttacgtcagggttttaaaggttacattaatttttctgtgcaggattttattctccagtagggtcaggtttttgtgtttcctattaattaaaaaaagaaaagtgaggtcatatggtaataagctctgtggtaaataaaattgggctgttatgttaatagcagagataatgaaacagtactttcatttaacaaaaccgtctttttaaaatgtgtcttggccgtaaattatctatacacccatgattgattattgctgtatagatataatttttcctgcaagttgttaaacagtaatgcagatatatgcagaattattgccagggtttaggaggataactcttagcttggaggtactgaatttggtaaggggaagaaggaaggagagtggtctggctgcagagccccatggatactatcaaaattggcctcttcccccctgtttatcagtgggggaccagtgcccaggtcctgtcaggtgggatgggatcaggcaggtggagcaaagtggtagcctccttccttctttcctgggccacattagagctttagctttgaccctgaccccagttcttggccagggcaagaggacagtagctgtgtatgatttgggtagcatcattaaatggttgaaaattccagtgggattcttctaactgcagaacgttgcatgctcgcatcttaagaaatagaaggtcacacgatccatttatgaattcaagatatttttattctacaaaggtaaaaataataggaaagaaagtgaaaaggaatacttcgaagatggtgaagagactgacggtgatatgaggatgtcagagaaaaaaagttgagtggggctgggccaggtggctcacccctgtaatcccagcactttgggaggctgagacaggcagatcaactgaggtcaggagttcaagaccagcctggccaacatggcgaaaccccgtctctactaaaaatacaaaaattagccaggcgtggtggtgggcacctataatcccaggtacttggaaggctgaggcaggagaattgtttgaacccaggaggcagagtttgcagtgagccgacattgcgccactgcactccagcctgggcaacagagtgagactgttaaaaaaagaaaaaaaaaagctgaatggtaatagcaataaaatattagacagtaacatgggtaaattcaacatgagcattcatgtatgtgactttttaggggtgggggagtcaaggttgcttagtagaaaattcctggcaaggaaatagatccagggtttggctctgccatgtaggagccaggtaaccttgggcaagttgctgaacttctctgagttttccttctttgcctataaaatgagtgtcttcatctctgtggccccagaactctgtatagtgccttgcccataatagatgctcaacagatttgttgaaaaaatgagagaaaagaataaagtggacgtagctagaagaaatctgggctaaatccctagtgactgaagttccaggcaggcatgccgaggcctggggtcatggaatcttcttccagttaaaaaatatgttcctggaaatgaaggcattgaaagtggatatgtgctgtgtttaaactgttgtaaacttattcactgggttctgtttacctcctctctttctcatttctgtaccatgcctttaatattcatttagaggttcccacatgttaaccttaccgcttcattccttcctacaatctccaagcagctgtcaaaagtaatattcctctctcctgaagaaaagtccttagtatttctttaatgcaatctgcggctgctgaattctctcaatttttgcttgtctgcaaatatctttatttcacctttaatgttaagaatatttcattttttaaaggatatttcattttcaattttaatcatacagaactttaggtgacaattgtttctttgaaccatatagtatattcttttgtcttctgtggtgtcatttgtcagttattattgctctttttaatataccgcatctttcttttctttgtctctgtttttcagcaatgttactatgattcttctaggtgtggcttttctttttcatttataatactttggattcgtgattttttttataaaagtatgtgacttgatatctcttcccaattttgaaaaattcttattttctcttcaaatattgcttctgaggttttctcttacctcctttgctgggtctctaattacatatacctttcaccatgtcccatatgtctctgaagcttttttctgaactttccagccttttatctctttatgcttttgtcctgcatattttcttcagaccgatttttcactctacgatttcttccttcagctgtgtttaaaatgccattgaacctattcattgagttgtattttccagtttttagaatttccatgtggctctagttctctgctgacttttctgtttttcaatttcttgaacatatgaagtgtggcattttaaattttaaattccgcttctgagttcctttaactgcatctcctataggtcagtttctattgcctgtggtttttttcttgtatttcagtcttatcttctcggtgttcacttatgcctggttatttttggagtgtcagacattgtatatgggcagcttaaagacaaattgagccgctagatgatgtcatatggttggttggtgcctaagctaggggcacttgtgatcagtgactgaacaggtctcaggctttgtgaagactgatctacttctcattcgccctctctccttgggtatagcattttgagatcccaacccaaaccctggagtggggagttatcaatactgcctcttcgcaggccctcatttctggattttgtcttccttgccttgtgagtctgtgggaagttctggtgaggttttttggcctctcagctgcctctcctaatagctgcagattccttgagtgggacagttacctccccattttgggatcataccttctgttttcttctccatctgggtcatggtcccataatactttattactttggaaatgctacattgctttcaaataccatttttgtatattttccctagcttttctagttgtttttagtgggaagttaggtctaaatgactcaaactgtcattaccagaaacaaaacccctccatttgtgtaccatcagcttaatgactgtggaatatcacatcgtgtggttcccacgttgttttgctgtttttcattcctgagacagggccttgctccctcacccaggctggagtgcagtggcacaattctagctcactgcagccttaaactcttgagctcaagtgatcctcctggcttcagcctcctgagtagccgagactatagacacatgccaccaagcctggctaatatattttttaaaattttttgtagagatgggtttttgctatgttgcccaggctggtctcgaattgctgtcatcaagtgatcctcctgccttggcctcccaaagtgctgggattacaggcgcttatgttttttcatttttaaccattgccctgagttggacatagaagaggtgttttctgacttcactgtgaattatgctgaatgtctttctgcttatatctgtgcatacttttctagttatttcctttagatgacttcttagaagtggaattgttgaatcaaagctatgcacatttttaaggagtaggaaaactgtttccagactgccttatggaaagctgtaccaatttgcacttttaccagctgtgtgtggaagtgcccatttcttgacatctcaccaacaccagcatctcatgcttttaataagcctagcacagcccctggcagctaccagcttggctgaaggaatcccagctttaaaagtcctcaacaggttggaactgtgtgtcaaaattcacagaataagttgttaggtaaaatgaaaaggcctgcagttcaaacaaacaaacaaaaaactagctaagcagatccccgatagggaaacctggtataatagcagttcatattaaaaagagtgaggggtcattttagatgacaagtgaatgcactcctggactggatttgtagaccttgaaggtacagaaatggaaacatggggtctcagtgaactctaaattaggtggctcatatctgaaatactccaaccatggttacattttaagaagtctgtgacatgcttccagagcagaatatagaaagaggctggtctgtaaccacgtggcagggagaacagctgagggaacaggggtgtgtgtccctcacaaaagatgtgtttgggggaagaaatgaatttgcatgactttgaaaagattgttcttctcgactacatttaaaaatatttaaaaggctgggcacagtggctcacacctgtaatcctagtgctttgggaggctgaatggggaggatcgcttgaagccagaagttcaagagcagcctggacaacatagcaagaccctgtctctactaaaaaattagtcaggcatggtggcatgtgcctgtagtgccagctactcaggaaactgaggtgggaagattgcttgagcccagaaattcaaagtggcagtgagccatgattgtaccactatactccaggcctgggcaacagaacatctcaaaataaaaataaggaacaggcagttacctaccaaatattttattttaaaaaatgttttggtgcacatttcctgatggtccccacgcacggggatggacatgagcctgctcttctctccagttactgcccttcatggactgttcctgccagaacttggaattggttgtagcgtagggtagatgcctgattgcctgatttacccatggggtgtgtgtgtttatgtgtgtgtgtgtttatgtgtgtgtgtgtgtgtgtttgtgtgtgtgtgtctgttgttcgatacttcatgacagtggttcatttttagctttgatcatcagaggaagaaagatgggcttgccttctctctactttacattccataattttgttttattttgtttttctttattaacagcaagcaataggccaccaaaaagtccaggcatattggggacaaaagagtgtgcatggttttcatggtaaaggatagagtcccccagagttattgagaagacatttattaacttttcttattcaggtaactatgattgtcagtttggatgaacttcttatgagtgattctttttctcacttccaataggagaacagagatgtgtgtgtgtgtgtgtgtgtgtatgtgtgtgtgtgtgtatttttgtggtaagatgttatggtttgcagcaaaatgaaaattcaattgtaagaacagtagtgttttcctggattgcagggcaacggaaatatattcttagacaaaaggagcagaggtatgaccaatacaaatggcagtgtggtgtaatccttattgtcagtcacatgaagtgcttcttatgtgccatccctgtccaagttgtgatagaaactatgtcatttagtcctcccagctggcatagtatgacttacctgtgagggacactgggctcagagaggctaacaatgaccaaagcatcacacagctagtaagtgatggagcttagatttgaccccagatctatgtgattctattttttggggggagagggagaggaagctataatattaaaaaaaaatgagttatagtttcctctgaagctctgatgggtttaactgaccacttccttttattttccactgagcctggattttccatttgtaaaaaattagcaaggaaacctttcatttaagcttgatgatcatgtaacagtttttggatttccttattccattgcaactttaggtaagaccctactgtatacttagggagaatacacacaggcacacacacacatacacacacacacacacatctacacacaattttgtttatacaaaatttcttctagttaataatgcatcagaaatcttttctgaactattttctctgaaatcattacaaataaaagatttgtctgtaggagttcaggaatctctgtatgacatgatatctctagaaaataatggaattttggttcttactggttgtaaatcatgttggtcagttgtaagttattcacacccacgtgctacgtctgttagctgtcttgactcttcctctgttttcctttttttcaagtccacattagttttatagtccaagtaagttgattatttacccagtttttcatcatttaagtcaggtcattcttaggaatggagcaatcctttcctcttcctagcagaacagggaggaaacctgaacagccgagactgtcgcgggagaaatcctgcagtttccacagtgaccccttaaatgctgtgacattttcactcctgtggtttagtttcagttgggatcatccacgaaggctgaaaatacgctaaggttttggtgatcacacacttctgatcattccagcctcatcctcagcaaggactacattttctattttggtctgaaattcatctgtgttaagggtgaatttaaatactttgtcagcaaatcaacagccaaaattctagtatatccacttattccatgtaatgatgactttgactttgtagcaaaaatcaagattgactctcagggtggacagcccgtacttagcacagtgtcaggttctgccctgtcagcatctgatgaagggatgagcgcattttatgaggcattaatacagttgatccaaaaacacattgatttcatactttctatatacaaagaagcaatgcttgaggcacattgatgggtcttcaaagttgcctgaggcctcaagaggcttgaagcccagtgggtagacagtgtttgtgagtaaacagaaataactacatttcaggtaaaatgtggcagtatagttagaagagcagagattggagagaagagctctacctgggccttcatggagagttttaaaggccagggcatctgaaggggccttgtggaagatggggagtattttaggaactagaaggaagggcaaaagaagaaatgggaggccgaggtgggtgggtcacctgaggtcaggagttcaagaccagcctggccaacatggtgcaaccctgtctgtactaaaaaacaacaaaaattggccaggcgtggtgacatgcacctgcaatctcagctactcaggaggctgaggcaggagaattgcttgaacttgggaggtggaggttgcagtgagccaaggtcacaccactgcactccagtctgggtgaagagtgagactccatctctcaaaaaacaaaataaataaaaataaatggggtgctcattcacttgtttcatgtgtatcccacatcatcatcctgtttgacttgaggccagggattgtgaagtcaatacctgtaggggccaggccagggttacaaactagtgaagctagccagacataagatgacaggtaagctttgccccttgggctccatgtgtggatcccatagggcaggtggggctgggagaattggtggcctctagttagttttagccaactgttaccattgaagtagaaaccaagggttgccatttttcctggtatttctcccctcccagaagctgcacatccagatttgtctgagaattctcctgactcttaggtgttagcaacttaatcaaattgacagcactggatggcgcccactttggggccatgccagtgatagagctacaggctgaaggagccttgtgggttgctggcctgtgaaacttggtcgagcaacaatggttctgcaatgtggtccccagaccagcagcatcagcatcacctgggaacttgctagaaatgcaaatgcttgggccccacccagatcatctgaattggaaacttgaggtgggcgcaatgatatctgttgtaataagcactccaggcgattttgatgctttcctgtgtttgagattttttatttttattttttttacctttttaaatgactggagaaaaaaattcaaaagaatatttcgtaacacataaaatgatgggaaattcaaattttggtgtacatcaataaagtttgactggaacacagccacattcatttatatgatctatgactgcttttgcactgcagtggcagagttgagcagtcatgacagggactgtatggctaacaaagcttaatgtatttattatctgttccattacagaaaatgtgcatcaaccctgctctagagcactgaatgggatggaggaagaggaggcaggtggaggagcctgggatgctcaggaaccttggctttgtacccaactttggctttatatatgaagggcagaagaattatttgagccctgcattaataaaacagctcagggaacaatatacaggactggctgatgaaagagtagccaggggagagctggaatgagggccatgttgcaggaatagaaggaactgtggaggtactccagagaaggaattgcaaaactcagccactaattcaacattggaaccgagaggaaaaagagagtcagaagagggtaccaatgggagccaaaaggatgatgatgacaataggaaaaacaagggggtcacaaaatgaggaatgcactcgggggagtcgggagaaatgtgaaatgagctggtgagttttcagcactgtagcctttgagttgccagggagagatctgctgattgtggcttgtggggcatttgcaatgcatgtgctgggctcaagagagcagtcagagctggagatttggcgtcgagcatcttctacatagaggaccaagtttttcataagtatgtctgggcttcatgactggctgatttttctaatgtttcaacgggaaaaaaaaaaagctgaaccccaattttcattagcaaagtgtacagattgaggatgtctctgtcccagagccagactgggttgaaatggaaagttatacccataaaggttgcaaagccctgcaagcctggtgaagtgatagtctggttaacgtggtggctccaaggggccacacagccagatgacccccagtccttctcaagtccttcatctgcttttgccttgagtcctcaatcccagagctgcatccatcaccccccgagccctgggctttctgactccatctcccaactccagtggagcttctcctccagcctcagcgtgcacctctgtcccattcctcccgtgccatctccctcctgatgctgaggctctcatgaatgcctcaagacacagccaggcaggcaagcaaagggaagagcaagtgacactctaacttcaatttttgtctgcagccatgaaatgagaattctctttgcaagatctttatgaggcttgtagtgtgtgttttcatggtgcaatttgaatgtgttttctaaaaagttagcaattagctgtaattctgtttgtaatagaaaaacttgtttgcattcggcctcagtacatagtgacttgcggtgcctctgtgatcgatagcaggattactctttaaagggcttagtatattctgctaatgtttatttgaaagacattacagtgatgctttataaatggattttagtcaacatatgaatggggtatttttctagaagacagcttgcatgcaaacaaactagcaacttaagctaacttcccctgactgacagttttgaaatgtgttgtaggaaaaaaaaatggtacatgaatgtttccagacatcaaattagttatataaatgcactttgaatgggaagcaagctttctggttaataaacacagtccatgctattctaccactggctgtgtcttagaaggcctcagaggccactccaaaaacaatgctctgtgcttttataatattttaatgtccctggttatatcagtaagcatacattagaaagtattagcttaaaacattctacaccaaaatgaagtacattcacatattttgtgctgcatcttacaggtcttctagtaccttctatccccttctatgattggtcgtacacatagtacgtaagagcctcttcccatatagaagaagggggaaagctaagctgctttcagctatcaacccaggactggacccagtgcctggctcataaataggccctcagttaataaatgtataatattcctttttgaaaaatttttgaagcgtcatttattatgcccattttgatctaactataaaaagcatgaaaagggtgcaatttgggaaattagcaatcgataataagtgaaacggtatcttgtcactgtcatgctgtgcagtagcagtttgatttgtgattggatttctgtaataagcatgcattttcattttgtcacgcatgatggtttccaaacagcctttttaccatttgaatctcatagcgatcatactaattaagtcagttgtctagtgctgctataacaaatcacaccagtttaagtggcttaaaatgacacccatttattatctcacagtcaaaatctcaaggtcagaagcccagtgggcatggttggattctctgcttcaaatctcaccaggttaaaaacaaagtgtccacaggacttccttcttggtggaggctctgggggagaacccatttcctgctccttgacgcactggcggaattcagttctatgtggtggtaggaacatggttcctattttcttgctggcggttgagggcggttcccagcttctggagacaccaggttccttggctcatggctcccttctggcaccttcagagtaagcacagtgggtcaagccctcttgtcacatctttctgaccccagtcatgaaagattctctgccttcaggaacgcttgtgattacattgggcccatctgaataatccagggtgaggtccctgtccttaaccttaattgcatcttcacagtcccttttgccaagtaaggtaacatatgcacacattccaagggttagcacatctttggggactgtcatttctatgaccacaatgataggaaaagcgttttgttatcccattttccttgtaagaaaactgaggtccagcagagttaaaagattggccctcagtccatggcccacagctgccgtctgaccgtagccttctagcctgaggcccctcctactgtagcctcttaaatggaaaaatgctacatttccaaaatgaaatagttctttgttgcttaaaattattgttcctttgcagtcaaaagaggaggaattgctgcatctccataaactttcaacctaggatgctcctagaaattgatcagggtgttccaagacctggggtggtccgaggatgctgaaatgaactgggtcttggaacccagcctaggccttcttcccatggtgagcacacctcctcatcagccctgctttccagtgcagctggcatcgacactgaacgttgcaaggggctggtacccgtggatgtggatgccaggcacatggcactggggctaccagtggtccttatgagcccaggtggtacgtggctgacaggaaagactcatcccggcctcggccttctgcctccccgccttggcatctgatggtcctcagcaggcagccaggtgctggcagagatgcctggaagtgggagagggcacggggcagcagaggtctgaggaggtggtcccacagcctggcagggtttggtgtcagctggggcctggtcagaggctgacttcagcaacatgatgtcaacacactatccagcccccaggcaccaagtcaccacatggtcctgtccccaagccattgtgtcaccacacggtcctgtccctgggccaccgtgtcaccacatggtccttttctctggccatcatgtcaccacacaatcttattcctgggtcaccatgtcactatatggtcctgtccccaagccatcatgtgaccatgtggtcctatcctcagggctaccatgtcatcatgcggtcctgtccccaggccatcatgccaccctgtggtcatgtccttaggggtaactatattaccacatgatcctttcccctgggccactatgtcaccactttcctgtccctgggccaccgtgtcaccatgtggtcaggtccttagagtcactgtaccaccacatagtcctgtccctgggccattatgtcaccacacggtcctgtccctagggccactatgtcaccacacggtcctgtccctggatcaccacgtcaccgcatgatcctgtccttagggccaccatgtcaccacatggtcctgtccttggggccactatgtcaccacactgttctgttcctgaggccaccacatcaccacacagtcctatccccaggccatcatgtcaccacacccacctccactctttaccttgtattttgcattgattcagattttatcaaaagtcctgctgctgctgctgctcttgctgctgccgcctcaccctgtctgccctattttggattttttttgtcacgaagatccaaataaactgagcaggaggatgtggaatcctctccggagagctgagggtgctgggacccagcctgggaacatgcattcattggtcatttgtatagtcccaagtacaaatgtaagaaattcagctcacagggcaagccctgcctactctcctcagaagaacagtatggaagtccattttcaaagtccagggtttccctgctccttgtacagggatccttgtacagccacttgtgtcccacagaggacgttggcctcctagggtgaggcaagcagacagcccgcaggtcagaggaccctctgcttgtgacagtgtgtgacaggtgaggagggactggaggccactgttatacctcctcaggggacctttgcagctttggggtctcctctccgccccccagttagtgttcctcctgcatccccgactcctcctgcctgtacccttcatcctacagaggcatctcggtggccctgctccgggtgtggggactgtaatgtggagcacgctgacaaattctttgtccttgggaagtttctattttgccgagggagatagactgtaaacaagtaaaagaaaaacaacaaatcatcacaaatgaggaactttgctaggaagagacagaacagggtgtgtgagaaccaacaacccccttaggaggccgggacttctctgaggtggtgatgtccaggccagtgcctggaggttaagccacacaaagggcccagggaagatgttttggcagagagtcagcagccacaaggacccagaagcttcgggaacaagcaagtgatgacatccaagtgaggtgccaggtgagcagacgccagagccttcacagcgtgaaggccgtggttttgttctaagcacatcaggttgccattgaagggtcttaagaaagggcatcactaagctcaggaattctggaggaaagccagggtggattttctccaacctcccctctgtcgtggatcaggggtgatggagggagatggtcaaataaaagctgaattttagctgtgttaagtttgagaaatccatgtcatagtgttttccaggttgctttctgataagtcatgttttcatttccctcttccaacccaatagtaagctcaagaaaggaacagagtaatgtcgtctgcttcagaattggccattgtcctcagacagatgcacgtgcctggtggactgtcattctatagcattcagatgcacagaagcagaccagaagtatttcagtgcataaataaggctttaagatgctctggctatagctaaagtaatctaaaatgaaaatctaaaatgtttgctgcaaatctgaggattaacaatcacaccggtagcgacgggacaaagaacttgagctaagagcatcacgaggaccaaaggtgatgtgatggtgccttttcctgcagggagggagaagcaagctgaaaaaccaagactctatcatgctgcagaaacacagtgagaagatcctgtgcttaaaataatccaacgtttgaacacacaaacttccaactgcattataaacctaaggataatacatgccatcctgtacatagcattttaacaggttgttggctaaagttaattatccatcggaaaaattgtcagtaactcaagaataaacattatcattatttatgtaataacaaacaggccccaatccagggacaccccattataatgctgccgtgccttaattcctgactgtgttatactgcagttaattcaattttgtcctctctaaattccacagtgcgcatatcttccaggctgtggaagtagcacactgatattaaagtggtaatcaagattgcctctaaatattcatagcaataaatgactccctcgtgccccgtgaatgccaaggctgcagcctgaagcatttatttagtgccggagagggatctagttattttagagttcccttgaatgcaatattttaattttgttgttcttcttgaaaaattagatccctctgagcttccagtattgatggttgagatgaatgactttggctctggctgaccatggtctttggaaggataatctcagagttgtgatgggagtggacttggctgttgaccccaaatcttactttttggatggtaattccctcctgcctgccagacctgctgccgttccactgccacattaattcaccctcagaatcagggcagatgtttctaagctgttgaaaatttcttgttctctaaagagagaaaaacaccaaggacctgatgctgtgtgtcatcccgtccttcagggaaaataatgagcaccctacaaccatgcaaagctacatttatggactcgaggtattttgtgttcattatgggtgaaatgatttaaagtcaagtttggatcagcctccaatcgcacacattaaagaagggtagcacgacatggatagcaccaaaaaaaaaaaaaaaaaaatagggaaatcaatctaatcagccaatcaatcaatcatcactttttgcacatctgtttgtacagccagttcactgggatgccctagccaagtgcattgtgggaaacctctgagagaacacaggcacctgggggccctagaggtgggcagctgggtcctggccgcacccgtctttgcagatttgcctgggcttgccatctcaaggggagtctgccaaaaaagcctttctgtgaggaaggcacttgcctcctgtgagcacatgtgcactgaggatagagtgtctgatgagttttgcccaacgacaaagcttccctcctaggaggaaagagggatttggagtaaatgcagtatcagtcttggggtttatctccaagcctacatgccctaaagagggaacttagatctgactcctagatggaactgagagtgaagtataagtacaaatagcaagagctatttcatgaaaaattctataataaactgggacatcagcccaggtcccataatacacttacacacaaaagcaagtgttcatgcacatgcctgcatgcatacaggtaaatagggatatcaataaatgtcagtgccttatggcctaagaggcagtgtagtagataaaaatatatcgattcacttgaactttcaaacttaaaaagatattttcttatgactttggaggaaacaggaagctgttgaactttgccatgactttttttgtcacctttgttgaggagagcttgcctccaaattataatgcttctcttgcagcagaaccctttccttctctcctacccagcatcccataggaagtggtcctttcctctctagaatgtccattccacagacctctgtccagtctctcagtctgtagcccttttttggccagcacctaccggctcctcttacctgctggctccctcacctccagcctgtattctcccctggccttcggccactcttggcctgcacagtctccaatcttgggtcacacccttaaccctacctaccttttccaacctgccattgagccctgaacgctgcaaaagacagacaagtgtgtatgggtgaataagaaataaaacagccccagtgaagagagtaagggagcatcctttctccaaggaggacaaatcaaagtgaacaaataaaacaaaattcacacccagacatacaatggccacactgccaaacatggaagaaaaaagatcacaaaagcagctgcagagaagagatgggtcacctgcccaaggaggctgaggactgacttctcagcaacaagaatggaaaccaagtcatccgtgatcgctcgagcctgtagtcccagctacttgagaggctgaggcaggaggattgcttgaggataggagtttgagaccagcctgggtaacatattgagacctcatttttataaaaaagaaatagaaacagaagacagtggagcaatcccagggtgctgagatagtagaggtgagaagactcaccaaacatcaggactcagagtaaagctgtagtaattaacacagggtggcattagtgcatggacagacaatgagacacatggtattagctcagaaacagatctccacatggctgctacagatacggtggaaggataggtcttttttttttttttttttttttttttgagatggagtcttgctctgtcatccaggctggagtgcagtgacgtgatctcagctcactgcaacctctgcctcccgggttcaagtgattctcctgcctcagcctcccgagtagctaggattacaggagcacagcaccatacccagctaatttttgtatttttagtagagacggggtttcaccatattggccaggctggtctcaaaggcctgacctcagatgatccacccacattggcctcccaaagtgctgggattacaggaatgagacactgtgcccagccaggaaggatagacttttaacaaatggtgctggaacaattggttaatcacattttctctaaagtagagttggactcctacttggtactggacacaaaaatcaagtctggatgggacttaaatgtgaaaggcaaaattatgaaacatttagaagataacacagtctgctttttgatcttggagtagggaaggatttctcaaataaggcacaaagactttaaaccatgaaggattttattaaaattaaggcattctgttcatgagaacacacttaagaggatgaaaagccaaagcccaaactgggagaagatatttgtcacacattaaacagagaaaagcatagcttccagaatgtagaaataactacaaattcacaatgacaagagaaagggaggaggaagaaagcaggaaaggaaatggtcagaaaacatgagcaagtatttcacaggagaagaaaatcaaatgttccataaacataagcaaaggtgctctgtcttgctactgaggagggaggcgtaaaggaaaaccccagtgagccgcagttgcacagtcagcagattggggctgcccgcctttttaaatttttgccagatattcatgagactatggaatgagagaaacatttataacccatttgtactttggaaaacaatttaaagatccctggtagagtcaaacatgtgcaaactacaccacccagagtttccatcccagattagccagggaaactcatatctgtccagcaaggcaggggtccccaacccctgtagcctaggaaccaggtcacacggcagcaggcgaggtgagctgcaggctgagaagctacatctgtatttagagcagctccccaccactcacatcactgcctgagttccgcctcccgtcagattagcggaggcactgggttctcataggagcacaaaccctattgtgaactgtgcacgtgagggatctaggttgtgggctccttatgagaatctaacgcctgatgatctgtcactgtcttccatcacccccatatgggaccatctagttgcagaaaaataatctcagggctcccactgatgctacattatggtgagttgtatttcattatgtattacaatgtaatgacgatagaaataaagtacacagtaagtaataataatgtgcttgaatcatcccgaaaccatcccccacccccagccccagttccatggaaaaattgtcttccacaaaaccggccactggtggcaaaaatgttggggactgctgtagtaggagacatgtacacaggaacatgcataacagcattttaagagcaaaaagggttggagagaaagaatgccaaagtccacctgtaggagaaaggacttacacattgtttgtgcaatagaatactacatagcaatgaaaatagatggactacagctgtatacaaccatatgtataaatctaacaaatataagattaagtaaaagaaaccagtcatagaagaatggacaaagtatgaggccatttttgtaaggttcaaaacagggtaaaactaaacagtgtattgcttaggaatatgtacactagaaacaaaactgtagaggaaatcaagataatgattaatagaaacttcagcataatggttaccactggttgggaataagggaaatgtaataatgaatttagcatgagaaagtgtatgagatgaatttcctctcccttccccccagcaaattcctgtattgacatcctaaccccggtaccttagaatgtgactgtatttggagaaaggccctttaaaaaggcaattaaggtgaaatgaggtcatatgtgtggcccctaatcttatatggctggtgtccttataagaagagatcaggacacagacatacaaaaggccatctgtggacacagtaagaaggcaactgtctcaaagccaaggaaagcggcctcagaagaaaccaaacctgccaatgccttcatcttggacatctagctccaaagctataagataaatttctgttgtttaagccacacagtctctggtgtgtgttatgacagccccaccaaactaatacgggggcttctaagattatagaaatagtctgctttttcagctgggtagtaggtgccctggtgtttattttaatcgttgtttttcaaattgtacttatacattttatatactcttggatgtactttcccaattaaaataatagagcagcaattactgccaaaacatttctggcccattgattagcagttaattgatttattcagcaggtacagttctttaagcattcaataaaagacacagttccattagggtaatcaatatatcatttttaagaaaaggaatgccgtattttaccggtactacttcatcatctccaatgggtaacaatcaaaagaaaatggaatgaatacatgcttttaagaagtctaaggcaattagtggtcttcaattaaagtagctgtctgttctccctctctattggtttctcctttactagtcatacctcaactaatgtacataaagatcttccctgaaggaaaatatgttcttctgcaagatgttgacattggactctcctaacacttctagtactttatgtggaattactacaaatgttaatgcttaaactacctcaattctttgggggaaaagggatattgcaaataatatatttttattcacatatagaattgtcaggatttccatttaaggtatgtgatctgtgcattgatatcttaggcaaacactatttgtaactaaagtaactaagttacttatatatacatacatatgaaacatgtagttatacacacatgtatacatacatatggtgtgtttgggcacattttgacagaatattgagacatattttgttctaatattttattgtaaatataattaataatcttgttcttcacacatataattaatgggtacatattacaaaccctgaagagaacattatggaagtgtttgtagttcaacccgggtgtcagcaagtataggcaaatatgcaggagtccctgtgatggactcgaaagcaaatacctgtaagggcataagaacactttgacacactacactacaaagaaatggtgcatgtttcttggcatgtaggatccaatagattaattttcaaagtcgagtaacactcagaaatgcacacagttcttataaacaccagacagtatcaaaatatataaatttggtatgtttttgtactcttttgctagagtaaatccatcaaaaacaaggcctgtgtaaacccagaaaagatacgtaagaatttcatatatctggaaattcaccaatttaactctcaagtttaaataactatttaaagtaatatcatccatcagtgaaaactgagaaagaacctccttgaagctcataaggaaaaaacccttgagtttgtacctaattttacctcctgaaggccctgatatttaaaataatctaattctcaggtggcaattggatgatgtaagttttaggtctttatcactgactcagagctgtccaatagaacattccatgatgatagaaatgctctatatctgtgctgtcccacagtggtagccacctgtcacaccaagttattgagtctggcaatgtgtccagtatgactggtgaactaatttttaaatttcatttcgttttaattaacttaaatagccatatgcggctaatggctaccatgagagacacagaaagactagaagaagatatgcaaagggctgccctaaaaataaagcaaataatgtttcagcctttgtgactctaccccagttatatggccttagttaagtcatgttttgccttaactcatttttttttcccaaaactcatgtgaccttcagttgttatgggttttctttaaattctgttttactttaactaattattttcatgttggacatttggaacccacaatccatttcatcttaaagtgtagtggcatgtggttagttaagtcatggtatagctgaaacattatatatattgtgaaaagatctttcgagctctggagttataagactgactttcaaatatgaaatattagaaaagtatgtataaacttctcattctcatgcgttcatacaagcctagtaccgaaataactgacaaagcaaaggcagacgaagtcagcgtaactgaaggaagcactaattgagtgtggtggtgatcatgtctcagcaagactgagtctccactttctgcactcatgcaatgctgaccaggaagaatgaggtctccttgagtttgtggtgcctgttctgtgggatgacccaactctccctccactcttgtcttcttcttctttttttgtttttttgagacgaagtttcgctcttgttgcccaggctggagtgcaatggtgcaatcttggctcactacaacctcggcctcccgggttcaagcgattctcctgcttcagcctcctgagtagctgggattacaggggtgtgccaccacaccaggctaattttttgtatttttaatagagatggggtttcaccatattggccaggctggtcttgaacttctgacctcaggtgatccacccccaccccacccccacccctcggcctcccaaagtgctgggattacaggcttgttttcttttttttttgagacagagtctcactctgccacccaggctggagtgcagtggcgtgaccatagctcactgcagcctcgaactcctaggctcaagtgatctctcgcctcagccacccaagtagctaggaccacaggcacaaactaccacccctggctaatattctgattttttttatttttactttttgtagagatagggtctcactgtgttgcccacctaggctggtctcaaactcctggactcaagcaatcctctggtgcctggccttcactgctctttttaagctgctaagaaaccttcatttatacactgcattgtgatggcatttggctctttcttaggttgaccgcatcgtttattccctcatttgactacgcctgtgggtcttattcagctatttgcaaatcaaagccaagcgtttttcaactgacttttgttgtttatctttcagaatcatccagaagtgctgaatattcgactacaacgggaaagcaaagaactgatcataaatctggaaagaaatgagtaagttaattcttgtttattgcatgataggagaaagttaagacaccatggacagaaaagtgctctgtgatttatgttggggtttagaaacaaagaacgaaatgcatggatttgtaatccaaatttggatttgaggtgagaattaactttaaaaaattatctaatggaaaaataaagaattttatcactctattaaggaactttataactcaacactattttttcatagttctgatgttttattttttcagtgcctggttgttcaaagatttgatttaagcatccctgtactgttcaaataacagagtttcataattagttgacttttgacaactcctggattatattaggggaaacagcttcaaactgatagaaattatcttctccctgagaaataccaagagtttattttatctttcaaagcttatctccagtgatttggactatttctgtcatcttcttatttttaaaaattggtccttttgtggaaaaattatataaatttccagaaaatggcattatggctttttctgggccgcttggatactattatacattttgtgtgccttactagcagaaaactttgtctgcctccaaccgtaagacaaacaactcgttttcttattctttgcaccctggctatccccacagattcctcagatctaaaggactccttaatattctatttcattagtaccataaaagaagagcttattagttcttctaataagcaatctgtatgtaaagatagaactcaattttccaagtcctgcttggtcaaaatagcagtttctctcttccaaaagtactggttcctgttcctcacccatcagcaggatggtgattttttctgaaacaagagtagaggtcgcaggccctcactgggatgagttctgtcagggatgtggagtcccagaacctgactcaacatctccctgtaaacaactcagatcatttacttgtgttggtgctttgatttgagcattttaagcaagacagacgaaagacagtcaatcaacagccagcccgaaagttcggtatctaatgctgcaatatataaaaatgtatacaaaaatcacactacctgctccctgggatctgcaacctgcctcttttgtgttttttttcttacattcttactgctcaccattaaatagatcagaagctttggaaacaagaaatgaggtgtttttagcttttcttgtgacttgctcttaaaatagagattcagacacatgtattatataatcaggaatctgaagagaaaactgtatattgcttttgatccgtctcccttagcaaagtacatattttcatactctatttctttacataagaatatcgaggggcacacatttttgtacatttttaggtatggttttgaaaatatctcaatggaagaagctaggcattccctgaaagatcaaaagcatctaaggctgctggtggtgatgcattttctcgatggggttgttgtggtgggcagctggatttaggagtgttctttattgcacctgctcccattgttaggctgttggaagaaacgtggtgcacagcatgaggggaggctaatcctgaatgttttatggagcattacgactgcaggtagagaagcaaaaatcgacctcataaaaaccttaagttgtttttactatgaaaacaatatacatacccagtgaagaaaactgaacattataggggggaagggaacaaataaccctaacattttttaaaaagtacttttaccaccaaacacaatcctgtttaagattctggtgaattatatagatggattttttttcttataaataagcctttgtttcttttgtcttcttagttgatatcacagtctgtatgcaattttataccctgctacttcatttagcttcataatggacacacatttccatagataaataatttcttagagcccgtctggttgtctgagtttgtaatgtgacttaatagccttgtccatggttccccctgaaaatgatgtaccttccattactgcagatactataatacacgttgactgctagagagtagctaatttgtataaatatcgttttaaaaggtgacttaatttgttccctttcaattctgagtctttcatgagataatctcaaaattataaaagttgaaaacaaaactatctttttaatttatttctctctttgcaacctcactgtcagactgcattttcaaaaatacatagaaaatgtttcatatgttcctatgatatgctataattttaattgtattacttgtaccaattttagaaattccattatatgaaaagtaacattttcataataagaggatgccaatattactattttaatgatgcattaccaaaaatacttcagtataacaatttttttgcaaaaggttacatacctattccaaattaactatacctttgacgcaatgaatactaaaaacaaaaaaaatcaagtagagtgaaatgcttgtgcactactagcatgtaatgctgttagacaccaaaggcaatcaatcatttagtatataatagaattttaaatttgcatagccattggcccaatagagtcaagtccgagagtttttacaagtgaaactataagaacccagagataaaaatataagcagagaccatttacatgtttaacaatgagtacaataaagggcctgatcaatcaggatgaacagctgaccaatcagaaggcaagctggttagtataccgctccaacaccttcagccccagagtcagccctgtgcttaaagatgttttacctaaaagtacatcaataggagactgattcaataatcagctatgaaacaggataccatacaacaatttaaaatgatgagacttttattataaaaaattcatggtataatcaatgtaactagcatgttagaaaatagttgtttcctgctagtgtttgttttctaaaaaatgaaaatagtttacatagtattcaatttttattttaaaattatacacatgacatgtatctctgagtaggaagattatagaggatatttactttctttattgtattaatgtttcgcaaaaataaaatattacttttaaaattaggaaaaaacattttcttttgaaggaaaaaaactattgtaaaaacttgataatggttgaaaagaagattgctaacgtatttattattcctaaaaagaaaatgataaaagttattttgagaggcctctggaaggcctctggtgacttttaaagagcaaaaaatatctactcattgaatattgggtctttaaatatccagaagtttactgtaattgaaaaacctgcttagaaaccacaacctaaattaaagcggtcccagtctcttaagtctatagctaatgctgagagtcatctaattaatcctactcaaaatgcttctgtggtgaaccgattcttcatggcacagggctgaatttttattaaatagtttttcagggaatctcttttatttaccttctaacatccctaatttatgaaaagattggatgctgttcacttaaaatctgtatttgtatagcccctgagaagcattttgcacaatattgctgtctgcctatggacctgtagaaaccaggttgataactttcatacttctactagatccctgtggactctcaggccatcccttacataggtattctgtgaaattgtatctttgatcaaaatgttttattggacaggctggccagctttggcatcagcttttccagtttaggataatgaagagtgatggcagtagatcacgttccttacatctctcaatcccagcatgccttcaagttctgttcccatcactgattgaaggcacttgccatgggaagtccatagcccattgaatttatgtttggggtatctctgggatagaataacttcagcactgacttattttgcctagaacgattccagacatctcttacagggcaactttaattagtattcactctagaacaataacagaaagggcattttaaaatggctaaacatgggtataaatatttggaaaggcatttatcttagatcatctctcagaatatcatggtacagaatggagaaatgtaaccagtgtggagatggcattagatggtttagttggctgaatcaccatccagaggatatcaagccattgttccccttgacccaacccatgttgaagagggcgactgaggttgctgccggtggccttagggctgtgtgcatggccttgtcctggcccacagtttcatggaccatctcgatgaagatataaaaagtgctctcatcacatttcctggcaatgcagagctagggggaataattgtgcttggcacggcaaaatctggattatgaagatttcagcagttcggatcaatgggccaaaactaacaaggtgagatttaatggggataaatgtaaaatcctgtgcttgggttaacaaaaaaataaatgttgcaagttcagaaggaaatttgttagtagttcttgtgaatgagacctgcatactcaagcccctgaggcaatgtggctgctaaaaaggtgactgccacctgagcgtgtgggggtatatgtggtgggtcctaggcaggggaggtcattcttctgctacacagggtggggcacagccaaaaccctgcatccttcgccgttgcaagcctgacatcagagagccacctgccacttcattctcatttccaccattggatgcttctttcctttcctcttccgccaaccatgacatccttacggtcaggggtaggacagcgtggctcatcataggcatcgatgagcactcctcaaatgagtggatgatggagtctggacaacctggaccaagccagaagtgagttcccaggaggtcgaaggtcacttgggtggggtgagaaacaattcaaggagaaaaccttccagaaaggaacacaggatttggagttaggagcccaggctttgaaagcagcattgctcccaacagcaagttactgatattctctccacttccttcatggcctccagcgatctgcccaccttggcctccttgtctgcaaaatggaataagcatctgtgtccagtcaatgcaggaagattatagctcatgttaattttgatgatcaggtttgaatgactcaataacatttctctgtggatccagcaatcttaattattttaccgaattatattatgttctgtttcagcgtttctaaattaatggaaatcaggttatgcctactctttacctctaattcttggtgatggccaaacatctcaatgctcacaagacctggaacagacacgccaggctggtccttcgggatccagctgctgtagggttcttacctttacaatcttgacatgcccagggattggacttttaaaatctttgagtgtagagtgctattcccttttacttcttctcttgcagaagaagcctagactgtttaccccctccccacccaccatcttttttttttaagaagttaaacttttattttcactgcccaaccatcagtcaatatactgggcaaaccagcagaagcccttgccatagccctgttgttgtacacactgaacgtgaacgattccttggaaaaggcatttggctccttcagggtcacaagttccctttcctgtggtctgtccataaagaccaaatggcagacagagtttttcttcactgattgtgcctgttctgtccaatgtttgctaatcaagataaggactggcacatgggatattctttcatcagtcattaaagcattgagctcctctttggattccaggatctgaggacaatctgcacagtaacccagaaaggcaatcccatttgttgctgggagatcactgttccaaaaccaacgtgtttgcttatgccccagaagatcaaaagtcgtaaaagccaggctagcagttgtcagctctgctgatggcagaggtcgtgttggagcctgttggcccaatccaccatctttgagcatatgaggaagaatggtttcatccacattgtcccaacccaagagaacaagttttctagatttcttgtagagtcctagaaactggagcacactgtagaagccattgtagatccactcacagatgaaagacattattaatgctgaccatagcctgaggggctcccctggaggcagcacatggcctggaccctccctcagagcacacagaccagcagcacccggaccaacagtgactcaccaggtggacatcacaccccctccctgaagcctgcccttaggaatggggagttctaaactggctggtgattctaattagtgactaaacaaatgtcgatggaaccatatctcagaaattatagtctcatgtttccagctctcagcttcccttctactattaactgatctttatcagaatctttattaatatcttattaataattatctttactaaacattaataattaataaagctaattaagacaatgtgcttgctcatgcctcccaagatcaaaagttataaaagtcatgtcaacaattgtcagctcttctgatgtcagaggtcatgttggaaaacattggcctaatctgccatctttaatgattatcatctgtcatattaattatctttattaattaatctttattgatgtgttaaatcacttgctcattcacttcttcacctggttatttattcacaaatatgtgtttaataccagacagtataattgaccctggagggagagtagtgaataagataaagttcctgtcctcttagaatttagtcaaggagcccaacactaagcagatcattacaaaaacagtaactggatgactgcattgctcagtgctcaggaggggaaggtatggggccaatgcctggtctggggagggaaaatgtagaatgaagcagctcttaagctgtgcacacagagggaagagcccagtcaaggagggcaggaggtagagagagaaagaagagcagaagtaaatgtccagcttctcagattctagaaggtctttgtactgatgaccaagaaggagagagacagaggaagccaggccatacaggggttgtgtgtcctgataaggatcttgactttattcctaaatacagtggcatgccatagaagaaaaggcctgtaggcagaacaatgacatgataagattctgcttttcatttgtttgagacagggtctcactctgttgcctaggctggagtgcatttgtggaatcacagctcactgcagccttgactgctctgggctcaggtgatcctcccacctcagcctccctagtagctgggactacaggcatgcgctgcaatatccagctagtttttctattttttgtagagaccgggtttcaccatgttgcccagaccagtcttgagctcctggcctcaagcaatttgcctacctcggcctcccaaaggcatgagctactgctctccaccaaaattcagtcttttaaagtccatctggctgcctgtgaagactagctgggagggtagagcgggtgtggtcaagggactgcatattgctgctgtccagggagagctgatgatggcttgagccaagagagtattggtgggaaggagtaagtagttaagaaatgttaagtaggcagaatggacagaacatgatgaatgatggaatgtgtgggatcatggaaaggaaggcatacaattcttacctgagatgccaggagaacagtgatgccttcgatgagaatagagaaccctggaaaaggaccaagaacttgtcctttgagcagtggccagagacacaaagatgtgggtcatggtaggcatggtcctgagagtctgggaggggctgaatattgggtttcacagaattcactctggaggtgacctgtggagggcccttgtagaactgggcatggcatttttgaagggggtgttcatggatgtttgccgctgaccagtggctggcagctatgagctggagatcaggagccggcagtgggcagaacatggagaggcatcagctgtggccctgacggtatctaaatagctgtcacaacccaaggcaatgtcagtgctccactgaattctaagctggagcctagtgggtgagcctctggcctctaggatcgctcccaggccctattccatatccttcctatagtctgtctccatgcagtgggtgttccccactaccaggagctcacacatggactcctgccctccttgaagtctagagcattgcttcaagaccaccagcatcaggaccacctggagcgcttgttaaaaggggcaatgcctggcgccaccgctatttaaccagaatccccagccatagggcctgagggtctatatttttaacacattctgctaggagttatattcacactttacttagagagccactagccacatgtggctatttaaattaagtttaatttaaataaaattgaaattttagttccttgctcaaactagccacagttcaagtattcaatagccacgtgtggctagacggacatttccatcatcatagaaatttctgttggacagcactggggctagcagggaaattccagcccattggatccttctgtgagaatttgggatatctgtcttagctgatgcatcgcccacaggaatgttctttcctacagggagtgaccacacctcttcagcttgcctaatgcctgcagtgtaaaaagccccatcccctgccttggagaatccggtgctaccagaggggtcatctctgcccactttgatgaaagggtgatggtgcagtcaaaaattctctaagcatgactatagactcagggaattaactcaagctacatgcacttcggcaatctaactagaccaaactccttcagatttaagttaaaatctctcaaccttaacatttaagatctttttaattgagctaaattttgtttcctgagtaagagctaaattcccttgagcttctcccctcatttcattctttgaagttgtatagacgttgaagaaggtcagaacaccatttttagagctttttgttcctcaacccgagttaacttgaaagtgcctaaactggttaagatcaacctttttaaaacaggcccctctgggttgtgatttgagagtgtggcgtccttgagtgaactctttgaagctggaagaatgagagagggcatttgagatggagatggagttccacatttcattacatcccttgcactccttcccttctgacactgcagactcagggttttctgacgaaaatcctcctgcagccttaagctcctttccccaactctgtatcccaagaggacagtaatggctgtcctggctcttcccaggaggtctctagcagtggagaggctgatgccatcttagtggctgtcattgcaccttccctctcctggtgcgaccgggatggttacgtgcagatactgtgcaggctggggtcgttatggcctgtctcttctggattttttctagttgttgtgtcctcaaaagaaagaccatgatgctttcattgattgcttatgacaataaaactaactctctggaaagcttgaaagttttgttagaggcgtttgaaccagagcaactccatcttgaataggagctgggtaaaatgaggctgaaacctactgggctgccttcctagacagttaaggcattctaagtcacaggatgagaaggatgttggcacaaaatacaggtcataaagaccttgctggtaaaacagcttgcagtaaagaagctggctaaaacccaccaaaactaaaatggtcacgagagtgacccctagtcatcctcactgctaccctcccaccagcaccatgacagtttacaaatgccgtggcaacgtcaggaagttaccctatatggtctaaaaaggggaggcatgaataatccaccccttgtttagcatatcatcaagaaataaccataaaaatggataaccagcggttctcggggctgctgtgtctatggagtagccattcttattcctttactttcttaataaacttgcttttgccttgaactgtggacttaccctgaattctttcttgtgtaagatccaagaaccctcttttggggtctggatcgggaacctttcctgtaactctttgacataattttgctgagttcataaacacagattctgctacattcttacagtatcatgccccaggaggccaaaatcctagattactgttttcagaagtgtttacttcaaactcgttatcttgagtggagttgagccctgtctgtgattggccatgtttcataacatgcatgggaaaactgcaactgatagtcacagctctgttttcttgaggccttcttactggtttcttacttctattgttttcacagttcattagtgatgacaaagagctgcaacgtaactgtatttaccattagctcatttgttgcatgctgacagtatgtggcatatctttattcctcatcataggtagcatcatcattacaaagctgggcttcatcagggacttacagagagatttgtacacccacattcgtggcagcggcattcacaatggccaaaaggtgggaacaacccaagtgttcatcgacagatgaatcagtccacaaaatgtggcatacgtaaaatgaaattttattcagccttcaaaaggaatgacattctgacacatgccatcacatgaactttgaagacattatgctaagtgaaatgactcagacactaaaggacaaatattatgcgattctatttacatgaggtgtactttgaataggcaaaattcgaataggcaaaatcatagaaacagaaagtagaatggtggttaccggggcctggagggttagggagtgaggcgtttggtgggcaaagtttctgtttgggatgatgaaagacttatggagatggatgtcagtgatggttgtacaaaattgtgaatgtgcttaacgccactgaattatgcaattgcaaatggttaaaattataaattttatgttatgtgtattttgccccagttaaaaaacaaagctgggctcctggtttgtttttattatctaacaaaaggtctccctccctgtcctcctccatgaaggtacatagtgtagaggaagacggtgatagtttcttctaaatccacccccaccgccccccacctctcttttttgtaactctaagaaaatcacaatcctccagctccatttaggctaggggtccccaataccttctctgacgtgctctccccaacccttaggaactgggccacacagcaggggatgagtatctgatgagtgagtgaagcttcatctgtatttacggctgctccccatcactcagattactgcctgagctccgccccctgtcagatcagtggcggcattagattctcataggagaatgaaccctcttgtgaactgtgcatgggagggatctaggctgcctgctccttatgagaatctaatgcctgatgatctgtcgctgtctcccatcacccccagatgggatcgtctagttgcagaaaaagcagctcagggttcccactgattctacatgatggtgagttgtataattatttcattatatattacaatgtaataatagaaataaagtacacaataaatgcaatgtgctggaatcatcctgaaagcatcccctgcccccacccctggtccatggaaaaattgtcttccatgaaaccggtctcaggtgccaaaaagtttggggaccactgattgaggtgactcttctgagctaatgaataagggtgtaactgtgattcaacagcaaaacccaatctgacttccctggactctttctagagctgcttccgtatccctatcagaggagatgattgacagtgttaggatttggatttggatttgggtatcaggctgcttggagacaagccacgtcagctcctccattctaaaatggagagtaagaccttcctcccaggttgttaggacaacacagtgatatggtttggatctgtgtcccatcaaatctcctgttcggttgtaatccccagtgttggaggtggagcctggtgggaggtgattggatcatggaagaggtttcttctgcgtggtttagcggcatccccctagtgctgttctcgtggtggacttctcgtgaaatcgggttgtttagaagtgtgtggaacctcccacctttctctcttcctcctgctctgaccatgtgagatgcttgctcccactctgccatccaccatgattgaaagctccctgaggcctcctcagaagccgagcagaagctgtcatgcttcttgtacagcttgcagaaccatgagccaattaaacctcttttcttcttaaattacccagactcaggcatttctttgtaacagtgcgagaacggactaatacataagggatatggtattcagtgtgcttgacactgcactgccattcacagcatgagtgctgttctgctgccattgctcttgcattatctccctcctcaccctggccgcttctgtctgcaggaaaaggaatcacatgctcaggtctcatcatcttccttcctgcaagcagcttcctgtgactgcccctattcctgctttcctcacccatctttctcttcctccttcattttgatggtcagaccaggtcaatcccagtaccctgcctcgtcccaccctgcacctgctgctcttgtcacctgaaggtttagatacccccatttccattctccccagcatcagcaatgggagggcccccaagtcacctgtgtgctgtgggtggaggtgggccaggaggtgcagtgcaattctgtaggcctgtggagcccagggaccacctgtttggctggcctggctacagattaggtgaggtgcatgcaacagttaattgctatgtacccatcgcctgtgtgcaacaattaccatgcaattatcagactcccccacccccagacatcacgtcatttcacctgcaaattctgacatatgtattgctaaaaaaagaattatttttatcacacctaaaagataaaaattttatagtactatcaaatgtccagccagtattcatgtttcccagattttatatctctccatttttttcttggcagttggattgcttgaacttggttataaacacagtccccacgttgtatgtgtctgctacatttttaatgtgtcttttaatatataggttccctatccttccttttaattcttgcaattaaaatcttgcagtccttacaaatgaaaccagatttttatactcagtagaattttccacactctcaatttgctgatttcatcctcttggtgctgtctagcctgttcctctgggccctgtgttttctgtttactggtaggtaattcagtgtacaggcttgtgcagattgaggtactggttttaggcaggatgacattgcaggtggtcctcgttcttctcttgtgccatgtcaatagttctgtgacctctgattgtcttgttttgtgatgacaggttgaccactgagtttggggtcactctgatgcttccattagaaaagtctgcctgagacttcacccaccaggttcagtggccattaacaatcagtgcctagatctgttctttccttgggtcctgcaaaatggcagtgttctatcattctttcttcttttattagctgaaatgctcctatagagaagaactttccctcatcaattattggtttccctgagatatgagataaaaagcaagataaatttttcttagagaccacctctacttatcactctgcctttgccagtgggtagccactgtattccccaaatttagcatctcacatttggtgatatgctgcacagccccctgctgagggtccacatttgtaaaaggttctgtggggataacgaggtgcaccacagcctgtcctggagtagcttcttatactctgtaaacacttcttgatccaaaagccttgtattttcacattgaaccataaattacccatatagatattacacaaatctttttatttagagtgctggataaaaggctgactttgaaactgctctacagagacctaattttcttgctgtttttaaagacaaaggcatcctcacatctggcacggaggtagatgctggggtgagaacagggaagcaggaactggttccagtgttgctagtaggaaaagcaggggtctggattgcgtctagacatagcctgtcccttggaggactgtttccattccaatggcaatggcaagttaaaaaaaacaaaaaacaaaaaaacaacgtttcattcacaagcaggcttagtcccactgaaggaaaatcgccgtaattggcaaagaccaaagccagagaagacacagaggctaaccctacttcttcagggacccgcgagaaaaacaaaacgagggcgtttgtctaaaaatgttatgaaatactcacttctttcttctcagtatgctggtggatttcactgtgggatgaggtagattcaacataagtggagaacaaggctttctttattttcttctatgattttcttccttatgaaaaacatgtggtcagatagaagatgatacaaaaccaagcccccacaggagggttatctggggagacgatttatttagaaagagttattttcacagcccttctaaggccacttcttcagcttcaactggcctagaggattttgttggtcagtttcgtggttttctttgaaaatctgacaggctccagtggagaagcctctcgtgctgtgtccacagccggccagcacccattaagcaaatatcagcatcacagaagttccttgggagttgtgggaaatggtttttacatgtggttttcgtaaaatgaaaacaattattcattaatattttcactaaagttttgatggtattgtacattcatatcaacaaaatatatagaatgttaggttggttaaatgaaaaaatatgaagtgacattaaaaacttactaaaaatactagccctacaattcaataaatatgtttaaaattcatttatattttggagcaaattcattatcttaccaaatagggtaatgattatgactggataacatcacttcttatattctgtaagtacttcctgatccaaaagccttgtatttttatattggaccataaattacctgtatagatattacataaatctctttttatctagaaaattatttaagacagctgctttttccaaagtaattttacatgtaggaactgaaatcactgatgtagatggaaatatgttattcaatcagttaattggtttttaccctatcatattatagaaaagattcaaggttactgaaggacacataaattaattagtaaactttttccagatgtgtaaaatacacccccctccccgcccaccaacaaactaacatgtctgcattttactgttttcagagcagcagttctagttcatattgaataaaaatgatgaagaccatttgaggaagtatgatgcatgcctgttactgctttacttaaaacaaacaaaaaaacagcaaagaggatctagtgtgatataggggagaagcactgagccaagggaaaggaaacatgaaatctctggtatttgtaagctctgtgactttaggcaaattaagtaacctctctggtcctgagttctctcatctataatctgaagttaagcctcctcagcttggagactggatcagatggttttctggggctccatttccactctaagatgttcggcctcagtaattttctgcattcaagtatgttctcactttaaccagaggaatgcttaaactgatcctactggcagaaatcatgcttacaacactagatgaggaatcatgcagggcatgtggcattcaagcatcaaaacaaattaaacaattcctacgagagccaaggtttcttatctcattgtatttcagtgaaccaggaaaccctgagcgagtggctccttccacatggtgctgagtgctgttccttggaaacctgagaatcccaggatgcatctcagtgcccagagcagtccattttgttgggagatttaaatgtctgagattcctcatctgggggaagtgtgtgctctagggacatccctcgccaacatgatgaagccagcatggagtaccccacctgtgggttggaggcagggtgggaagtgcccttggcctgaggagtgggtggcatttgataaaagctagatgccttcatgatactcttatatataatggcaaccttgacttccttaaaggcttttaaaacaatttttaaagcagttatgatagaagaaaggcactgggaagcctctgggactctagttatgtcctattttttaagccaagtgatgaggacatgggtgtttattttagtgttcatttttccacattcttttatgtgttcactgtaggtcacaaaaataaaacattattttttggtagcaaaacctggcaaatatttttgtccaaaaaggggtaatcatactgctctttttgaacacatttgttttcttcttcccctctgacctgcttggctaggaatcctgactgatttgcagatttgcagaggacattgtcattggaatgagtttaaggaaagtggccactctttgttgccaaagacaaaacttggctaaatattttgatgaatcggcatctttttttcctataatcattggcatggaattcctataagtggaaatagtgaaaaccaacacaaatactatataaaaagtaggatttctcagaatgtatttgtaattaaatttcagtactgatatgaagatacataaatatatgtacatactctacatatactatatattatatgatattacaaaatacaggtcattatgcttagaatgcaatgactcattttattaggttgagccaataacaaatatattatgtttagaaaaatatgttagttcaacctatactattgatgacttttcaaagattctactgcagtacaaacatggcttatgccctaaaaataatctataggttttgatttagaagtagaattccttccaacatttaaatgttgggtattaaaaatactatcctgggaggctgaggcaggagaatgacatgaacccgggaggcagagcttgcagtgagcggagatcgcgccgctgcactccagcctgggtgacacagcgagactccatctcaaaaaaaaaaaaaaaaatactatccatccatccttattaagagagaaaaggccttttaatctgtggggtgtttttgccgttttcgttttttacatttggacattgaagtgcttgatgccatactgcatattctgttcatctattcatgtttgttcatttgcttattcatttaacaaactgtgttccagatagtgtattggggtttgagacacagagatgaataacacacggttcctgcccttcacaaggcctaaatccaccaccgttttacacagtcgcaaaggataggcttgtctgaattgatttataacaaatactcactatagggtatcactgaactagattgccaattaataggaaaattagataatatactgctcttcctatcccaatctttgccatgtctttactcccaaaaaattcagtaatttttgcttttttctaagtatagtcttaattgctaagtgttttctcaatttttcaaaatgagaaccagatgaaatgcagcccgttcgttgtttcaatctcctgtcctcagatgaagcattcttggttcccatatagaatttttaaacataccagtgtgtgtgtgtgtgcacagtcgtgccttggtatctgaaggagattagctccagaacccctcatgggtaccaaaattcaaatatgctcatgtccctaatataaaatggcatagtatttgcatataacctactgtatactttaaatcctcctgtatactttaaatcatctctagattgcttataatacctaatacaatgtaaatgctatgtaaatagttgttatcctgtatatttttaaatttgtatcatttttattgctgcattattattttttgttttctcccccaattattttcaatctgcaattggttgaaactgagagtagggaaccccaggatgcggagggccaattgtatggacataaatataaagctcaatatatatgtcacatcatacaagtatattttttggtgtaatctatgggtggtctgtttctgtcacagtgctttggggtggacatgatagacacacatgtcattacggtggcactgccacggcacaccccttctgtcttaagattgatggtctctggttttcagtggcaatgtttctcttaagtgccgtggctgtcatcactcaccctctgtccacttttcacattaccttcttcacagcctgacaagttatctgaacaattaactggccttaaggaaagtttcaacctctgtatgttcagaatgagggacctgcttgcctgtaaacatttattttgcttcctatttttgtttttactcttttccccagtagtccaatttttctaaataagaagcagatgaagagcagcccattggttcctccaatctcttgtcctcagatgaaggtttctgggttcccatatagaaattttaagtgtttggggctggctcaacagctttccctttggaccctgttgtaaacatcgaccacttttgatttatgagaatcccagccaggaacagagggcagcttttaaattgctaatttgtatccatgtttgcctgtgagtatggatagtctagcaggcagcgtgaagcgctggctcccggtcatttgtcctgttgtcccaggacagatctgaagaaccaagtgaagactacttggcaccagccatgggtaggtaggtaatgtgtatggtaatgtgtatggtaatgtgtatggaagaaatgctggggcccttgtaggcaggtgggacccaggtgtcacttgaggtggtggctgaccttgcaggcagtactgtcacctctgggagatcatcccagctttgcacatccacaaatcattcttgacggaactcaagaggtctgactcacaatgaccaaactcccatgtgacagacacctaaaccagactcatcactgtcatatatgcatcatttccctatcaccatccatgagctgactcgatttccctcagttttctttaaagaaagaatttcagtgttagatgtttggcccaccaaaccttactgagcgttttggaactttttttaggagtgatcatcagttgggttgattgccccggtttagttctcagagagtgactttattccctcatgtgtggagaagatgtactttctctctctaacccatgcatggatgatgaatgatagctcaaagcgtttgtagtagagaacaaaggaaatcaggacatcaaattcccacctaagtatcaaatattagaattgcattttcccatagtaaaatattttgctgtgtcagaccagatcaggtgcctgagaccttttgagtgaacaaagaaatgagtggcctttatttttgttagtaagaaagcatgtgatcgctcttttcagtaaacaaactttgcaaaaatattgaaaagagacttttttaagccacaagggctatagctcatattgtaaacgtattataactttgcagagcttgactttcctctcaaagctccttgaagcttttttaagaagggtttttcgtctgtatcacatttgcttggatatctaagaaggttatttatttcactaggtaaattgagagcactgagctgggaatctgataatcccaggtgaaagctgcactctgccgtgtgaatttaggaactgagctgtgtaagcctcagtttgacgtctgttagatacagaccaccaagatcctactgttgttttaggaattaaatacaaaaatccataaaaccatttactacagagtctaaggcataggaaatatcccacaaaggttagctggtgctgctgttataaattcaaccattatttttgacctcctggtatataacaagcattgaacaacacactggggacacggtagggaacaggggggaaacagcccttgacctcaaagagcttgcaggctagtggagctgtgagatgccaaagagatgatcttacaaataatggattatgctgttacgtgcactggaagtgcttacgggcatgggcaatgagggaaagaaaggtgtcttggtgtggcagccagggaaggcccacaggctagaagtactgtcacctgtgggagtcagccaggtgcagagaggaggaagagtttcaggccaagcaagcagtgcaagtaaaggcccaggtgggtgaggagcttgtggcatggaggctctggccgaatgccagggcatgggctgagagagtaataaaaaagggagaccaaggggctaccaaagaccagactagatctggccaggtttcagacgccaccctgcaccaggggaagccactgaaggttggtaagtagggcatggatggattgaaatgggtgttttaagaatggcttcctgaatgaaacaaaaagtatcaagagcagaggtcggaggccactgggagaccattacactggtggggcgtgtggggcacgggtggggcgtgtggggcacggaggcagtggggatgagtgaggtggaggaatttaagaaataattagggaaaaatcctgaatccagagacatttagatgcaggtgaaagtgatagtctagaaaactgtgagatgactcagactctaatgaggacaaagacagattgcaaataaaagtgtttttgtaagatatgagagtgcagaaagcaatctgaataaacttatgcttacattattttaaatgtgtgcctgaattggccaattaaatattgtcagtagacagtggattgttccccactgtgtccctagcatattattctatgcttgatatatagcaggaggtgaaaattgaatataaatatagggacacagatataaaatggccaaaaatccttttggtatcttctcattgtgaaaattgagaggccaattctatttgaggttgccaaatagagtaggcacctatcttactagttatttccaggcatggtgcctgtaaagacaccaccgttgtccagaaatccatgacctctggttaggaactcacctgcttctaagtgcctggagtcatttgcgctgctgagcctttcctgagcccttggcaaggctgactggttttataattctaacctctgcttttatatattcttatctttatctttgttcttacctctataaaatgaggatggttatatttccttgcccatctccacggttgatggatgcaagttatttcatgaagcgattgtagtattttatctgcgatgtaaatttttatgcgattgtgtgacaggtcatatttccccattttcctttatagttgtggatagagttttatttaaagagtcaataaaatgtttttcttttaaatacagcgtagaaatgcatgaccactttcgtgcacctgagaaagttggtgaaaagaatagattatcacatgcttgagaagttcctctttgttctaagttgtattgagtcagatcgagttcctttgctaaactcagtgcaattcctgcattctctcagcagcgaagaggccatctcaatacaaatggaacattttgatcgcagaacagaagaccatgtgcacgttccagggctacttaggtgttttggtgaggattgggcatacctggtgtctgggctttaggacatcactgcctgacatcattccttcccggtactgtctttggagggtaactgtgtgtgtcattgtgttttgcagagcacatgtagggttaggtggttgctgtcaagtgaaagggaatccaggctggcagtacacatacaggtggtgtcagtgttcagggaggaaggggctgagagtgggcactgcaggccttatgcaggatgcagaagtggactggggagcccccaggtggccagtgggtgggctactgctaagagtggatggtcaaatgctctgcaaaatatgaaaagctgcaaaaccacagaagtccctccatcatcatcatcatcatcatcattattattattattcccatccaaaggtgcaggaacagtatttcttaggaatatatatgcaatatagtacttaaagaaccagcctttgcaatgttggtgttaatataaaagagatttctggataaacctactatctccccatcctctagggctcctatctcatctgtctccattcttttgaagccctccagagtgattcagggaaaattttctccagttcctctgctttttagttggtatagtctctgcttctctgcactgggctattgtccagataaatgaagtagactcctggatttgtagactttctaagtggaagtagatggaagtgaggatgtctgctggaaggtaagctcctgaaggccccagggctgaatccccacctcccagaccagagtctgacacacagcgacggctcaaggtagtagaacctctatcaatgcagagggaatgaagggacctcagagatcactgtggccacgtcacccattttacagatggagactggaagagcagggaggtttagacacttgcccaagatcccgtagttgttggtagagttagaaactaaaacaaagggtccaggtcataaacccagagttgtttcctaatacattggccttctactgttacagagccataggactctgcattcatgtttacccattcattcacaaactaagcgttcattcatacaatgtgattggtagatcttagaccaatggctttcgttctgcttggacattagaatcacctggagcaaaaaccaaagttgccaggtaggggggtgatttgatttacttttacctggacataagtatttttcttaagtgtcccaggtgatctgcagaagcaacagggttgagcaccaccgtggcagacttggctggtcctaactaccagccgtggtgggcgagtgaagatattcctttggctgggtggtaagtgccctgacgagatgcccatgggcacccacctccttccctgcaccgttcctgatgccgaaggcccttggacagcctgcactagctggatctggctccggtagaggcgagggaaggataacaccataatgaccaggcgtgtgcctcggctgtctgctgcctctgtgcagacatctctgagactagctgcaatggggccagttagctttgccatccccccttcagagtatcattcagttgtcctggagacaaccctcatggagccaggtgctttgttggggattcaaagaaaggtaagacgaagtccccatcaggagggaccctccgtgggcaggaggaagtgtgttttgatattagtataaagcgaggttgtactattttgtttaatgctaggatttaaaaatcagttttcctggaaacctttgctgtttgctttttacaaaatttaatagtatggccatgatgacatcatcaatgtttaaactgccttattggaccctcctagtcctcctgccatgaaggggctgcgttctaagggtgagtgtgtgaggtggagccgtggggaggaagctgggactgaatgcgaacgagagctggactcgggacaccatctgagattgccacacacctgaggcttctttttgaggtacaaaaggagcagtttcttacttcccaaagtaagtcaaaacctgagtctgttcagttctcaggcctcacaaactttcattgagtgtagcaaaaggaagacaggaagaaacctgtacttatcaccacctgacatcagcctgagtgccagctggccggcgacaccactgggagctgggactgctagtgtggaacccacagagggtggcattgcaggacaagtcagcagatgggctcacgacaggaatgccccaaagctgtccaagctgaccccacttcgggtgcaggaaagccgtgctccgagggtggcccctgtccaaatgccaccgggggctggtgaccggggcgaactatggccagaacatgagacttctgtggtttgtaaagggggactgatgtcagggaagagagatggtgccctaattgtcttaattatggtttatgtcaagagagatgacgttttaatggttctaatgacagttccaggctgtcagtacactcttaagtcctattgtcttgaagcaatttctgaacaggtgaagaaacccctgcaaaacagaggggcctccccagcgatggcgactgttgcacagttcagaggaggcctgggagcatgtgagcagagcggtcagtggcctttgtcctcactacggtggtggctccatggatgctctggatcctagggaaggaaggaaggaagaacagcagttcaggagggccaaggaaagggcctcccgcctggaccgggtgtggaattgacgctgagtaacacacctgtgcaggtggactctgtgagcaaggcaagaggagatgaggagagcatccgcaggggaagaggccaagactgcatcctgagaaggaagtgttgtcagttgctcttgctggggtgaagctgaccagaccgcaggttcttcctggagccagtgacaatgccgacagctgacacagagggagcacatgacttgcgcttggcattttcacctgcattatcttgtttattcctcacatcaaccctataaggtatgtgccattactgtccttgtcttccagccaaggaaactgaggcacagccctatcaaatgactcccaccaggtcacgcagctgataggtgccagagctggctgcagacccagggaggctgcctgcagaccccaagctacaaacctgttctaatggctgagagctgaacacacctccggagcctcccaagggaaaggaagggatgagctgggaagatggacagtgctgcccaggaggggactggggaagggtagcagaggggccataggaccttggaggatggccactgaatggctctgactgaagatagcactgggctgggtgagccggcagagacatagcgccctggaagtctggccttcagcatcctgtgctgtaattgctcaactccaggtacaggatggggcatggcaggcctgccagtgaagagaaacggggagggcttagggctcacctcactcatccttgaggcttctctcatggagcctgtgccagctcaggccaggcaagaaccgcatctcattccctgcttatcccaggctctgccctggtccctacaagccctctgggaggaagagtgggacagtatgaggaggagagcagaagccctccccccacccaacccacaaagatctgctcaagcaaagtgagtccaggagctgtcagaggagcagggttttctctggggggtgggtgttccccctcttagcccaagctctgccacacgagaagcagatgtcttgttctaatcttcaagtgggatgattcgtggacactgccattagctagttttcttaacatgaagagacagctgcttagtggctatttctatgtgggctgagctcattcagtagagcagctttcccctctggagaacaagagaatgataagcgagcataaatcatgctaaaaggaacgactcctcatcatgagtcattaggacacatgccacattggcgagcagatgaaaaacctttgatgaagaccagttgtaaaagcacaagctaatgctggagaaatgcatcatggtgacttgaaagtgtaatatatgcatgctcacgctttcggtcttaaaaaaaaaaattgcagtaaatgtcaagagtggtcagaaaccatttcctgtgctggaccctgcagggagaggttcagggaagggtgggtttggaagaatacttcaaatcagtgagtgctaagcatattttggcacagtccttctggaatggcatcaggaatgtgaaccacagtcctaaacaggtatgtcctgttatgtgacagtagctataatagaacgtcacttcagggtttcgagagcacatatcagagcatggttgaaaaatcatccagagaaattccaaagaagaccatgaagttgcaagtgccacctttgtccctttctacaaggagcaggaggcagtatgccagggctaaggcatcagctctgcacccaggcaacctgctcagtgtccctgttctaccacttcatagctgtgtgactgtggtggttaatttaggtgtcaacttgactgggttaacagacaccgagaaagcgggtaaagcattatgtatggatgtatccatgaggagggtgtttctggaagagatcagcatttgaattggtgaactgagtaagaaagatcccccgtaacccaatgtgggtgggcaccatccagtcagttgagggcctggatagaacaaaaatagaggaaaagtgaatttgcccactttctcttctggagctgggacactcatcttctcctgcccttggttgaacatcagaactccaggtctccagcctttagactctggcctcccaggtcctcagacctttggccttagacagagttacatcatcagctcccttggtgttcgggcctttgaacttggactgagatatgccaccaacttccccagttttccagcttgcagacagcgtatcatgggccttcttattcttcataactgcatgagccaattcccataattaatcctctcccatccatccatccatcccatccattccatccatctatctaatccattctccaatacatccatcccatccatcagtccaatccatccatctaatccatccatccatctaatccatccatctcatccatcccatccattgagtccatccatcatccatccatcccatccatccacccatccatcctgtccatccatccatccatcccatccatccatccaatccatcccatccatctaatccattcatcccatccatcatccatctcatccatccatccaatctatccatcccacccaatccatccatccatttatccatcccatccatccatcaatcctgttcatccaaccatctatccattctatccatcccatcatcccatccatccatcctatccatcccatccatccatcctatccatcccatccatccattgcatccatcccatccatccatctgtcctatccatcccacccattcatccatctatcctatccatcccatcaattcatgtatccatcccatccatccatccaatccattcatcccatcatcccatccatccatccaatctatccatcatatccatccatcccatcctatccatccatcctatccatccatcccatccatcctctccatcccatccatccatccttcctatccatcccatccatcccatcatcccatccattcatctatccatgcatccatccatcctatccatcctgtccgttcatccatccatcccatccatcccacccatctatcctatccatccatctatccatcctgtccatcccatccattcatcccatccatcgcatcgattccatctgtccatcccatccatcccatccatccatccatctatcctattggttctgtttctctggagaattttgaccaagacagtgaccttgggcaagttctttaacttctttaagcctgcttcctcatctaaataaagaataataacatgctacccactctctggacaggtttctttgattgcaggcaagacaaatgcacactgctgacttaagcagagaggaaatgtttaggaaggaactggaggaaagcacaacgaaccaggtctcagaaaggtcgaggaccagaccacttggggatcttggaaaaagaaccgatggacacgctcagcagggtctgccaaggactgtccttgtgtcatctggtcatgttcctaccccttggccagaggagaacaagccactttgatgtgagccagtgagagaggcagagtttctattcccagaagaaagaagcaagaatcttatggggattgattaacatcatgtgtgtcaagttcttagcaccatgcctagtacatcataagagctgaaaaatcagccgttgcatattaacaattataaattggaatggctgatagcagatcaataatgtaaactattccaaataaaaagctaatgatgcatacacataaatgagtgtaataaaaattagaaatacgaataagattgttggactgtatcagtgtcaatatcctggttgtgaaattacactagaggcttgcaaaatctttccactggaggaaattgggcaaggtggacagagattttccctgtattatttcttaataaacacatgtgaatctacaatggtctcaacaaaaatttcggttaacaatgtaaagctaatgatggcttcagaatcccaagaagtgttttgtccccattgcggttccttgttttaattccccaagccacaaaaaaataatcagaaaaatgttgtttacatgtaagagtcttgatggattaaaaattatttttaaaggcttgagagaaacttaagatacgataaacgagcagggccaggtcagaatattccctgcctaaaaatgttcattattaggcatatggtaaacttgactacacacacacacgctcacacactccttccctcccaataaacatgtgaacaaaatgtcagcctggtttgtccccagtggtttatcttagagagcactgtttgttctcaaatcttatctataaatgttagtttatttaagtaaaggtgggccccagtgagtgtcagctctggagggatatttgttgggtttattgagtccttgagtccctgtttatatactctgggattatgctgggggaagaaacctcatgcgaggactttgaagggccttgcggtcggtatgccctggcttgcagctttctgtggtagtcccggatgggttggagtcttgctttggtggaaggggaatctagccatgcaccagatttttgcttactccttttctttcccctttctttttcttctagccagtgtttatcagtggcctacttattgtgtatgagtccctgtgctaagtagtgaggatactaagacccagttctccctttaaggaatttgcagcttgacagaggaccatggtgtgtgctccaataatgagcagtcagggaagtgggtctgtatgtcttatgcatgtaacaaagtgctagatgaactcaagaaaagaagaaaagcaaattcagccatgaattctaaatcagaattcctgcaatttaaattacattgcaggcaagggctgcatgttggtgtcagttttctttttgtttttcttttttttgagacggagtctggcagactggagtgcagtggcgtgatctcggctcactgcaagctccgcctcccgggttgacgccattctcctgcctcagcctcccaagtagctgagactacaggcacaggcgcccgccaccacacgcggctaattttttgtatttttactagagacgggtttcacggtgttagccaggatggtcttgatctcctgacctcgtgatcctcccgcctcggcctcccgaagtgctgggattacaggcatgagccatggcgccccgcctggtgttggttttctaaggcactttggctaatttgtaaggcgtctgcttcccctcacagacataaatgcactccccatcaccaccaacccccacctagactgccctctttgtggtctagaggtagtggagagtagagtgtttgcattggattctattggccattagctgtgtggctacattttagtaggggaaattgattacagaataaaaaatatcttccagagttaattagaaagagaggatgagaacattttagcctagaggaggcaagacttaggagaaacataagctgtgtggcctcaggtagagtacttaatttctctgtgcctcagtttcctccaactgtaaagtaaggataataattttactctatagttggttctggaaatgaaataggtaaatacttgcgaaggccagacatggtggctcatgcctgtaatcccagcacttcaggaggccgaacggggcagatcacttgaggtcaggagttcgagaccagcctgaccaacatcatgaaaacccatctctactaaaaatacaaaaattagccaggtacgatggcgcctgtctgtagtcccagctactcgggaggctgaggcaggagaatcacttgaacccaggaggcggaggttacagtgagccaaggtcgcaccactgcacttcagcctgggcgacagagactctgtctcaaaataaataaataaataaataaataaataaataaataaatacatacatacatacatacatacatacatacatacatacctgtgaggctcctaaaacaatacctagctcatggtatgcattcgataattgtcaagagtactgaaatgtgtttgcttgttgatgaacctgtcacatggcagagacatctgtttggccaccaaggacgagaacagaccagtgagaagccaaagcagcacaatcagctctaaaacaaaagtcacgttgcctcgaggggtggcaaggcctgtgtttgggagggcccagccatgacttagtggcagttgtgtgtcctggttgagagtcagaagcctaaggagagacaaaaatggttgtttgttatatgccaggctctgtgctaagtgctctcatatcaggggcgggggccttgcaagttttgctcatttccgagttcatttgttcattccgagtacctagacaaattcctgacatgtgaagtcggcatcaccctggaaagaatacgtgaattatggcctttaattcttcccactacccagtgatgcatagggggtatgactgccacactcaatctgcagatgaggacactgaggcctagagaaggaagtcatgtcacccgagtaatttcagcaatgagctgtgccaccagcaggtgcagggccagagacttgaacccacatctgataccttctccagcaatcttccaacagcactactgccttcacggcccacagacaccattctgattctccagtctttggtttgaagaaattacgaaattcaaagagcatcttactccgtcattggctcgtggagccacaggatcccaggaggcaggctttgtttttatttcttggcgttttagtgagtggcttgacagaggaggaggtgaagttatggccactgtgtgctgactgtattatctgtttgttgccaccatgctgatttgagaggtatttttagagtcatacgttcattattcatggctgacatttttactattaccaaaaactagataacagcgaagaattcctggttggtgacttagtctcaagattgacgccaagccctgttttaaatgattcactcttttctttggctgtggaatgccatcgggtccttatgactcagggccagaaagcacatgagtttctcaggactgagccgggcgctgggattgcccatacgtcacagatggcaggctctctcctaaatatctaacaataattgttgagtggacaagggtttccaagttcctgctactactgtgatacatgagtgaaatttggttagtggctctgttgctgggaagtttgcctcgttgctggttttgttgacattgcacttgagtggaatcgaaactattttgtctaggaaaagggtgagaagagttaatattatacataaacattttatgcagtgatattttcagactctctctaaaggcagcaatgtttaagtaaaggacgcatttgattctccttcaattttctagcaatggccttcatgttttagcaaagttgatttgagatagatacactaaggttgacatggaaaggattttcttagaaaccactctcagatactttacaggataattggaattattttccaacaagaagtaattttatacaattttgaaaccatttgtatttaaataacaagttacatttcttcttttagagaaataaaagtttaagcaacttttgggctgaaactatggggtttgctagaaatagatatagaatcatgttgtctgctaacgggaatagtttgatttctgctcttcgtatttggatgccctttaatactttctcttgcctgattgccctgcccagaacttccaatactatgctgaataggagtggtgagagagggcatccttgtcttgtgctagttttcaaagggaatgcttccagcttttgcccattcattatgttggctgtgggtttgtcatagatggctcttattattttgaggtgtgttccttcaatacctagtttattgaaagtttttaacatgagggggtgttgaattttatcaaaagccttttctgcgtcttttgaaatgatcatgtggtttttgtcctcagttctgtttatgtgatgaatcacatctattgttttgcatatgttgaaccaactttgcatcccagggatgaagcctacttgattgtggtggataagcttttcaatgtgctgctggattctgtttgccagtattttcttgaggatttttgcattgatgttcatcaaggatattggcctgaagttttctttttttgttgtgtctctgccaggttttggtatataccttgtggatggctggatattcgcagtttaccttaggttgtctatggctattttcctgaggataaaactataaaatctggggcattttacaacaggttcaaaataaattggagagtcaagtaattactcataactttacatccacagatcaatatctcagtcttttcatccttctcccagtttctgagaaagagggttatctttttgtccccaaagccatttgttcacctgtatcttaggccctatttattcctgcctttctcctccagaatgcaagggttttgtgtccctcattattttctttgtctttaccatttttcctaggcccttccctgtgtactccttcctttccacctctcaatatgctctgatgtctccaccattttttaaaaggtcaatccaactattttctctgtctttctagctatctgttcatccatccattcccagtcaaattttctcctttatcttgcagccaaaccgtacacacctgtaggctctgctaccctctcacttcttcatccattcctctctcctgtcaccccatcctctccgtgacctttgctttcagacaacccaaagaaagggccactttcttgccaaatccaatgctttcttctcaatctacttcctccttgtcatctgacgctgccgttcatgctccccttgaggagccccctgccctgactcccatgataactttttcctggtgctcccaacctctccaatggcaaatccccttcactgcctttccttcctcctaagtgtgggtggatgccagggtgcctggtccttggccctggggtctggattctttaggcttcctctgggacctatctcccactcccattgattccaaaggcagtgcctctagccccgacctcctgcccactgcccagtccttcaggatggtccccctatcttctaaagccatcctctccaactgggagctcctggtgtcccccatgcctccatagtgggctgcagttcccaattgtgcgcattcctttctcaagctggcaggactctctcctttcaccatctaggtttagtctaagttccatgttcttcagcgtctctgggggatgtgtccttcctcttccttgcctggctgcaggttcacgtcaggtcccacctggattatttgtctcctcaatgacctttcagaaacaccctgccaccagtttgtcttacagagacaagtgccctttccaaagcacagactggagcatgccaatgtgatgctcactctcccttgagggttccccgaggctggcgaggggatgtcctggtgccttcaggtgactccaacatctctgtgtcatgccccagccttgctgtttgcatttgctcctgcttaccatcttccttctccttggtgcaagcccctcccctgatcatgtaccctactccccatcttcaaacatagctggatgttgacatctctatgtcttggcttctcctgttctcttgtgtggaatgccattttctcctttgcttggtgaatgtctactcatttgctaatgtacaactccaatatcatcttctcttaaagcttttgctgttcaatttctagtcccccattcctgtccccactcaagtagcattttccttcctctttcattccatacaactttacatctctctttatcatagcatgtacactttattagatctattaataggtctgcttatactaatggtgcatgagctccctgagatatgacatttagtgtcctctctctgtctccccagcaccacacctgtgaattaatagctgtcagtatatactgattgaattagattttaagtgacactttcctgctgaaggaagaggatacgatcttgttaattggcatctctagtctaaacttcccaccatgtctaccatgatcccccaacagtcagtcagtcagtcagagttttctggaaatgcctaaaccccattctcacatttctcatcctgagccctcccttctctgctgctccagagtctgtctcccctttctcaccatctgtaccttctcctctcttccatgcaggctgtggttgccttcaaataccggcagtgcactgtgtggtcacggacccaagcatgaaccctcggctggttttccccgattgtctgatctctcagagttctgtatgagccagatgaaggcagaggctggccattcgcttcctttgaatacaactcatgttggattcatactttgcccatagttgtacatcagaaacttgatgagttgtttagatatcttagatttcattgccaagtattcaagaccatcaaacccacagttttatggctaaatccatgtgctctaatcacagagttgccaaaacatgagtaggcagtctggaaatgactagaatttgagaaacagaaacctttctcccccagtctgatccagttggtgcaatgtcatcccccggattttgatagagatgcaaatcttttccgaactgatttattctagaattgttaaaagcgtatagaggacagtcactgaggttaagcctcacattccccgttgtcaatgtctgtgccatcccacgacaatcagaagccctcctacctctgaaaaatagccatggtctagttccattgtgaaagacatcagaagctgcttccatttggctggttctctaaaatgtctagatagttgcgtataaacacctacaaagcagggtatgctgtctcattagtattctactcagaaagcagctatctgcaagaataccacttttatccccctaaaagaagtcaataaaaatgtattcaccctgaaagtgaaaaacacatcccataagtgttttaacttgtcctgaatggcctacacacacacccataagtgttttaacttgtcctgaatgacctacacacacacacacacacacacacacacatacactcacacacacagagttgctccccactggtctacacagaagataatgttagtccctgcctcctggggaactgagagaattaagtaagatgcatgagaaggcctgagaacagagtaagagatcaataaaggtttgctctggttaaaattacacactcaaaattgatatccatagttattatcaatttcactgttatgctgcctaaacacccaagagtcagacataagacatctggcaagggctggctgttggcatcagcaacttggggcaggatcctcaggctaagggtcccctgcagccagggcggcctccatgctgcctgctcagcagctgcacgcccaggaacatggtaacactggcctgcttccagcaacacgatgcagccatcacagctgctctgcacgcgctgacagggtgaatgtgtctagagggaaaaagaaaaaggatgaagtcattgctagttccatatgggtggatgggtggccaccccttgggcttgtattcacatgtctcttgtgtcacagccttggctagatcatatccctttcaggggacagttttaatgcggagaatggaagaatctcttatacgagatcataaaagtccacagccctttgtgatgtcaaaaccagacactggaaagagccagcaagagctctgtctcaccatgtgaacccagagctgggaggcagacctgtgtccacttctttctccccagatgtggacatcttgaaatcctgaggagcctgggaccctggccatggctttgtttgttatttgtgtcagaaactcagagagagcacttccgtacctattccaactcaaataaagcacaattggtcttcattaaaagggtttgctcagcctgtgtcaggggcgttgtggaggacccactgtggacgggccaggagacgcccacgctctgtgaagtgctgccttcgcacaatctcatggaagggaagtaaccctcagacaccacctccctactcctgtcttgggccagaattgcttacatgttcttaattttccatcattttgccttgattttgaaagtctttggggaatttcaatggaaaatgagcaagcctgtttagtgtttactgctgaaccataaatacaattctattccctgctggtagaaaagccttaggaataaacgtctgattttacaaaatagtaagttaggagttccttaaaatgtcaagggggttttaaagtatgtttttacaacttgacagagtctggggagaaaacagtcttaaaactaaagtgttaggatctgctgccaactgaaaatcaatcacaaatgaagataaatcacccctgaacatataatatggaacaatgggaaaatattatcagaattgtaaaaatttgatttgcatgcaatttttcagaaacatagctttgcaagcataaattgaaacaagcagagtgattcatataatggggggaaaatcagtctaagattccaaacatgtatgtcaggagatgattatttgatgtgttaaaaaaaaaaaaaaagctctgttttacaaagtgtaccccactagctctttctttgccatggagaattccaaatagcatttataaaatggactaactacaaatgtactaatttataaaatatactgtcaagaccctgtaaagtattgatagcactattaataacaccatttattaagcatctgctgcttatatttatcccatgcacatgtcatttctaatacttacagtgatgtccttgcaaacattcttgtccccgttttatacgtgaggacactgtgcagagcattcacacagcttgctgcaggccacaaagctattaagtggcaaatcagcgttcaggctcagtttgccctggccttaaacacacctgctttgtcatggcctcaacatgtcttataaacagaaaattgaacattggcccaatagaggcataaggcttgttggaaggcagagacctcatccagagagaaattctgccagtttgagcgcaagtcaggatttctgagactgaaggaaacaatttactgaatgacatatttttttagaagtcaattttatttttctggttacgattcttctaattgagatgtgattcacataacataaaattcaccattttaaagggtacagtttcagtgggttctgctatattcacaatgttgtacagctgtcaccactatctaattccagaacatttccatcctctccaaaaacaacccccaaacctgttaaagtcacttcctattctccgtttgcccatctctctgaagcttctggcaaatgctcacctttaggtctctatggattggcctattttagacatctggtgtccgtgcagttatatagtacatgtccccttgtgtcagctcctttcacttagcatgaggttttcaggttcatccatgttgtttgtagcatgtaccagaacttccttgctttttatggctggaacacattccattaagacattatggacatgccccattcatctgttactgaatgacatttcaatgacactctagattttatttcaaggagtttggcctatgccatagcaagctacagaaggaaggtctttcgctgcagggtagatacctgatagtgatacagcaaaaagtggagctcccggggggctctgtgttgttctcagaaggacccggcgtctcctgactgtgaccttccaggccggcgtgccctgctatcggcctgcatctctgacctcagtcagatcactctttcactgagttccagctgctgtttgttcaattctcaagcacgtggtctctttcaccgcaggatcacttgtgttctgttctctgcctggaagtctctgcctccagctccagcctgcctggtagctccttctcagccttcaggtctcagcccagatactcagagcacagctgactgcctgtgtgaaataggcctgcctaaccctcagtctttcctagcattttctttctttccctttaaactgcatctcctcatttatgattctgcacttgtcgtgtgtttactcgttttatgtaggtctcctccactatgcttaatgccattgacagggactgattctgctcctgttgctttgtctccaaggcccagctgaagcacagattagcacaggtgcaacttctgtcacgctcttaggggctgatgccccccagagcatcgcctgtgccacaatgcccagagcttaatgagtgctgtggaatgaatattttaaagggtgtgcctgtcttggttgtatagttccccttcggctggtgaagagtcctcagctatgtacacactgagtgggaggcaaggacagtgctcagccaggtctctgccctcgggctggtcatcacacaatggatacagcacttcactgctgagcactgcgtgcaccaatgggcagtgtagacgcaatgctacagcaagccaggagggagctgagtcgactccgggcagagcaggacagatgtgctgcctgagcttggcacggaaggatggaggaggagggcagggggcacggcagtggacacccagtgattgggtgtaagaccccagtttggaagccacaccaaccagagctcacctaggacctactatatggattccacctgcccatcatggggcaagatgctggccttcctttagaaaggggccaaatttcaattcccaccagaaaatcaagaatacataatcagatagttctgaatgacgtgaatggttctctttcaacctcacaagattttgagagtctaatattaggatttgtgatcaaaaagttgcaaacgtgcactatgtcataattccttagatccgacaataaaggattctgttgtaattctccatcttaagatgatttttttttctcttggaggaaataacgacctaaataaatgtcatgtgcttgaatttctgaaaggaaaatgttaccccatacccatttattttagaaaggtcggatttgttcccctgtcaacaaaagctttgagctgtacattggtctagacacccccaagtactccagaaagttgagggttaaaaatccaagacagattttataaatgtaggactgacgaaattttcaacaaaaaattcactgttatgtcatatcctataggaaaggctttatccacacatgccttcttgatattctatgctatggtttcatccagtagtacattggttcttatagatacatggaaacaatgaggttctttttcctatataatttttatttctgtaggttacatatcccacctgttatctagaaaacattgttcagttatatgtacatgtggtgttacttgaattagttcagaatcaaaagctaatctttaacactggcattattgctggaagtggttctcccttactgcatgctaaaaaacttgttgacatcatttttacttcttaattttggtttatttcagctcccaagatgcctacttagtagtcaatgtgatcaaactcatagaacctgaggcctaactattttagtccctgaaaccttctctcttttatctctttctctatgaataattcatttgtctgcattgcctctgaagcaaatcctctttataaaaaagaaagacagggaaaaatgtagcagagcagaatgagtgcccatgaaatctcaggtttaccctcagaaacaggctaagattttgagggagtttctgtttcctgtgacttcttagctggcagagaactatggatttattttatgagctgttgcctggaagaagtaatgacatcaatatttaagcataatattgtacgtgttcttggtctgggtattacattccatgttcttgtgttaatttctagaatggtctatatgttttttgacatacaacttttaaaaataaattttattttgtatattgaaagtacgcaacatgcagttttgggatgcatatagatagtaaaatggttacacataggtttagaacttgaactctcaggatttaattaattaattaattaaattttgtttgtttgtttgtttgagatggagttttgctcttatctcccaggctgagtacaatggcacaatctcggctcactgcaatctccgcctcctgggttcaagcgattctcctgccccagcctgtcactagctaggataacaggtgtgcatcaccacgcccggctaatttttgtatttttagtagagatggggtttccccatgttggccaggctggtcttgaactcctcacctcaggtgatccacctgccttggcctcacaatgtggtgagattacaggcgtgagccaccctgcccggccaggatttaatttaaaatacaattgtaggaagcgttttgaaggaccttattttacgcaatgtatgtactcctaaaacagaatgaaagttgcacttttacaaataaaaccattttaatgatctttttttaaagaaatgctttggataatattttgcgtagctaacaattgtcgttgctttgttttcttccgtaccatcgcagggccaacactttcacccattcttttatcattcatccctaaattcaacaaacggtgtgtcactcctgagttcagtgcactgtgctgggcactgttgagagcacagaatgacacaccttgatctttatgtcatcctagcttgtcccaagctctttataccccatcactctagggctggagagaggatttgcattagagttctttccagtgggggcctctgaagctgtgcagtgcttaacctgggccatcatatgcaatgggctgattgtcagcgtgtgattgggaacgttttgctacaaacgtatgattttcatttaggctctacctataaccaaatattatttgaagtggcacagccaaaataataaggatcacagcccagtataaagatgaaaaccaagtagaaagaaaaagggaaggaggaggacaaaaatatatgaagatattgtagataagaaatgttttgaaagcagaacttttgctgaagtgtttccagtgaagatatctgggatttgcttcaaaataattcagtgagaggaagggggagcgggtgctgccatagatgaaatgaggtcggccccaagttaatgatagttgaattggggtgatgggtataggggagtcccctctatttttctgagaataatagaatagaatagaatagaataatagaagtcctctctatttccctattatttgaaaattttcaaattaattttaagttgccaggccaacaaacacacaaaagattcccatagagttctaacaggcaaggcaaagaataaaataaggggttacgtatctcatagtccagaaaagggaacacagcagttttaaagaaaatatctgaattagatgtgtcatgagggtatttatttgaagagtgctagaaaacatgttaattaacgtagacgcatctggggaaatggggggaggggttgtgggcgaggctggcccaggcagggaggagagcattatcactgatgttgtttagaatgggcaatgcatggtgataataaaaagcaggaggcttctggtcagctctgtattgttttacattctctgcaggcaatgtcatgctgcctgcccatgcccagggtggatggctcctgtcaccccttcctccaggaggcggccctgccccttggctttgggggtgctgtccccaggggtttctccatcctcagagatctgttggttccttcatgggctccttcctgcgggtgctccttcctgtgatgctccttcctgtaggtgctccttcctgtgagtactccttcctgcaggtgctccttcctgtgagtgctctttcctacaggtgctccttcctatgagtgctccttcctatgggtgttccttcctgtgagtgctccttcctgtgggtgctccttcctgtgagtgctccttcctgtgagtgctcattcagctccccccgcagagccgtgcttgctttcctttccacactctcccatgcagtatccacctctgtggcccaggctgtgatttatctggagttccagatgagtctgacaatttccagaaaccaggctgtccatattcagctgtcctataggcatctgagactcagcaaatcccagcctgagctcgcaggtttgctctcctgctccccacttatcccgggggcttccccatcgcaggccctggcatctccatctgaccagtggccccagccagacactcgagagttgcagggtctgccccagccttcccccagggcaccaggcctgttgatgccacctgggcatagctctggataaccttggataaccttccttttcttgtctccacggacactctctgggctgagctccagcatcccctggcttctttgctcccaagtgagggcattcccttctaactcgcaaatgtgttcttcctccttccgcgctggtggcctgtccttttcaggttggaacccaaagccctggcagagcctcagcgcctgcccaagatgccctctccagcccagctctgtctccctgtctgccaggccctgggctgccctcgcctctgctcccccagccccttggtccaaccaggtcctgcgcagcccatggtacagccaccccctcctccgtgtgttccccttgacccagatccctgtgtaccccacaccctgcttcttgcttacccagccagttgccaggccctgcgatttggcccttttgttcctaacactgccactctcctcgaacacgaccattatttttcttggaaaccaatggtttgtaagcagatttgtaaacaatggagccctttcttcccttgaaatctggagcagaaagtgggaggagagcagaaagggatgaggaggctggagaaggagacacgcatcctggtggcatcttctgagtgtggctgggctggacggtgtgccgctgctgcctttccaacagccccgtgagatagctcgagcccgcctcacagatgcaggcacgctcctgcagcaagttcaagtccctcgaggaaggccagaaggccagtgagggcagagccaggactcacacccaggggcccgacttggagcccagcggtccgcgctccctggttctcatctctcccagagcctcttcctgtcgtcctccagatgtgtcctctcttgctctggagtagccaggtttgtgcttttgttgtgttgctgcctggaggcaatggagcctcctccgacacacccaggcctgaggttcatccggtgactaagcccactctccctcaaggccgtggtcaccggtcagtcaggccaggtccctccctggggggtggcttcctgatgggtcacctgaggcagatgccacagagcagcaggtgcctgggcttccagggtggccccaacctgcggtggcctggcctggactcatcgacctgtgaggagtctggccttgtgtgccacgtggagacgaccctttccacccctctgccagcttccccaactcttccatctcctcccatgtccatccagtcctagtcccaggaggcctgtctcaactccccacctgcagcatcagacctgggagacctgccttggtttctgcctgcagtgtgatgccttgttcatgccaccttacgatttgtaggtctctccacgtgcccctttgaccctgagatggggaactgcttggcacctcagccatcactggtagcagttgggctttccttggttattgcctggtgtgagcgttggcctgatccatcctccctccatttggagttattcctgttttccggatcactggctcagcaccattcttgcctctccaactcctcacacagatggaagcaaatacagatctgcattttcaaggctgagcatccacataggtggacactgtcaggatgcgtgtgtgtttctgtttctcgccaggcaagttctgagtttgatactacactgcacctctctccatatcctcctccatacccaactcattactgggcagagcaggcacatgggaagtaagaaaggagtcgtcttgttgaactagaaacgttgtaactgatctgttttctaagcctgtgtttggatattagatgcagcgttaatctgcatttgtatatttgagatttggcaacaggaatctaactggctttcaaacaaacaaacagtactgaactgctttgtgtctgcttaaagaatacttatgagtttttattaacatatgcagttttaattgtaactattattgcttttcttattacaaatgcagcccatgataattacataaaaattaagcacaagtaagccaagagaaaaaaaaagaagaaatgacgcagaatctcattccattttgatagccttccttcccatcttttttctttgacatgctcgaactcctccctggtggttttctttgtataggagtggtgtgcctgtccatgagcttgggaatttctgtactccgcctgctgtgtattttcagcctcttcattactttcctcgggaggcccggctacagccagcttatgctatctttactgtaaaataggtgcctgtttattttcccatcatacacacgcaaagataacaatgatatattgccggttccttaatctcttctcttttcctttatagaaccttaggggatacaaaattatgcatacaaaggatcataaaataccaagtgcaatgtaaacacagttgccacttacttcatctgttatcatagatcaaagactgcttctacagtaagagaagcgcatttccaattcaggtgggactcaccttaaaatatgcgagtggagggagtccccttattagaaacatttggttcacaagtgtccagtaattgcagagcactcccacgagtgcagaaagctcccacgagatggttgaggcttatggagagccaggctcaatcctcctatctcctgcagaacatgtctgtctccagcctctccctccttcctagctcccatgcagcccacaacatataccagccttaaaactatgcctcctttccccaaccgcccacccaaaccatgtgggccctgcggtgcctctctacttttctctctttctccactcctggtccccgctggttcttatccccatcactgctacttgcacaccctcctcccccagcaggaccttgtctgaggctgacttgatgtggactccactgtatccggcacagtccctcaggttctccttctttaacactctccttacctggttctgtgacgaggctcttctagcatcctctctgtcactcctcaggggtcctctcccacctcttccagactgctccttctccactcaggtctgaaatgctggtgccctccgggttctgcccttggctgttcttctcccgcacaccctgcatcatggggacccatccttgaactcccacctcttcactgatgaagcccaagtgtacatctcccacatacatctgtccccaaagcccagccccaggccccttgaattgactgtggtaggggatgctcttctgcctggacgtcttccacgcacaccccaaatgcaatagaaacatatcgagatgccacatctttccccaccgactctccctactgcccccgtccttccttcctctgcctccatcagtgaccccacctacctactcactcctctttgtccccatcctgtggaatttctgttctaaatatttttaatattccttatcttcctccctagtcctaccactatttgtctagttctaaccctcatcattttcacctgggctccagtcatggctgcctaactatataatatgtcatcttcacaagtcactcgttttgctgcacatgtgccagctgagcatgtatttattggatatctaagagaaaaagactgatgaaaggttgatatctaagatgctggcctgagaagatgaggggacagtgcaggtgtcagttgagaaggaggagaacaaagagagagcagattgcttggctccatgtggggttttctggtggtgctggtgaacgtgtcattttcctattttgctgctctaaaaaaatcactacaaacttcatggcttcaaacaacatcaacttattgtcataccattctggaggtcagaagtccaaaagaatcctagtgtctcactaggatacaaccaaggtgtgggtggggctgtgttccttctggagcctctcaggaaaatcctatttctttgacttttttagcttttagaagctgcctgcataccctggttcttgacctcatcctccgttttcaaagccagcagtgtggcatcttctaatttctctctctgactctgaccctcctgcttgtctcttataaggacctttgtggttacgttgggcccacccagatcatccccttcatctccagctccttcatgtaatcacatcagcaaagtccttttggtaaatgaagtaacagattcacaggttccaggaattagaatgtgtacatctttggggaggccagtattcagcccattacaggaaacaatggggtgagggacactcatgtccagaattcctttcagttatataaagtttgcagtgtctgctggacattcaagtagaaatgtcagaaaggcaattggttatgtctagaattcaggctgagaaagaacagttggggatcaaaagaatctacactgaggctagaccgagtcacctaaagagagaagacatggaagacaagtgggtcaaggaccaatcccgttcatccctttgtatctcctccacagcccaacacactgaggttgggaagaggaggaggcgccaacagagagcagccgccccgaggcaggaggcagttcaggacctaaggcattgccaggaggagagagtggtgggctggccttgtgctaatgtggggagaataagatcaggaaaagaactggtctttccatgtgaccagagcaggtaatgggtgaccttggtgacatccctattagagacaggagtcctgcgccagggcaaggagaggatggaaggtaagaaaagcagcacatcacgaccactcatgggagggagttgctatagatggcgcagtagctagaattagggagggtggcagttttgctttaagggtagatattattaagacattcgtatggtataaaggacccaatagctggtgcttttttttttttcctactaatcttctatttctgttgccttatttcctccctcctaagatttcaaagttcctaagaagacatcgttgttataaaaaccctggaaaaagaaagccaaatgttccaacacagagaagaaaaaaatatagtaaataagtttctcgcaaactttaaataatcttaatgggctgtactattctggcaaacctcggcctctagtagattgaagaaatcatttttaaaactaaagctattaaagtacaagaatatatagatttacagtatatggcaggcaaaagtcaataggggcctcagaagatgcttccatttacaggacaatgcaatgaagaagtccctttaagttgatgtcttacgttcttaataaaatgtttttggttgctaaaattgaacttataaccttctaaagcacaagttttataatttacataggacacaattcccttagatttaatgcatgtcctagcttaacgtaaaggtaaagggaaaaaactctaagggataagactgcaatagttaatagttaatctgtaagttaaaaatgtttgtttttattaaaatatccaaatcaaggacaaggagcacatgatacaatggaaaaaatattggcagcataaatatagtgaatatatcatgagcttttacaaatcaggaagcaaaagacgttcacactgaatttaaaaagggcttaagacaatcacaaagaaagtacaaatgactaatgaatatgtgggaaaacattccaattgatttatacttaaatgaaaattcaaatgaggtcatatttttcatctatcagattggcaaagcttttaaaaactacaattcggtgttgatggagtttcaggagagtgggtgggttcttacacagtttggaagagtggaaatggatacaccctttggtagagcagtttagaaatacatattaagaatattaaacatacagcattcgactcagcagtttcacatcagggatttatcctcaggaaagtatagtgtatcccaaggcatatgcaaaagtatattcattgcagtgtggtcatgataggcattgaagatgttgtattgaacgtcagataaatgccaggagcagtgttagctgcaggaaatataaggtgtgaggggcgggtagaaacagatccagtccctgacccctctacgagtgtaccctgcatctgaggtacagataagtaatttggccataagagcccaatgccatgagtgctttgggggctggaagatcacacagaaaaggaaccttccctgggcttggtaagacaggaaaggagagtaccacaagaaggcttcctggaggaagttgcagctcagccaaaatggaaggatcagtaagaattagccacatataaagggcaggtaggaattggccaagccaaggatgtggactgacaccttaagggccaaacactgctggagaagcacaactcgttgagcacctgcatgtgggatactagagtgcggcagcggccaggtcacaagggccttgagagtcttcaatagaaagcgcagaagcatgacatcagtaagagattaacaatcatgccttcgagcatttactggaatacggggcagagctccatctgaacagcaggcatgaacagagcacgaagggggttcccaaaggaaaagtgaggtttgcaactggaggaaggagaaagagtgagtggaaggtagggaaggaggcgggagagataaagagaataggactggagggagacagtgggggggaagaggaagagagggggagagggagggggagggagagggagagaatgcacatgtatagggaaagaatggaaggaaatagatacattcaatgctaattaatattttctaatgtgttttattggagacttgaaatttattctttataattttctcaagttaatatatataacttttttattctacaaacaattttaaaaggctcttacaattatgcagccattaaaatgaatgaaagtcttcaaatgcatcaaacataatttatcctcagaactgccatgcccagacaaacccagaattgaggctgagaagtcacaggagtcaaacaggattggaatttggttcctacaggctttttctcaaaaggcaaattaagaactttcaggccaattgataatatttcccctcctagattcccctccctccaccggaagcccctgcccacctcctggttcctctccctccaccggaagcccctgcccgcctcctgggaaggggaggctctgagggcatctgcacatgtgatcacttgggtaaagaaatccccaggctccctgcagaagtgtttccattagcgtggtcatctcaggtttttctcttttgttttgttcttttcctggtaaacaggggaaccacaaaaaggtattggattttctttctttccataccaattgattttatattgtctgacaaccctctgtacacactgccagtaagaattttttttaaccttaatctataaaatcttactgcatttaatcactggatttacatttggtttattttatacttgcaaagaaaacagccacttttatttaaagaaaagaggaggcttgaacatatcagaagcttcagctacatgggtgggaggcctggcccatgtctactgcagagcatggtttgggggcagaaggatgaatttaaagtccaccccttcctcctgataatcagaacttaaaagctccaggaggaaggacaaaaatgtgcaacaaagtgtttcatttagtaggaaattgtcttatatttccagagtgtaaaaataccctactagaaacatgatttctaattatctgatttcattctggtatgaaatagacttatgagtaggatgttttctatttaagtatttcaaaaaacatatgtttaaaaatacaactaaaccttcttagggttttataaaaattaaatccttctatctgagcccaacattgtacatttgaagttactttttgaaaatctgtttcacttctgttctttcagcacccagttcttggtcttatatgaaacgatctcttggaatcatgcatttaatggaagttgaatggggaaaaaatatcttaggatgcactttatggatcaaaaactcttacattccaagtgttaagcctttgttaataccaatcgtttgttggcatattggggggtacagttacgactttgtgaactttcagaaaatgttgatttgcttttgtcaatgggacttgattttcattccagaacccaagcattgttaggggtgcaggcttccccatcagatgtcctatctgctttcaagtgaggactggcagtgtctggggccgtccttgaccccttttccctcccctggcttctggaagctcgtctccacccagacataccctgatccaggggaatcatcacaggaaggtccccactgtctcctccctagggactccaggatatgaatggtatgaaaggcatggctctggggggtgctgccagctcaccatctgtcatgactcagctccctcctcactgtcctctccactcccagctctctctctgcctcacaaaaatattgccatttttttctgcctctttgttttcttggcctagtgaggttgtcagaaggattgttcagtggggtccctgggaaggaaaaggaggggaaagagaaaggtgatgggggtactctctccaaagcagtcactttctgctgagacacggtgccttcctgaatgccatcttcttatctgggccagggcttctcaaacgtgagcatgcctgcaaagcactggggataatgctgacatgcagattctgaatcggtgggtctggtgcggactgagaatttatgtttctaacaagctcctgtgtgtcgtacctgctgctggcccatgctgtcatgaaaaaagtgtgctacttgaacatcaatgagatcgtctatgtagggggcttaacaaagggcctggcaaatactaagtgcctcacaatgtgcgtgaagttgatgatgaagagaaaatgatgatggtggcaatagtgaagatgatgatgataacagcggtgatgtggttatgatgacaggtggtgatggcaatgatgatggtgataatagtgatgatggtgacgatgatgatggtaatgatggcgatggtgatgatgtggtaatcatggtaatagtggtgggcatgatggtgatggtggtggtgttagtgataatggtgatatggtgattatgatcatggtgatggtagtgacaatggtgataatgatggtgatggtaatggtggtggtgatgttggtgataatgatagtgatggtggtggtgacagggcaagtattgatgatagtgatggtggtaatgctggtggtagcaggaaacacttatcttcatagaaatgttattgttgaatctgctgtacgataagcagttattttcagagaacaagcatcaaggagaacagagagcaaaacaggaattggttcacttggccagtatatatgttcatatttccacccagaaatttagtgcagtttgcaaaacagccttagtccttcaggccataagctctgagggcataactgagtcagtcatcattgtcctgtgtcctggcacccggtaaagtgcctggcacatagtaatcgctcagtaaatgttggctcctgtcctcaattactgaacatttactatttctgtcctcaattactgaacacttactacaagccaagctctctacatgcatttttctcatttagccttcacaacaaacttgaatgggaggtataattattaaccttaatttgcaggtatgaaaaactaagtcttgcctaaggtccctcagctggccggaggcagagccagaattcaggctcaggcccgtcagagtcgacagcccaatcccagtcctcttgtgatgacatgtgattctggagcagcgccaccattgcatgcatgtcagctgtgcccatgttgccttcacaccccttgccaacgcagggctgcacacgcatcccctccacacagaagctcctcaccaggcaaggcatgtgcccaccagccacgcccatgcccacccggcttctcctcttattcctgctcctgaactcgtgcattctttccacatggttctgattctgtcctggagagatttgctcaggctgacatccagtggctgaaagaacagcactcccaccccactccccccgccccctccccccaccaccacctttccccagggattatgcagagcacccggtttcattgctgggccgtcacctttaacccatctgtaccatgtgcctagagcaccatcctggcttgcacgggtggtctgtgccagacatcttaggtctgcagctgttcccccataagatgcctgtccctgctgccctttgagggtactcaagttgaaccccagatgcccatttcatgtttgataaactttgctccgcactcccatttctgttaaagctgcgaaaggcttcgactttgttccatttggaagggaggctggagttaccacgctctgggctcttacatcctgtcgtaacatcgttgtaagggttgcgttgtgactgcaggaattcccagttgcagttccaggaaggtcagagaggagcaacgttcccagccacagttctgtgagctatggttcagactgaagtcttttgcttattttggtgataaaagctgaacatggtttgtgctgaagttccagctggttatcggagtggctgaccaggtcagtctgctttgtgaaggggaatccaggcccctcttgccctcattttgcagcctgaacacatgctcactttccactcccacgtgtgaagcatgaacacacgcacacctccgcccagttatgcagtcgggctcacggctaaaaaccgattttccaaatgatcgggcaggatcacgcatggatgacggaagctctggctctgcccccacactaattgccgtgcgatcccgtgcaggtttctttacttctctgggcgtgtttcctcaccggcaaaatgggaacacttaacgaggaaactttgcagagagcattcagctttcaaactctgactccccaagtgtgtgacatattttttaataactcctttctcattatttcccttttacctccttgctttgaatcttgagacacaacagaaaacatatacatggtgctttagcaaaggcagccagctcctggccaccctttccaggggtcgggcagaggtgtatgtggtacaaatggtcaggaatgtttttcatccttgaaaaaagccttcttgcccttctgccaccagcacagcctcctctgaaagcagtcgaaacagtgggctcagaggatcccgccctcttcgggggtgccccctttctaaagagttgcttctcactcccaaacctgactcagaggcggcaggagcagtatctgtgactgacaacaaaagccgttcacgtagaggaggagggtggcgggactggcttggctctgatgcttccctgatgtccacttttcccgagtaattgctccctcgtctcctgctgcagcacctgcctgggatcctccatgaaacagctggctggggctgcagagtgcctccagacacgcccctctcctgtgtcccttcctgctcacttgtaggtggcaacagacgtttgacctgacatcgtgacagtggctctttggcagtccagggccaaggtgagccagggaaggcaggaagcagaggggctctggagctggtatgttgtgattcaggtgaagccacgggctaaagactgcagtattatgggaagatgcccttggaacctcccttcgtgacaagggccgtgcaacgcccccaccgccacccaggcacctccccaggcccctccccaagagtccatcccctagagccttctaagagccagaagagccactgtccatccttcctgtgcttgtttctccctctcctgcctgggggacctcttctccagaaaggccctggggaaagagtccagcagctgcaagctcccagctccaggaaggcaagacagggccctggtggaaggagatgcccagagctggaggtgtgtccagctggagctcttctttctcctgggactcccctcaccagcatggccccagcttggagcctgcaggacctgtctaagaatggaggagctgaacatgagggtggctctaaccccggagacagggaaggacaggaggaggggccccaagtcaggccctctctgggctcccctgagggcagtcagctccatatcacaccagagacccacctggaagctgcctttcccgcatctctccccaggccccctccccaggagtccagatgtctggagccccacagccttagctggtgggggtcatgagttccactctgagaggacagtgccgggttcaaatccaagtcccacgttttatgggccgtactatcctggtcagtcatccagcatctcttaggtagcagtttcctcatctataagtctgggcacgaacccccagggatgctgggatggctctagctggtgtagtaccagcattggcctcacataaagcacaggtccaggcatgaaagcactcatgcccaatgcacagctttcccctccctctggcaactggagtgttgctgctgaggctcagtaattgtgaccaaagaccgtggagaattttctttcatgccacagtgcttctgtcctgcatgtgtctgtccctgagcctggcatcggcccacgtcctacaccatgaagtggtgaggaagggccacgcgggctgctcttctcgtactatagaggcatgtgctgggaggtgctgctgaggatgttctcctaacattgcttgcttataattccttctcaattttgagtggtggccttttaaaaattttatatagatgcctattaggctctcagctcaagcattcaagggcattcaaaatagaaggttgttcttcattttattgtgtgtgttatgtatggcaaaggcagacagcagaatcatttccttggagaaatggctcccatccacaaatagtgttcatctccttggtgcttagaacctcagctgatttgagggagcagaagaatgtgacaggcagaagctgaaatatgagaaatacttctttgaaatcaacttcgaatctatgtcagagcattatactttagacttattaaggaagcaaaaacaactagattgaataacacaagtttatttagaattgtgcttattataagcaaaagtcttcccccaaattgtatcctaagtagaaggacttgtgaaaacttacaggctataaattgataggaaaaacgataggcaaaatgaagactatttttcatgtttgaataaagcattttcagtagatttggcagagctgtgctttctaaatctccaaagaacgcaggaacaattagtaagtatgatgaatcagctgacataggcttttttcccttggccctgtgtgaaacaatggaaaattttctattgcaagtctaatttcccaagaaattggactacgcattggataaaggctgagatctctaaggagagtcagaaagcagcttgggatgagagagtatatggagccaggaagactagatgctttttatctactgactctggatctataaaagtgtgaaattgcagattctcagcagcctctgctatcaccaactattcctgaaaattgaaatcagtaccatgatgcctgtcttctttacggttagaaaacaccccggaaacgcaggatgagagccccaaatggaagctttaggcaactctctggatcagcatgctgatcagagccaccaaaggacccccagtgagtctgttgtataccagctggcgtgctcggttctggggccaccaggaagccagggatgccactttgcaagaagagatgatatctggtatgccgagcactcactgggagtcagagactgtgccgggctcttcctccaaccaccccgtgggataagtgagacttgtccctgtttttcagatgagaaaactgactcacagagaggctaacagattttcccaaagatacacagtgaggaatggcaccatgctttatgaacctgccaattcaatttcacgtgagacctcaaaggcgaattgccctgaatgaggtgctttttttttatagaaataaatgttctaacccagcgtcctctctgcaaacaaaagctttatgcagaaacccagaatatgccatcagtaatcctaaaggctagccacctatgagcagtccctgtaactgagtaccttccagagaagaacggtgcccatggttccgtgtaatgcctatgttcacgtgtgacgtgtaggtagcatcatagttcaaagtgggccaaactcagctgctgaggacctcaggagacagccatctggagagggggacttctgatggacagccagtgggtggtctagaacaagatgacttcttgtgacctaacctggcactctggttctgagggtctatgacagtttggtggtttagagggaagcattggcctcaagatgccaccattgggcacgtttaatgagtgacagctttggttactcttttaacatagtagagtttcgtagcacctggttcagccctgtcattctttggggagaatgagaaggatctaatctcctgggagaaggaggattccagctcctttgaatttcagacctgcttcttgccccctgtgacagatttcagcacctctgtctcctcggtgttggatgcgaacaatgaatgagtagcaacttgctggccaaattcctattccttaagtgagagagaagacagatggtgaagagatttttaagcattttaaccttgtccacatgttataatataaaaaaagtagaagctcgctatgttaaaatcacccacaagtcaataacctgagaataataattgttagtttatcttttgtatgcatgttacatccaaatgtcaacagtactttgcctctttttctttttcttctctttctttctttctttcttttttttttttttttttgagacagagtcttgctctgttgcccaggctggagtccagtgacacaatctcagctcactgcaacctccgcctccacctctcaggttcaagtgattctgctgcctcagactgccaagtagctgggattacaggcatgtgccaccacacctgactaatttttgtatttttagtagagacggggtttcaccatattggccaggctggtctcgaactcctgacctcaagtgacctgcctgcctcagcttcccaaagtgctgggattacaagtgtgagccaccgcacccagcctccttctcttctaaatctacctcatacatttcctgtgttgttccatcatcttcaaaactgaagtcttccatgactgagaactgcccatcaagtgccccaatgatgtggagaggctttgtttcgtcccctaacggggtgggatcagaatgtgttctggaagcctctgggcctccatgtggcctgctggagatgcgggtttccctgccccaaggcactgatcccaggaacccacaggtgccccagagaaaggacctgaagttgctaagagggacacagatgctgccagatttgtgtctgggaggagcggctcctaataggtgacaattattcctagactttccaactgctcacattgggtaagactttcaaagccaattattttataagcaaagcattcataactttggaacccatcattagcatcacagagaagggaggacactaaggattgcgatgtctagcaaatgcaaatatgggatgcccattgaaacctgaatttcagattaaaaaatcatttttataagtatgttccaaatggtacacaagacatacttcagcaacaacaacaaaaatcattttagaatgaattgattttggggtgaattttgacttgtatttcctcatttgaaattcaaatttaactaggcatcctgtgttttatccagctctcctctccaggcacaacaaacatgacacagcaccctcattaagggtgagggctaataagccttgagccagttccttgcattccctgacctctgtttcccagctatacacaggactgtagtatcagcacctacttcagaaagtgctgtgtggtgctcggcacctcgtgagtactcaacaaatatttaccgtcactattgttatcgtgaatcaagaatccagctcttcagagagttaactaagccctagtcacgtttcacattgccacgcacagacacacatgtctctgaagagtggaggcttccgaatggctggctggccctgtgggcatgtgtcatccttgaaggagacctctcagcctcctcctacaggggctgagtctctgctgagattcagagacgtcctacttggtacggcgaggagctgctttatgaccactgcaaaatccagaattttccagctcctgtctccccattggttccatctcatttccaattcccagtggccttgtttggacaaatatgattcaggtagattcccattgattgtctagttcaatgaagaaagcccatttcctattttgcctacaaactgacaataattttttttacttgcccagaattgtctgataataagaggaaagtctatccaaaaacaaatgtttctttaaataggtggcattaattaatgtacccgttaaatggatggtttaactaacagcatctaaatttactcattgtctcacagaacctaaactttgtgagaaaagttggcttctagacaattgcaacatatctatgtcaattataaactattatattcaactaaggttgttcaactataaggattttcaccagaaacctctgagttgttaaaatataatagcgtagtaacacttacaattggatttatggacattccttttctctataaaatgtggacattttatagctctgccaatcttaaaagaaaaagaccactgatgtctgtgtcgcacatagctaaagagattaatgtaagtcctgattagcaaaggttccctgctggcccacggggagaaaaggcatgggggcctgaggtgatgtggctgtcacaccaatggttcaatctgagcagagcctcccgaagcaggtcaccaggacctctgttcgaggcgctaaggacgactgcaacaggccctcatctcagaggtcacacgtcgtcaggcatgacatctggggtaataaatcctttggaagttgtagcaatggatttttgtttttgttattttttatccaagagcaaaccccaaatagcctgagccatgagagttgtacaactacagagcaaagcatgggacctgtgaagttctccaggcctggcaccacattctggccctgttagttactgcctgcaatctctgtctcatttgcttcacctgtaaattgagggtaacattaccttgcaggcctgggaggcttcaacgtgatgtctgtaaagcatcaagcacgaggtcaggcgtgatgcagctgtgcagttgatgggagggaggcattggcatcaatatttatcacaaatatctaaatgtctcacttttatcataaccccggacatctctacagatcctaatttggcagctgcccttcttatcctaatgccacatgagaactggggtagaacagtacattctgcctctggagggtttgtttctggggttcacttttgtgtccagacattggatatcctttgaacatggataaagcaaatatgaagccagtgttgtgggatgggtgtgtgaggccctggcaaggcagacccattgcccagcacctttgtgctccccttcccacagtacctgttctcaggccctttcacagagaatgaaggttttgccatctgttctgcctcgggtacctcacagacccaagcacctgcagggaggaagtaccaagatgccctcagtatgtctcttgttggctgagtctgcccagaaaagtcaatgcatagcagtcagttccaagcccagctgttctgttcaccagctgtgtgaccttgaacaagccttggtttccccctctgcaaaatgggcataagaatacctaccttggtgagttgatgtggagttaggtgaacaacatagttagaaggaatacgtgtccatgtttacctgtgatggcccaagttacgcctgttgtcggggcacgtgtattatagtgtcccttctcactccaaatgtatctcagtgtggatgatagttaccaccccctgcccccccacacacacactcaacaactgtattttgcttttgttgctgataatgattaatgattataatcacaatcatgtcactgttattcctagcagctcagtgtgactgaagtacctagtaccaaaaaatccttatttacgttatacttccatgtaattaaaagcttcttgtatttccaattagaaaatagtgtaatcttttttttttttttgagagacagagtcttgctctgttacccaggctggagtgcagtgacgtgatcttggctcactacaacctctacctcccgggttcaagcaattctcctgcctcagcttcccaagtagctgggactacaggcctgtgccaccacgctcagctaattttcatattttttagtagagatgaggtttcgctatatgttggccaggctggtctcgaactcctgactcaggtgatccacctgccttggcctcccaaagtgctgggattacaggcgtgagccaccatgcctggccaaaatattgtaatttacatggagcaaaaatgtgcagtggctcacgcctgtaatcccagcactttgggaggccaaggcaggcagattatctgaggtcaggagttcgagaccagcctgaccaacatggagaaaccctgtctctactaaaaatacaaaattagctgggcatggtggtgcattcctgtaatcccagctactaaggaggctgaggcaggaggatcacttgaaccctggaggcagaagttgtggtgagccaagatcgcgccattgcactccagcctggtcaacaagagcgaaactccgtttcaaaaaaaaaaaaaaagttccaaatgcacaggcttttctgttttcctatgataacttcataaatttgaggtatttatttttcttccttgtagaaagctatgggactgattattttttctcagtaacctttgctctcttctgggtaaactttagttcatcttttcaaagatcacaatgtatttaggacattcattaggtaactaatggttagccttttatagtgattattataaaagtgcattcatcttaatcagttttcttataaaaaatattctcactctcatggttttactaattaaacattgttttattaatgtaccaggatttgtttgctgacatccctgattcttgagctcagagttggaaagatgagcaccaagaaaacaggagaaacagaaaaatattctccttaattgtcatgtgggatttcaggcaaaaccacagtgcatgggaagttatagggaaaaggcctcaagaactgaagattcagggtgtgcatgtggatgagaagccctttgggggtacctcatggatcatctttcaaaatctggaattttctgtttggccccaaggcaatgtcctctggccttctgccggggtcaccctggtggcctggctaagttccaggcagggagggaggccacctccctgacctacgaagccccctgggcttttgatatacattcaacattccaaatggtcaaaaccaaaggcatcattaataaaggatgcgtcggaaggaacatttgaagcagtgtgatgcgtttcacatgacggtcaggagagaagatttatgatcccggaggataagcccttttcctggagttactcagacctaacagtttcttgaggctgaaacaacagatctatcacaagctgtgatttatgtagaaggctctgatggaatacatcttggcaggggcgaaattgagagctttcgagctctgtaacagttgggaaacaaatggccaagcctcagcaggctgacttgtgcctgcctggagtttgctttttaatctttatgggaattctttgaagttcgaagtgggctttgctgttgtaggaaaggctgtagctcatcctcattggctagggcgaagttttatcttcccaatttcattacagtgttttgcacaaagtagtcacttaaatactgctgggatggagtgaggattgggacccttagcaggaacaactaagacatgtctacagagggcacatcagtgtgtgatttagggagtttcactatcttctctgtaatctctcagactgttttaaaagaagcaagctgtgagcaaaagctttttaacaccaaatggcaaagcaaaccctcgaaaggggaaaacaaaaggccacagtcatatgacttggggaaagggaatattgctgcctccctggggtgggttcatggctatgacaataatacagatgtcttcaaggaatgcaagcataaagcctttagccagaaaacaagggcaactcgtgagctctcactagtcaaaatattgatgccatttgcgaataccatgaaccttggctaacacccctgatttttttgtgctgtttacacaagtccttaaagctgttgttgtgccgggggtgacaaatacacaatttactgtcactggtacacattctgcttttgaaaaatggcttatttttcattgcaggcttcagttttgcatttgaactgagtctttgtcttcctcattgagttctgccctccaccttccaatggatgtgcctgctctcttctcctgcacctttccagtttcctcctggcctcagtttacctatcatgtatcactttttatataaaggttttcctaatggcctagtccttggttagcacacttccctcacagattcccacacagaacctaagcccttgattactctattaagggctgtgatttcgggggggccctgagctgaactacaaattcctcaaggggaaggccctgtcctgtggcctcccccagatatttaacatggattgaaaccctgagttatggaagggcagccagagccagggagaggccacaggaaagaggaaggcaccatgggattgtccctgtgccgaggatgtacctccttcccccaccacccctgtcagtagtgctggtggggagtgttatccctgcatgccagaaagggaaaggccatccaggccgtacagccagtaccttcaggagcagagctggtttggacccaggtagaccagaaccacagctgagtgcccctcacagaagtcacagatgtgagcaggaagtgtgggtatggggaggctggcctggacagatgggtgtggtcagacaagctagaggacctccaaagccagccccaggggcttggaccaggtgccatgggaaaatgggtgtcagagaaggctttgggacaggaaaatggcccagcgaggggctgactctcccaggtggatgagagtcaccaaggtgagggtaagggatgaggcgtggaggcctgggaggcgagcagccgagtggcatcctaatccagccagcgggcgtgagaggtgggctgggccgagggtcccattccagaaagctgctattctagagtcaaaaatggtctgtgcatagccacctgtgattaactaggactccaagctgagtcataatgaacatcatagatactcttctcaaaaacgtttgctctcattagtggcccaatttcttcattttctaaaaatttggtgctttttcccatgaaacaaatgcacacagaaactcaatcactgcaaaagggtactgtcaatcagtgaatcttcctctgaccatctactcccacaccctccagaatcttcttttagaggcagccactgcttccagtctctcatatacatttccagagacagcccatgcatatattaacacggctgtgttctgctactgcttataatgatggtgatgagaatagtagcaaatatttatataataggtactatatgtcaggcaccattctaagtgctttataaatgttatctcagaggagcaccttgtagcaaccctacagggtagaaactcttaccctcccccacgttacagatagagaaacagagggaggggagggacttgactaactcacgtggctaatgaagggtcgagccaggatgtgaccacataatccttgtcattctgcatctggtgttctgcgcatacgaccacggccaacaatcattccttagtagctgtaagcttcttccttcttgttttaatgctcacacagaatgccacatgttcaatgaaccctcattcatctaaccagcttcttattgatgcttcttgttgcattatagtggtttccagtgtcctgattttagccatatttttgaagtgatttattgggtcacgttataaaattgtacttttgtaatcagtatgttattttctacagagtggtagcaaaacctttgctaagcctggaattcatctcagtttggaaagctgctttctaatagaaggaacttgctttaatttgcttttgctatgtctatggaaggtcaagtcagcagatggtccctgctttaaggggtaaaccaaacaagagttcgttctagcattttggcagggaaattttcaaggacattgttaaaacacctgcttggtgcttcagtctgaatgcttttggcatcactgggagctttttgaaatatgtattttcacttataacagtaattagttttagtcacatggagatttaaggataagaatattcagttttgtgttgatgggtaatttagcctgtgcatatttttataccccaaaattgttctgcaagcctcatagagaaagtggtttgggtatattcagtgggtggcttagttatttcaacaagttggcaaattctagcatataatttcaaagagttccatttgaaacaaatgtttgatcaattattagcttcttgttttcctgcttgtcttgctaaaacactcaattaaaaattgttcaacagattccttctggcatataatctggggatcatctctcaaatttcttaggctgaaattagataaaacgagtgtgttctatctaaagaacgaaccatatgcacatcccctcatggatgatctaaatttatgttgtcaagtgaaaacgaaaacctatagcattttattgtttataaaattctggtttatgatgcttttgccagaacacaaataaggttactatatttagtagatcttggagctaagccctctcctaaaagaatgggtacattccttctacaggtatttattgagcacttattatctgctcaacactgtgctggatacgacaggaaagaaattgtgaaccaaatgtgagtcttgtagagctcttggaaggcttcgaagggtgggggtgcacttactaaagatccctcccacaattctatgaatgtagtaaaaaccaccaaattatgtgcattcaaaggctgtgttttatggtatgtgaagcatatctcaataatgctgttatttagaaaaaaaaagttactctgactgcatgagagagaatacacaaaaggcaggtggtaggaccaagctcaggagtccagacacattcttaagcatttaatcataacaagggagaaaagcctttgcttactgtgatagcaaaattgaagagaatccatctctccataatcaaagctgctcttttaattaaattcagaagaattcaaatgctcatgcttaagagatacctgtatcagtggctaaagatgataaaattagattagcaaggcaagactgagaaaccaagatagcccagttttcttcatatatgtaggaatagaagggattgacccaaataaaataaaataaaataaaataaagaggaatgaagagctgctgcttaactctctatcaagttttatttgcatttcaagatagttaccaaaagataaaccaatgtttaatcaagataagtacatcttaattttttcacaaagctgaggggcaggatacatttagaatataccttttattccttggttcaagataaaattagtagattttggtcacttggaaaatgacagcatcatgatcattattagaacaaatcattcttgtttccaaattctaattaaccccagctgtgttgattcaatatgggcaccatactcagattgaattttcacatctatagatgaaactttttttggagtttgtggatgagtatgcataaaagaggagaaaatcctcatttggaaagtgggagtctgcccctgaatcttaatcaccagtgcggtacctggcatggcaatgtacagccaggctggtgagctgcgcagcagtcacgcctgggagtgaacaagacccaaattcacaacctttccaggcaatgatgaaaccccaggtaagtccttattccctccccatcacccacattctgcctcccactctggacttcacaactgctccagtctaagcatattatttggacagatttgtttcaagtaacagaaaacccaactcaaaataactgaagcacagagggtgtttatcgactcacgcggtctccctcactctactgaactttcctctgcatagttttcattatccatctggatctgtccacaggaagcagagatgactattggcaggtccagcatcacatggttcaggaggcagagatgactatttgcggattcagcatcacatggtccaggaggcagagataactattggcaggtccaggatcacatggttcaggaagcagagaaggctattagtgggttcagactcacatggttcaagaggtagagatgactactggagggtccaggatcacatgatccagaaggcagagatgactactagcgggtccaggatgacatggtccaggacccagagatggctactggcaggtcgaggatcacgtggtccaggaggcagagatggctactggcaggtccaggatcccatggttcttaagttctttctcctttgagaatatgtgaactctcttttccaatgtccttggcaaccactgaaagaagaacttaagtgaagcacccagctcttgaggaccaattgctgagcccgggagggtggggtatgccgcctgcctagctccatttggcaaaagaacaggggaacaaacacacttcaggcaagttttgatgcagctatttgatatctcaatgatgggttctgtatacctggacagggagtgccctgaagggaagctccaccttcattctttctatggcatcacctccagccacccctgtgcacaccctgtggttgcaaatggcgagagcagctcccataactcacattctaatgccacagccccaaacagaggaagagagaggcagctccttacaccacagtgtaaggtgcctgagtggcaccaagaccccacccttggtggagtcaactccaccaaaggacaaagattgaaaataggaaaaaggcaattactcagaggaaaatatggaggatattggcagaaaacagggaccaaagtgccacctacctggaagccacccataaatgaccctcgtaacctttccatgatttcctagtctgccagacttctcacagccttgctcctgccctatcagcctcccttaatgtccagaaaagccccacttctgggtcaacccagccctctgctctcctgctctgtctcctccagtgcaggtttcactggtggaaggaacctttccctaggcatatggctgaatctcatcctgggctctctggtgaccttcctcgtggcccagtcatcatcgtccatatccatgttcatctcctccaccaccttcttcactggacttcttttattcaacagtcaggaggactcactcacgtcctgtcagccaggaagccatccacgacattctctctgtggccctgcccctaccccacttgttccaccttgctctttccacctagcatctgacatgctgtgtggtcattgcctcctcctggattgggacctgccagggtcgggtgctaggtgactcacacggggctgatgtccagagcagtgaggaagaaattgctgtaggggctgtctctctctcaggctgaggacctggggaggagtagatgcaataacatttataacatttatagaatgaccagcacggcgcctgacacagaggaaagcattggtcaacaggagctgctgctagtccagctttgtcacgtgctatttctggaagaatgaaatggagttcaccacgcagagatgaaaggaaggaccttccccatagagggtcagcccaggaggaagggagcaggcatgaatgtacctggcagttggggaaagatgggagattcagtcatcgagttgagtgttgcatctggaaagtccaaaaaccaagcctgagagttaacgtagtacccggaggatcccgagatgtagttatgtgagtctgcattaataaaatgattaaggagaataagttacacatgaggagtgatcagcagtcgcctgttcccagtgaagttgtgtgctagctaggataatcagctgtatcttgagcttttcatgggtccagacctctaaatctattgagtcgtgttctgctgtcgaacttagtgctcataggcttgggagttacggtaaaggaaaagtaaagaacttcttgttttacaaaatctttttcttggatcctctgtggtttgaaacctgcattcaatataacaatataggccttgttttgtcaccctctttctgaaaactttttatatctaaaaatagctgctgacagaatgcagctaaaatatttggattatttcaatcatcatgtgatcattgccctaaactcaacagagtttgtaaaatctgactcctgtgtttgtcgccagcaaagctgtgacaaatcatcatattatggttattaggacaaattctaataaattctgtgtgacaataggacaccccagtgatttatttttctcaccatcaattatccttataaattctaaagaataatctctgcttaagacagttttgtctttcctgccaagacaagaaaggaacagcactatggatcaggtaattgttaggcatttttatcagtttgaaacaatttacatatctaacagaattttatagaggtgtctaaaaaatttatactcagggatgctacaataataaagttttcagaagcagcattagctttttaccccttttcatcaagatgtgaacagtctacattttctggaagtagccataagaagcaattagaagatgaaaatatccctcctatgttgataggattttggcttgctgccaagattcccaacagtgaattgacagcgttcttctttcctttggaattctgattttcattgctctcttgctggtctcaattttgacagcagaataatgagtaatagaaaagtttcattaattctgaaaagagatgtcttgtcatttgacaattctcagagaacattcttacgataagaagttggcacgtaactgaggaaaaagctcaatttgtataggctaggggatgtgatcaccagaaagatgtgggtggtaacaggaaaaaaaaaaaaaaactttcttttttctcctttctatcccgcagtgtaagagtttctgatggatatgatttaaagaagtgtgcttactccattgggcttcatagcattttcctgcaagtgtcaaatgatcattttaatcaggttaccagatggttctgtttctgctcagtcttcctgtcttgtgagtttccattctcttctacctgaattttggagtgtagattttatcccccaataaacatgaaatagatttcctgatggccagtcagctgccgttgaaaagtaaagataaatcctacttttatttatttttctttacctttacttcattaagaaatctatgtgtggtgtgcttatcctgtgcctcccacatttatttgtgcttgtgtacaattgcatatgaatttttaagagctctgaaagccatctgaccaaccaagaaccagtgtctgatgaagcttgaacaggtttcttaccctcagccctattgactcttgcagaggaggggataattctttgttgctgggggctgcactgggcattgtaggatgtttggcagcatccctgtcgtctgcccacagtctgctcccctgattgtgacaaccaaaagtatctgcagatattgccagtgtcccctggggtggggcacaaaatcaccctacgctccattaagaaccactgatttaaaattaagaaccttttatggtggcttctttaaatctcccagggaattctttcccttatctcagtcagctgatagaagtatttcctttatcagagcagcataaatcccacatcaagaaacagagtttgaaaatggatataatcccctacataaaatctaattctgtgaataataactttctttatttaaaatgtacattatcagaaaaaaattacagaaatcattgaaatatgttgttccttgcaaggctggctgtctactatttttccttttagtgtttttcatattgaaacatgtaagggtttctgtatatttttgtaatcttatcaacaatatatcctggaattgaatctctaattcctgagagatgatgataaagagatgagtgaaacaagaatctggaagaatattggtgttcgagcaaccatttaaataaataacagcagctgtaatcttcttagtatcagtaagtaatctcaaataatataaactttgaaagttttacaaaaatgttagccacaaaagcaattatatcttagtaaccaattgctatatgagtcagtataattggagcagaagcaatcgtattttatattgagcttattagtaacagacaaggtcctgggcagagtcttcaataccaatagcatttcaaaactgagaaaataacattggaattgcacagatgtatcatgagcactctttgagaatgttctcttaaatcattttaatgtgctttcacataaaatatcagaccttaattataatagcttgcgtaatttgcactataacttagctaagattataagaaaagatcccaatgcatgatcatttcttagtgatgaaatcaaaagtgtggcaactctaccaatatgttgggagccattgcattctgccaatgaggcacagtaaacccctttcccttttctgtgtcctgtctccccattccattgtttcccccaagctttctcatctgtgatctcaagatgctcatctgaggtgacttctagtttatgttctttatccttgctttctgtgttagtccgttttcatgctgctaataaagacatacccaagactggacaatttacaaaagaaagaggtttaatagactcagttccacatggctggggaggccacacaatcatggcggacggtgaaaggcacatctcacatggcagcagacgagagaaaagagagcttgtgcagggaaactcccctttataaaaccatcagatcttgtgagacttattcactatcaggagaacagaaagggaaagatctgcccccatgattcaattacctcccactggctcccccccgcccccacaacacatgggaattcagggagctacaactcaagatgacatttgggtggggacacagccaaaccgtatcactttccttcctccctgcctgcagagaactgcaaagccttcaggagaaagaagaccctcctactgcaacatacttagaactcagagcatgattcttgcatgtttctttcttgaaatgttggtacttgccagccatgtaatcttataattgcctggtgtttggtcttagcagatacagataaacatcccgtaatagaaaacgatgtactttttgagtgagatgtgttgtgtttgtcagtgttggatatgaatacacacattctagaggcagcagactgggggtttctctttgctcatgggatattatgattaacttaattccctgcttgagtgccgaggagtcacctctttcactttgacgcttgtgtttgaaaatattttcaaaattgattcatctgtctccctagactaagcaggatagtgtcccacctgagtatactttaatcgtctatcgttttgggatttaggatcttgaagcctctcagagtcagaatttctggtgtgtagggcaagtacttttagaaagggtcagaaagattcatgtccatgtggtagttctatagactagttgctttgccttgcaattgttttcttacaatgtgtttctcctgaataaagaaagcttaacagcaaaacaacatcagagggttttgtggtctagttatttgagttcaggttagacccagctttgctatacacaagataatttgtttaggtgctagaaaaaaaattggacatttttccagacacataaagtctagctaagcaggccagataatagccttcccaccaagatttttagactatgatgtgttattttttatgtggttgagtgtatgtactagtgtgcattattagaatttattcagataccagtgatgttttgtctataaaataaatcatatgaccagactaactcaaatttaaaaagatatcaactgaaaaacaataaaaagaaaaatctccaggatataccgatcagtctttcacagacagtaacatgttatacatcatctggaactaaagagtcatgagtaatggaagggcagagatacaagaagtctgcaaaatttgagataagattctatatcttagcctgggttttgtctttacttttggaaactgcaatgagtgcatatttcagccacctgatgctaagcattcacttgtcctgtggaagcctgtccctttcagaaggatattctatgtgacagacagatcaggtttaagaaatatacagatcctgagctggcatgggctgagttgagcttcaagaaatggtaacaagccagtggatttgggagatttttcattttaggttttacaactcttgctgacattaaattaagacttttgccatcttatataaagtgtattccagtgattcagctattctaacttaagaggagtgaagttggcctaaagtacacagggttggttgtttttttttttttaaacatactttcagaattcttttggttttaagtgacagaaaaccaactcaaactgctaaaagaaaaggtaaagaggttttgtgccacataactgggaagcaaggtacaacttgcttcaggtgtggcctgatccaggggctcagagtgtcatcatggctttggctctctggttgtctcttggtcaggctctcctgctatgctgtatgacaaaagccattggcatccacagatcacacagtattagctatggaactccaggggaaaggtaccatctttcccaagtaccttctggaaagacttggtggtgtccaaatggcctggcttccgtcaggtgcctagccccgagccaatccaccctggccaagaacctggggttactcttggcaaacgtggttctcatgcccattcttgtgactgtgggtgggttccaacctatctaatctacttagaatagcgcagagttgggtagttgtgacaaagactgtgaggcctggaaagcctgtaatatttatgatctggccttttacagaaaaaatgtgctacccatttggtaggtaagataagcccgtaaatagggccaccttcatgaatgtgcagtccgagtggtcacacaaggcctcacagctagaagggcccatggttggtttaatgctctgctatcaccgtctttaaattcttaacaatttatgaacaaaggtgccacattttcatttgcggtctcttgagttactcatagactaaacgttgagggatgagagggatttcccagaggaaaatgccctgaagaaagggcatgaagcgggaatctgctttctgttccatgtgagtaacagaatacctgacccagagtgactcagcaatgaggagcttattgtctcacagacacagtcacccagaggtggcactgctaggtgaggctaatttagcagctgacagcacctgcatcctgggccagcctttctgcaattctctgggctttctcctagtcacaggtgatggaaagctccagttccaagcatcacatcttcacccaacaatgtctaatggaggggaaagggaagccatgtttcctcccttgtattacgcttcttgttagggaagaaaatgtttctagaaagtttcccagcagatccactgactggagctggctgccaggggtggggagatttccatttctagcctctgaagtaggaggtggcttctccatgaggaaccaggggctggagataggagctgggggttcagcagccaaagcattcgccactggcagccttgcattggcagctcctactgtgaataatttgttgcagaattccttcaactcctgggtgaacttctggggacattgaaaagatgacttagtttggttcacacacacacacacacacacacgcgcgcgcgcgcactcactctgatttgcttgatttctccaagaatacatctaccacagagagtgaagtccaccacagagggtgaagtccatcacaggcagccacactcccaacacagaactgggccatagcacagtctctgtgggtcacactctcacattgcccaaagttatgaaacttatttttttaaatagttctgctaagcagtttctgaagaatttgtgggagtaggaaggaaaattttacctcaaaagatatttgatcagatcctgtcagataagcaaagggtatttagggtatgtttgtgaaacatgatttcttatctaaaaattgaacagctcttcagtaaaatggtatttgatgctttgatagagtttatgcccaaatcatttttcttcctgacttctgtatttctgcgtgtttatgcttctatatttattcaaaaagaacgtctgaaatgtgtaaaacataatttttcttggctgaagcacctccattccacacaggaatttcactatacttgctttttataaaataaaacgtctgttgcaatatttaccttaaatatgattttagtaacaactgaaccaagctatttcttctccttcagactataattctttccaataggtgttggtaggaaggcatagacatattaatatgcatgtcaaataaagaatactttctagtttcttataggaaattactactacaatccctatagattaaataaaatgtacactctgattagttattaaggtaagaaactttcagtttagaaataaaggttttttgtggtttttactgaattaaaaacctgaccatcgctgtctccataattcattcttccttccttactccttcgctgatgacaactagttgggcacctgaactttcacaaaagatgtccagttaaaaggagccagtatggaactttgtacacaatttcccctgtattctactatctgcaacaatgtgaaactttttaattttaatttttaatttcaatgtgaaataaaaagtcttgaaaggagacatttttttctttcggtggtttaaagatcgagtctcactttgaccttcggaaaaatgttagagcatttcagagacacgtacgtctgcgaacctgcagtgatttggggactttatacaacttgaagccacttgagttctgtagacactcagagattatgagaattctgttgatatgaagctcttttgcctcttggccccggcaaaattgtacgttgtgagtagtttgtatttttagttgaaggttttgctttggagttcaactgcaattttactttcgttgtcatcttaaatctgtaattttgagagaaagtttttaaaaatatcttcaatccactgcagcaattattctgactgcagagtgacctttatcttcttctggttaaagagagagagagagagagagagaagtagtagagcattttggggtttttcaaaccctcggattacagggtaggacacctcaagatacaaaagcaagattttcagacttcgtaatgtcattggatagtcattaaatttatacaaaattacagttcagtgaacttaaggataggctgaaaaaggtaaaagtggtaatagtcagaaaggctgaaatctggaatcaattaactgaaaacaaattaaccaacaattatggtatgccctgtttatttttctaaagatcttgaaataaagcaaaagttttccacaggtactaatagctagaaacccatgggaataagtttcggagtagaacttccccacatggggtggatctccagccacagtggaagaagaatcgactgagatgtttggaagttttaattgccaaggcattaagacaagagtgaatggaagtggacaaggaggcctggcactggtgctgtacatcctgtgcgttgcagccccagagcctttccactggacgagctctgaccttgcaaaaagaaggcccgcccattctttccctggacgttctttatgtgaacgacaacgttgctgaactagcctgctgcctctctctggggcaggcctctctgctcgaggtagaaggtcttgctcagagccaacacctctctgtttttgtttctgcctggtctttctttctatcaatgggagcacctcggttctctgggttcttaccacttccctttttctttcttcatttcaccgttgtatctccaggtctttgatccactctaagaatggcttctcagctctgttccttgtcaccaccactctctcatctggtgactacatcatgtcttccctgtacattgccagttccccatctcccagggctgctgtaatgaagcaccacaaactgagtggcttcaaacaacagaaactcggtctctcgcagctctggaaggcagaaatcctaaatccaggacttgtgacttctggcagggccacgttccctcccaaggctctgggaggaacccttcctcgcctcttccagcttctggtgcttgcctggggttccctggcgtttttggctcgtggcaacaacactccagtctctgcctcccttgtcacttggccttttcccctgtttctcttctgtatctctgtttcgtctcatggcagcctcctctctgcgtgcctgtgttcaaatttccctctccttgtaaggcccacactactccagtatgacctcaacttagcttggttacgtctgcaaagaacctatttttaaataaagtcaccatcacaggtgccgggaagtaggagttaaacgtatctttttggaaggacggttcaacccacggcacacatcatgttatcctttctcaaatgatccctttttctcactccgttgttcaataaccatttggcctgtggaagaaattctgactactttagcctgatgctcatactcttttccagcctggacaaccccacctttctaggatcacgtcctattacctcccatatgagaaatttatgccctgcccagactggtctactgtttctagaacattccatgtgccatttacaatatctgtgcctttgcttacagcatctctgttgctttgatttaaccaccaccaccaccctgcccccatcacgtacacaaaatctaagtcctaacaactctccaacgtccatctcaaaccacatcctgggctctttctctagagtcttggagactccaacctattgagaatcctctctcctttgaacattctgaaccatttagagcttctcatctggtgctttgttgctgctgatgttgctcttgccataaatagctaacgttcctggagagttcactgggcaccgtaactgagctctttgcacacattatcttattggcaccccacggcagctccacagtgtgggaaccattatatcgtggtgttgtcgattaagatgctgaggctgagggaggcaaatcccttgcccaagatctcaccaagtagtgggagatggagacaggagtcgtgctgatttttctgactccaaaattctggtttttaacctccaaatgctcctgcttttattggtgttggttactgttcaatttcattttcataattagagcataaacttcctgagccttgagaccatacttgaaggcatctgatcgtgtttggggatcaatgtcatggttattaatctgttactccattttcaaagacaaaaaccattgagttaactgaagacctaggaagtctggagtccttcctgctccctcctagtgccctcagaccatccagtccccgtgtgagctgcacttcttgccaaccttaacagcttgcacctgttccacctcattatgtggcccaggtcagaccctgcatggaaataccaattcatagaatattctaattaatagaacagtgaatattaaagagcatctcgtaggtggtaattgtctggtaactagtgtgtaagtcactgtccttccttctgttgatggactatatacataggtcatggtgcgtgtggaagaccccattgagtgcctgtattttgtgccagtgggcttttgtttttgttagtcaatcatttgaccaaaaagcattgctttgatcaggtgcacactgtctatgtttgttaatagaacaaaccttaatgcctttctcaaggtcatgcacaatctcaattagctagagagacagggataggatgacttattttaaaagaatgcatccttattctttcattatcagggaatattactgacatgtacagaaactttatatgtattccatttgtaattctaaatgtttatttttctctgatttagtaaaataactcactgaagtctaaaaatgaaaacctggttttgtttagatgtgtaagacggtccgagacacactctgggaagcagcagcagcttcccacagacagggtcacatgatgcatggggctgatgacacttgatgagcagaggtttatgggagcgtttctgcggtagaatcccaacgcattagctggaggccaggaggggctgcgaacttgacaatatggctgagtcatgggtagtcgttgaaattggctggtggccgttatgcctaaaatgactcatgcactgcaagcagatatgattgttggcatgacttgaaatgaacaccggccatttcagcgggatggtcaggcccgctgatctcgatggtgattaggtggataagttttcagcagggctgggttgcctcatcctcctgtcattgtccaaggctttgaaatcactttttcttacactttactgaatcatctagataattgccccaaacgaaaccttcattcaggtggttagtctaaacttattggggtcttcaacctggtaagcaggtagttttaaagtgagactgaggacttgactacataacttaaattccttattcctagggccccaaaagcacaaagctcaccataaaaagacacagatgccctgaaagaaatttctggaatctacaggccttctgctcaagcctaccttccttactctttgatatcagatagtggtaataaaatgggacatatttctgatatactgggaaaagtcatttcttcccctcttgaaaaatgttctcctcttttctcaccacagctgggagtttctaatatgaataaagtgccaggaatttggcagtaacagtatattcataaatacacatgaaatttggtggggtttaaagaaaaataaaatggaaagagcatattgtcaggtttaagcacagacctaccttgagatgaaaactgagtctgtttgtaatggttgttcatttgctttgcaaggatgcgtgccaggcactcagcctcatccagaggtgcaggcagagatccccggcacccacagctgggtaggagcagcaggggaggtgctggatctctgtcttcaggcccagaaacagaagctgcaggattcacacgagctaaaggctacactggccctggttgcacattttgcgtccacaaaccagatagcaaatatttcactgcaagagccggtgaaatgcagaacatatggcccctcccaatggctccaggagctggagacaaatccagcatgtgggtgatgagacttgccgggcccttctggtctctctcctggttgtgtaaattctgtcgtcttacacttcattagaccagaaaaaggtacagaccttcctgatagcgtgacctcccctctgccatggcagggttgagattcagtctttgaaatgtgtctactgatgccggagagcatgggcgtctgcaacggtgactgacccctctcctgtcctgcatctgcacctcccacagggggctttccagggagggccgtggactcaagggaggagagcaaggcccgtagtggctgtccatcttgactgaacaccagccccaacccatgaggagatacctggtttgcatcttcacgcttcttaggaaacagtgatgttaatttggaacacatgtctttgtgtggaatgaagaactgtaatttcacattgaagccccagtcccttccctctcccattcctgcagttcacggaggtgatgtcaccccatgcgtggtggagacttaggccttccacgtaccacccgctgtctggggctttcaggcctgtgaagcattttcttgcttcttctccactcataacctccctcccttcccaaagatgtccctaccagcatcacttctctctgtcacatggccacctaagtatctttacttcagcctccaaattcattgactatttgttgggcaccagtgatatataaataccaaatgcagccaggcaggctcctgcatgccaaacccaggtctgtttctcaggcttacctctgtgtcctcagatgctcaaccatccggccttccttaaatcagtcatttagttcccagcaatgagaaattccctgacttccattccatctttgtgctgctcctcttcggactcctggcttggttgtgcttcctctgcaaccccaggagggaagcacacgactgtcctctcccacagggtcactcacagtcttgctgtggacctcctgtggtgcacagcctccaggctgcatcaccaaaaccctcaacttgcctcccttccgctcaagcctgggacatgtatcccgagcttgttctatgttctgggcaccaggctcggcctcagggattcgaggacagatcagatgcagctggcttcttccagagttcaccaatggactttgtccaaaagatgccttgtcactccctgtaggggccctagtcagtgccctttccaaccagctcatctttgcttcgtcatctctaagtctgtctttacaaatagctcctcacctagccatgtcttccacaccacccctgcctccacctgggaccgtgtcttctttatctcaggtctggattgcacggcagatttctacttctttctcttcttcccatcttaaagccacagcagctccctcttacccaaaatgatgggtcaaatttgtcagcccggcttccaaggcctctataccctagatcccctgccctatctgaatttttcctttgtcccctagtctcccactgaagccaaacgacattccctgattttccctgactgacatttttgaaaagttaaaatcaaattccccactttttttttattttacaagaagcaacagatgctccttacagaaaattacagaaaggaaaggaggaaatctttaagtattcataatctcacccaccagcaactaactataactaatcaggcagttaccatgaactatgacttttactacacaaatttatttctgagcacgtgtattatgtattgtagttatttgagtggatgagttattttctgtcaaccccagttcttacccactcttgtatcccacctagcatccaacatgactcagcgacatagaaggggcccagtaggtcattgagccaatcagagttgctcagtaaatgtgtcttcaatcaaatgtagacaaataagttatgtcaaagcacaaacttcagaaagttaaagccatggctctcacataaacctatagtgagcatctgtcaaaggtttatgcagctgattgatgagggaaccagcaggatgccaaagcaggctcagggagaacaaggaaggttgagagaagcctgctagctcacatccagaaccggctcatgttcttccaggcaatgaaaccatcactttagcgctttatcttttctgcctgacagatatcacttgccatttctcagtcttctgcaagttaacatctaactttacagaatcaggtccctaatcaatagcaaatggtaaatcaacccaaatagcatcccctagaatgagggtctacaaacgttttctgtgaagggccagttattaaacatctcagactttgcagaccatgcagtctctgttgcagttaccccactctttttgccacaacacaaaagctgccataagcaacacgttaagtagctgcattcctataaaactttataagaaacaggcccctggaggccatccgctaacccctgccccacttagatgcattctaggccagcttgtgagacggtgatcgggttttactttgaaagcagacatagtgagcttttcaccttatttccaagttttaggtaacttaacagtttcatggacccctgtcttttagatatcagttcccaagtttatcatataaattgtatcatataaatagagtagtcacatttaaaaatggtgtctaagaattcaacaatatttaagattgatacataatgcagatttttaaaattgtattttttattgaaaaatttaagaatcatatatatcatatacatgttgttttgaaatatgtatatattgttgaagggcttaactggtctaattaacgtatgttggtttttgtttttgttcttgttttttgggtgggggatggagttttgctcttattgcccaggctggagtgcaatggtgcgatttggctcactgcaacctctgcctcccgggttcaagcgattctcctgtctcaacttcccgagtagctgggattacaagcacacaccaccacacctggctaatttttctatttttagtagagatggggtttcaccatgttggccaagccaatctcgaacccctgatctgaggtgatccacccacctgggcctcccaaggtgctgggattatacacatgagccaccacacctgaccaacatatgtattatttcacacatttttgtgtgtatgtggtgagaacacttaaaatctattcttttagcaattttccagaatgtgatacactggtattaactgtagttaccatattgcacagtagatcttgaacttattcctcctaaccgaaattttgtgtcctttgacccacatctctccacccccaagccctccacccctggtaagctctgcttttaagagttaactttttaagattctacatataaaggagaacaatatttaaggcagatacgtaattagtgcagattttttaatactacaatcatgcgaccttagcttaaagtaacaagactatcaaattctacctcactgccataggcattcaagcgttgcctgccagcagaattttgggggccacatgaggtctgattatcccgttgagacaaagttttgaagatgttcctagcattctgtgttacatacgtatgtcaacagacattatacaagggtacgattacaggcaaatacagaaacattcactgcagacccagaaccagggttgcaactttctaccctgaagctctgaatgagcaattttgcttccacaaaaccacattacccattaggctgaattaatatccttcaattgagtggtcttgggttggtaatttactctgtatttcatttgtgaatttgttttgattggtgtgttatacacatacatttatatttcattttattcttgcatacatttaaatactattgggataaaaatattgtaagtcaacaccaggggtctctgagaattggagactttctctacgtgtgagaaatgctacattaaatcacgttttatttgtcactggctcagccagattacccaagtctgcttcccgataaatggtgaggtgtacacttccctttgattccttgccttttatttgtctcagaaagcttaaaggattcttctctagtctgcacacaggtgggctgacagtgtccagaaagctttttttttttttttttttttttgagcatatgaacttatttgatgtctgtgactgctggcaagggacagaagcaccgaggatatttagttgtttgaaactgagccactccaaagtttgatttaacatttacttacataacacgctgtatttaaagtcttatgtatatttttgattatcttctcctaataagcacctggagcgtttcttgaatggtgctctcttcatttcacaagtgtaacttttccaggaagaacatcactgcttccaacgcatttcaggctgtacaacagcagtctctctgtttccaaatcaacccctcaactttggtttctcatatcaggcctctctcacatgtttattttattttattttattttattttattttattttatttcattttatttcatgagacagagtctcactcggttgcccaggctggagtgcaatgacatgagctcactacaacttctgcctcccgaattcaagagattctcctgcctcagcctaccgagtagctgggactacaggcgcacgccaccacatgcagctaatttttgtatttttagtagaggtgggattttgccatgttggccaggctggtctcgaacccctgacctcatgtgatccactcgcttcagcttcccaaagttctgggattacaggcgtgagccaccgcacctggccctctctcatatgtttaaaaggtgtgataatgccattgttgtttctttatcttttgaaagaaagaatctaccccttctctgggtttcatagcttagttttatttaaagtgcccagtttaaaccacacaataaattaatccagtaagcacatttctctaatgtatttgaccagtggcaggaatcaaatagattttgtccatcattgccatcagattacagtgactttgcaaattaagcaaaaccttaactgtcatactggttacctgagttcattgtcttctggaaatgtttatttagtcttgtctattgcatatggtttgtctttttttttttttttttttttttttttttgagatggagtctcgctctgtcgcctaggctggagttcagtggcacaatctcggctcactgcaacctctgccttctgggttcaagtgattctcttgcctcagcctcctgaatagccaagaccacaggcacaggccatcacacccggctaattttttatatttctagtagagacggggtttcaccatgttagccaggatggtcttgatctcctgaccttgtgatccacccaccttggtcttccaaagtgctgggattacaggcatgagccactgcgcccagaggtctgtccttttcaaaaagattaaaaaattaaaaatccattacaatgcccctttggcaaaggctggcgactctctcccattggagtaagctgaatgtttctgcctcttgcagaattacatggtagaaacccgcagctctagaccagtcaaggccatttgaggaggaccagatagtcacatgctgaaatgggtctttggcatatctttcaaaatttcactggcctccatgctttaatttgatcttttcaagtattctttaaccacttcagaagttttgtaatcaactggtagtgaaggacattttcaaaatattcccgagggggatcccatctactgaagtacaaacagagatttagaattgtaagttaagtatgtgcgatggatgaatatagacatctttgtggttgattcccatgtcacatttctcttggaatcctgttattcttctttctgtgtaataatgtggtcattggctgacacaaggagtaactaaagatatattttatgaacaaatctgtgtttattactcccattgaacataagcctttggaaggtaaagctgatgtccctgtgtccctttgcactcaggacaggggtgcctccagcagacagggtgctcaatgtatgtttgttgttagtaataactataacttattgggtgatggccattatttactatgtaccaggcactattctacacattttatgtatgtatattaactcatgcagttctcataaggaccacaaaaagattgtcctcatttttaaaatgaaaaaagcagtcacagagaagttaagcaactttcccaaaggcacatagctagtgatatggtttggatctgtgtccccacccaaatcttatgtcaaattgtaatccccaacttggaggtggagactagtgggaggtgattggatggggccgggggcagactttccccttggtgctgttcttgtgatagtgaataagtgctcaccagatcaggtttaaaagtgtgtagccctccccattctctctcttcctcatccagccatgtaagacgtgcctgcttccccctcaccttctgccagggttgtaagttttctgaggcctcccagccatgcttcctgtacagcctgtagaaccatgagccaattaaacctattttctttataaattatccagtctcaggcatttctttatagcagtgtgagagtggactaatagagctagttattagtagagccaagatttaaattcgagcttgctggctcccgagttctactttctcaaaccctatgttaagctattgtccacagcattcaacattgttgaattatctttgtcaactaaccttggaagtcttaaattttgtcctaatcctgtcccctattccccccaccttagtcttctccatcactcaaaccagaacattaggaatcctctctttccttacccaccccctctgatccatctccttctatacacatcaatcctgaatccatccagctcctccttcccagtgaccctgcgctgaaccagtccaaaccatcatcacctttcatctggactcatgcggtcacctgctgacttcctccaggcttcccctcctgctgctcacccccatctatcctccactcagcagctggaaggattaacgcataaactaaacaatggtaatcctggtttataaccccataaaggctcctcatagactgggcccggtgactcaatcccagcactttgagaggctgaggcaggcagatcacttgagggcaggagttcaataccagcctgactaacatggcaaaactccatctctactaaaaatacaaaaattagccgggcgtggtggcaggcgcctgtaatcccagctactcagaaggctgaggcatgagaatcacttggacccaggaggcggaggttgcagtgagcagagattgtgctactgcactccagcctgggtgacagagcaagactctgtctgaaaaaaaaaaaaaaaaaaaaaaaaaaaaaggacaaaactcctcatggcaactcaaacaaaacccaaactctcccagactcttcaccctggcatttgcctggcctgtcaacctctccagcattatcttgtgcctcccacctgctgcgtgctctaaccccactatcttatttctattcctgggctgctctgctctttcctgcctctgccctgtgtgggaacattcctccccaaacctgtccacaaggccagcaccttccagctttgctctcagccaccatagcatcacttcaaagaggtctgttcctcaccaccttctcattttcagtctcccattagtgtgtttgtcgctttcatagacaaaacagcacaggctgtaatgtacactcttcacgttttgtctgcttcccaccagactttgaacctcccaaagggcagaagcatacacatgaattttggtgaaattcccagcctccagcacagctggctggaggcttttgctaaatgaatgaattggggccgggtgtggtgtctcatgcctgtaatcccaccactttgggaagcagaggcaggtggactacttgaggtcaggagtttgagaccagcctggccaacatggtgaaacccatctctactaagaatacaaaagttagccaggtgtggtggtgcaagagtagttgagtaatcccaactactcaggagccagaggcgggagaattgcttgaacccagaagtggaggttgcagtgagctgagatcatgccactgcactccaggctgggtaacagagtgagactccgtctaaaaaaaaaagaaaaaaaaaaagagtgaattgggcagatgtagaagcaggcacgctacacgctagtcccctctgccccaacctgagaaggctggatagacagatgggatgtctcaacaggtggggaagcctggccccggtccttagtgactgcctgccatcgaggctgcactcagcacaaccatttggaagagtgagctcaggatcccattcacaatgctgggtcttcagtgaccatcttctgaaaagagacaaacgtctacaggattaagaactgagtgatgatgtgcacctgagatacagagtgaaatgagctgctgcacacacggcctagggagtccgagggttggggattaccgcaatgccgtcttcaggaaggttctgcaggaggctcagccttgcagagcagaggctggacatatgaaagatcaagcagagagaagggagccactgaggcgagggacagcttgtggggcttaaagcatgggctccacagcaagcctgcctgcaggtagattccggtgcccctgagtgccagctctgtagcccaggacagggagcccaatctgtcctcactttgtcatctgtaaagtgggaatcacaacagtatctacccatagcttattttgaggcataaacatggcaatgcatgtttagcacatgcctggcacgtagtcagcactcaaaaaacagtcctaagagttggtggtatccgtagagtagagcagccgtacttgtggctgctgttgtcctgatgataaatgaggatagaacaaaggacaaggaagaagaggagttggaagctgactctggcatttgaagcccttcacattctggccccaactggtccttttgcctcagtccttcctacactccccaccgtataccccattcttcatccccactgaacttctccccattcctggaatgttccatgctctttcctgctttggtttctttccacgtgctgttcccactgtctaaacaccttgctcggttttctatgcctggtgagcccttgtccttcatcatgatccttctctatgcaacttggtctgtgggaccttccttcattccttaagtccagggctccttcttcagtgctcctaaagctctcattgtatctgcatttgtctccctactctaggatgtgggcttcttgagaaaagggacgtttgtgcaacagggctcacactgcacctgatgcttagaacatgttcatggatggatggatggtgaatggatagatggatggtgaatagatggatgatgaatggatgggtggataataaatagatgatgcatggatgagtgatggacagatagatgaatgaaaggatgaaggatgggcgacaaatagatgaatggattatggatggatgattgatggatggatgataaatggcttgatgggggatggatggatgaaaggatgatggatagatggatggataaatggataaataatgaatgattaattgtaatagttaaaatgcaattgaaaaaaagattcccaaaggtaagatgaggggattaaagggcgtacaaagatatgtcatgggatcaaataaaagaaaaatgattccactcacagaagatgcctgtgactgattaagttccctgaaattaggaaataagaatgctatctaacactgagctgtaagttcacacacagacaaggcctttgtttgttttcttccttgtgcccaccaaatgcatgaggcataataggtttaaagtaaccctgaaggaaaaaaacagatggaccattctgcaggtgccccactcagtgaggttggaaaagaaggaatttcgatgcacgttttatgtgtgggcaacagaatgagaccacactgagtcttgaaggctttttcaacagtgatgtggccaaagaattagagcacacccagtggtacacatggagtctagcaaaggtccacagaaactcaggggctttgctttgagttgtaaaagcttagattccactttgaggctttggactctgctctcaacatatttttgcccttatgagccagacttgtcagaggaaagaagctgacatgggaacctgagttgggaggaagaggacagcaaacagtgagaacaagctgcagtgtccagaagttctttgtcacatagggtggactgggctgtcattgccccttcacagcctggctttccagtggcctctcctgggaacctgcacttcctctttgcagatcccttaggtgtctgattagccagcactctgacctaaagcagacatgtgcttctttcttggatgctcatctcacactcccagtcatctgcaggaatgtcaggctcaggggacagcgtcatctggtactcagagtagcatgtgatgccatgtgcacatttaccctggacctagtggaacataaggaggtcttcaaaactcctttcattttagctcatcaagtaattccagcaagatattaaaacctgtgcactgtggccagcgtgctgtgccttgcatattcccacctggtgccctctctgtgcccaccctgcagctccgcctcttcctttagacagcctctgtgaagtcactttgaagtagcctagggttggattgccttaacaccaccctctaggggcaggagcaatgtagccccaggggtggagtttccagccagggcatcccacaacaccgacctgggctcccacctcatgatgactccagacctgagccttctgcctacagacatcaaatacagccacttgctgggcaccccggcgcctgtgtgtcagcattttgatttccttggctttaagaagaagctagaaggaaggttgaaatcatttactgaaatgcccccagcagcaaaaagccgcttggtattttatttgcaacattaaatttgttttttttttatttcatttccttcacagttggggagaacttaaaaaacagaggtaataagaacaataaaaatcatgcagagacgatcagagtggacaagtcctcagaggatgcctgtcctgtattgtatctgtattttaagaagaagtatgaaagttttactgatgtagtaattcccacgatacagagatttttatatataaacagcacctaaacgttggaatgaaagaagaaattagttactctgtcattcatgtaattagcttaaaactggggcagagaggagctgcaagacagtgaaagacacaggggaagaccatgcaatttggaatccaaagttggagattgatctagttagtgactgtgtgtcctcaggaaagcatatttgctcatgatgactcagattccccatctataaaacaaagatggtagtgcctgcttcccagagctgcttgagagatcaaagaaaaataatatggatgaaagtgttgttcgctgtccatcctgcagaaatgtcaatttcacaagaaacttaaaagtcatcttctgtccatccgcgatgcattctgcttcttccagccccggccacctctgtcattggtcttctctgctcttgatgacctgcctcttgccccctccctaaggctccagccccttcctgttgtctgctggtccagacactgtgcgattcctgcccccctctatggcccactgcccccacactcagccaaatgtcacacagaatggccttttccatcttcccattcatccccatgtccctagaactacaaaattgagtgcagaaataaatgacctttgttcaagtgaatacagtgtgttgggctgaacttttccctgggactcagatgctgctcccttgtttgaggagttggagtgatagctccaagggaggccaaagctcttctattcagattactgcccagccaggcagacccagacagaaattttccttcaaccaagcaccacattgctccacattgctgttctccggcaatagactctcactttttcttccttattggctaaatggtcctctcaaaggtcacagttgctaagtatattgatcgatagggtttttctgccccgcggggattacaacatggtaagcctagtgactgaacactgcacactgtccagttagaaggtagcagtcaaggaagacacagagatgggttttctgaagcatccccaccggctcctgctaacgggcacccttgccacaacccttggggacacaggacaggcacagtcccctctcttagtgctttagctctcattggcctgagtggttgtcattccggatagaggtcagtgacttctagcaacagcacaagtctagacagaacatttaaacaaaatatcatcaaactttggaattacaagtgacgtttttggtcatctagttcatttccctggctaatcttcagatatttttgaaaacattccctcaggagttgattcataactggggccaggagaatgtgctctcgtttgagatggtctgtttcctgagacagtcatgatgatggtaaaattattgcttgcattgggctgcccaggccggtgtagctccagccactgtgcattggtctgctctttctcactcaaatcatctctgtttctctaattgctccccatgggtggtgtgtcttactctcttgccatcctagatgttgtcccccaaatgcactgttgcttgtcaaactccatcttttgggaagcttttttgctatagtttccacttgtaatctcacccattaagcatataatagaccacaattggccccattatgtactttctaaaaattactttccctctatccaaaaaaaaaaacagatgttaacagaaatcaagatattccagcaacccttgactcttgcaaagtgggagcattgtgttcagaaaaggttgctgtcatttgcccctctaagatgatcagagtcatttcactaaggctatagggcatagccctgtgtggcaaagagaaattccacaaaagaaagctgaagagtaagttcagaccctttttattttacaccattgttaaaaaatgaaaatatgtttgaaagatgcaatgcaatagcaacgtctttctttcttcatggacctcaaaaggaaagaattctgtgacttagatgaagcaacaaccccacagcatttgttacccacagaggtaagccaggactcagctttgtgctacaaaatccagaccatgtgcaagacggtcctgaaaggatatatggccccgaaagagagaaaagatgaaactccaacccgtgctttcattagatgggtaggtttaatccaataagagatcacggtcagggtgccatgttggcttggtctctaaatccatcaggatgtgccctttccacctcagttttccccacacaggatggtgatggtcactaaagttttgattccagtcctcatggagtcccgaagaaataaggcagggctcgtgacgtcctcgtacccttgttgtacacttgcagagggaaaggcaggatttgaactctggtcctctcaggtggatcttgtgtatgttctgctgctgtgtgctggggttcatttttcctgcaacatggttgtcaacagaccaagcacaaacacaagagacagaactgaagcgtggcagccgtcggaaaggtcatcaggttgtgaaggtgcccaaatactaaattttgacaaaaccatgaaaaattgaactttagcactgaatcccttaattctagtctagaaaatgccatctgcaatttgcaaaatacggcacagcttttgccacttcatcataagaattggagtacttaagtctaaataaattatatttggaagactaatgtactaatgaaggtttaagcatgaaatccaagcaggattaacaagctttgcgccatattaaaaatttgaggtcacttttatgtaacactcaagagctgggggctttctgctgagcattcttttattacttatgaaaaataataaaacctatgagaggttaatttgctcatattaatgttatctaaaagttgctgatattacaaaaccgaatgtaacggcaccgaaatatcactttgcatttcacttttatctggtatttcaattctgatatgctctggattgacactgggaagacccaaggtactgggggagaagaaggtgctgagtgcttcttggaaggggctgaaatatttctgctttcaatgggacacagtcttggttctggtacacatttggtaggactaggtccagattccttggctcagagttatgacgttattagatatttcacacttttttgaagaaaatcaagtaaaatataaggatcataataatgtaagaaaagattattagatatttcattgtgttacataaacatttattaagtgtggacttagtttttagtgttcgtcacagaattcagtaatagattcttctgcagttacacggaaatcgccattgacatctccgtgtttggatttcaaaaccttctataatttactcacttttccatccattcatgacatatcagtgggtgcccattttgtggctctaggagaaaagatgtcacaggctcctgtggttgtactttggggaaagatgaagccatgactctttattactgtcatactcaaagcacttaggataatgtgtgggaacagaggagacatccaaaaaacatttatatgaattaagaattttattttagaagtgcggacgacatgttgacttatcagctatgccttcaaaaagcctgcacttcaccacttgccccagatggctgtttcacctgttctgcttttccaggaaggtgtgtaaatggcatggcaggaggtgaagctcacctgtctgcagtagccatcctgggactggggcgaggtgttttacaatgtgacgccctgctcgcacacgggtggtgttctagtgcagtggtccccaacccttctagcaccagggaccagttttgtggaagacactttttccatggaatggggttgagggggtggtttggggatgattcaagcttattacatttattatgcactttatttctattattattacgttgtaatatataatgaaataattatacaactcataatatgtagaatcagcgggagccctgagcttgttttcctgtaactagacggtcccatctgggggtgatgggaagcagtgacagatcaccaggccttaggttctcgtaaggaacatgcaacctagatccctcgcatgcacagttcacattagggttcaaactcttgtgagaatctagtgcttcttctgatctgacaggagttggagctctggcagtaatgtaagcaatgaggagtggctgtaaatacagatgaagcttcactcacctcctgctgtgtggcccagttcctaacaggccacggacaggtatcggtctgtggcccgggggtttgggacccctgttctagtggattgcacgcttgcgtgccaggaggcgggaaaattaactcttcttatgtttatgtaaatccccatagtcccgagaattagactgggggtcatccaagtagaagagacgctagggacgcaaaaccttctgctacactcctcaagcccacctccactgacctcacggatgtttatttctgccccaccatgatcaatatttgctttgaatccccgcagcaacttacatgaaatctgggctcttcacatcctggcacaggctctctctctctctcatgtgcctgataagtcctatacctccagtgacattttaaacttccccaaggcagaatctgctattttcatgcttttacgtcttttgtctacaaaggatactttgaaaagatcaagaatttaataaactttcattaaataagtgaacacatccagaagaaaaatttatagtgagtgttttttttgtttgtttgttttgctggacaaatcttggtccctggttaaggaaattccatttgtacgagactataaatgtgtttttagtcccttaatgttttttattagatgtctttatgtcttagatactgcaaataagtatgctgtgctgtgatagatatctggccctcaacatcagacttctgattgtaccacatactccctctacatgttcatgtttttggtatataattctgacaaggcatctcaaaggaaactcaccagccaccaggcagaggggcacctggcagcagggccgctgttacctggcgtgccatacgtcagtggttacttcctgggatgcactgcgttgccggtgctgtgtgagggtgaacttccatcttttatttgtttccctaatcatgtgctttacgtgtcttctgaaggatgtcctctgctaccatctgagaaacaaaggcattgtgtaggcagcagactaatggatgctgaccgggccatgcaattaaagaccccagaaatcatgtaatctcccggtggatctcagctccctccacaccaggaggggctcctgcggctattggtcggtccagaaggactgctgccaaaggcctgatcttctgactgtcaacagctggcttgcttgcagaagaagtggtgtaatgccagtgaaggcaaacacaaagctgcaattttaaccaactgagaaatggaggtggaatcccacagtatgcctctcttctgcctctctccttcctctgaaggttgttctttcattcgcttgtttcatttgtctttcactgcccaagacggcacctgacacttagcaggctcgtaattaatgtttcttgagtggctgggtggctgaatgtgtggatggctgggtgggtggacagatatgtacacagatactatacttatgaaatagtaataatcacaaattgagtaggacatggtatcatgtaatatatatcagtataactataaaactatcaatataattattgtaattattttgaggcattcataaagctatgatcaaaatccctgtgtaggcttggcgtgatggctcatgcctataatcccagcactttggaaaaccgagggtgttggatcacttgaggtcaggagttggaggtcagcctcgccaacatggtgaaaccccatctctactaaaaatacaaaaattagctgagcatggtggtatgtgcctgtagtcctagctactcaggaggctgaggcaagagaattgcttgaacccaggaggcggaggttgcagtgagccaagatcatgccactgcactccagcctgggcaacagagggagactgtgtctcaaaaaaaaaaaaaaaaatccctatgtagcacaagctgcttttatatctgctagattctttattagttatttatgttaatcagctagtataacattgtccatgaaatagcattgactgttgaaattatcaggctaaaagcaatatctgaactttcctccttcagacttgtacttcttcctcctctagaatgtgtgtggctgattgttaaataatgaaagtgtattagtataattgcagtaacgatggccctctctccagaagcacagtgccacggtgggaagtgaaaatcaacaaaataacaaatttggtgttcattaacttcctttctaagaagcttctttgtacgtgataaggttttgtaattgaagagggaaaaggatcgataacttccaatgcaaaagcaaattaaaacttcataaatatttatctgaggaaaatagggcacttctgctgcttggttttaaatccttgtgaaacaggtgctagacagacagacactggggcttatcttttttttagaaaaaataaaagatgcatacttttggaattatcaagcttaccttttacagtcaggtttctcgtactgtcttcgtttaacatttcaatgctttttcatgagcatagcaataaacgttacatgccacccacgtacagagatcacatgaacacacgtgagtaccgaatcaacctcatggctcctgaggtcggttgctggggggcccctccagaatcacagagcctggctctcgagctcttgaatgcagaatactcggaaaggtcttccttgctgttgctcagaccttgacctctgcagtcagaaagctcggattcaaaccttaatccggctggttactaagcggatgaccttccggacattcttgatctgcgttcatcttcatgtataaatttggatattaatagtacctggggttgttggaagattaaaaactccttaatacagtgcctgggacatggccatcatcccaaataattactgttatttctgatgatattgtctgtattgtatcaatattatatggatgggtattgtatggaccttgtagcctaaataatagttttctttgaagaatacgttgggttttttgcattggtttattgtaaaaattgggaaagaccttctttgaaggcaaacaagaagacttaggagaagcattggtgtgcggtcaccacatccaggaagccgtccttagctctcactcccgtctctattctgcctgcctagtgacagccgactacttcctctttcaaccttgcatgccatgcatgaactgctaccccagcatcaataactatttatttatactttcttacctcttgatcacccacacgagaccagaaggaccatggagtatgtgaaccatggtctaacccatgttggtttccccagtacccagcctggcatttatcggcactcagtgtttattgaattaattaacaaattaatccaagatcacctacataatgttgaacatagtcaaaagacaggcaggtagtacctgtggctgagtaacattttttagcatccaaaaggtatgacccatttttcttcacaagggcaaaacagttctaaattgcatgaactttctctctagaattgactttgttttatcagagtggccattaccactcttggtggaagaaatagaaatttggttctgaccaatcagaccagctcattttgagcccaatgtgtaaagaaagtggtgccgattgattgtatcctgtgggatgacttgattgcaaacacaagaagccagaattgaaacagactgaaagcacagttacctgcagcggctctaatgctaactacagaggtgccagagcaaacagcagagggggaagaggagcagctaacccgcttcacttaaccaatatttacgaaaactttgggcacagctgatgggagattcccacacactccgcttttgttcatgaaataaactacagtcacgttgatagggactgcttgagtgcttgagtggatattttctttttcttcttttttttttctttctttttttaagataagagtctcactgtgttgcccaagctggagtgcagtggcacaatcttggctcaccgcagcctccgcctcctgggttcaagcaattctcctgcctcagcctctcgagtagctggggttataggcatgcaccaccacacctggctaatttttgtatttttaatagagatggggtttcaccacgttggccaggctggtcttgaactcctgacctcaggtgaaccacccacctcggcctcctaaagtgctgggattacaggcgtgagccactgcgcccggcctgcttgagtggattttgacagctgtgtgttatgttttcccattcacatgcaatggagacatttgctcgtttacttttctacaaagtacctccaagagcattttgtgaagagttttggtttcatctttttgtctcctttgattttttttctctctgaagcctgtttctgttgtgttctagtactttcaatctcattaaagaaagagtaagaaataaacaattatttttacaagcatacaaagaaatatattgctcttttatatgaaagagagtttgacaatttgtgtaatgtttcaattgctacttataaaactatctgaaagatgtttatccaaaaaaaaaaaaaaaaaaaaaaaagatgtcctccaatgaggactaaggtaagccaaaaaggaaatataagtatttctcgattttcctacctgttttattaatttgagtttaaggtgcaaaattctctttataaaaaatgtgacttgaagaacacatgtgtcacaaaccaaattcctctggtaagaagctttgtaactacaatatggggatttttttttttgactgtttgagaccatgtttattctctacataagagaatagttcccatttatatagaagggagtttttaaatgactgtgatgattgactttgtctaatgtagatgctaagatattgacacagccattttcacatcaacaatcacataaataaaacacaaaactttcccggttactgttttaaaaaattccaaaattgagttagagactaacattttattcagaattgaggttaataaactaagttaaatgagcgcatggagattcttccctaatgaagctgaacaaagatgccagaggcttgagtgacacgttgctcgctccagctacctccattcaaatgcaaagccttcctttctttttggccaaaagcctgatagtgaagaaggacttcagccgcagttaattcccattctttgttgcaatgtaagaaagcaggggcaactcttgattgtattatttaactttatcttgaattcactgcattggattcatttttttgttgttgttcatttgccgatttgtatccgcattcttccctgggctttcttcccacattcttaaaccaaaatgttgtttacttttgtcttttaaataaccaaaaccaagcaaaacaaaatctattcctatcatcgtcacaaatcttcagtaggaaaccttgaaactgattctggagtcagactgatttaggtcccagtctggtatctctaatttattagctgtgtggtcttaagctatgtaatctctttgtgtcttagttgtctgttccacaaaatggtcagattcatgagaccttctaagtctttttaagtactaaatgagagagtgcttattaaatattagcatgacacataggggttccataaacggtggccgtcatcattattctgtaattatcagtgtttcacatctcactggcatcaaatctcctgtttctcatctcattgctttttttttttccatttacaatctaatgttatcttctattttcctcctggtaaagtaattgtccatttttcttagtcttttcttgacaacctggcctctcctttcataaaaggctctaataagcatttcctatagcacacctgcagccatgtacagccataaatgaataataccaagtgtattatgaccaggaaaccgtgtgtgtgtgcgtgtgtgtgtgtgtgcacatgtgcacacacacatacactttggcacactcctgcttaaaaaggtgacccaatgacagattcactatggctgtatacaaacagggcagctctttttcaaatgaagggagcccttttctgaaagttcaggagtcccagttgccaatttctctccatgctttttctctctctcaggcttcggcagtaaacccttagagggaagctcctgcagtccccagacatcacgtggaagagtcacctgacatttaaccacacacgtctccacgctttgggagacaatgagagattttgttcagagccgttaggaattaagtttttatttgaatttattttttaaggtcattatttttaggctaaaagagtatcatattttagttacactgttgcttcctatgccactgaaacaaaagaattgtattactctgtgaaatacaaataatatgggatgtacttgatttaactatttacgtattctgagcacaagatagactatgccctagatgagtgattcagagttcttgcaatggcaatgtcttgccatttctggttttatatttcctctcctcgaaatgtgtcttaaatttcacctagtgtctttatttaaaatgacggtaaactctatttcatatcacctataaatgaataccctaggaggcctcatgataacgcatcccaccctgaaggatcccaaagccagcattttgaatcatggccttggccgagagcagtgtttaccctcttggtgagctgtgagctctttgagccaaaggccgcaggaccagagaaggccttgaacgcatgttaattcatggtatgttttccatcagagtccctgagaatattctttacttgggatcgttctgcagttgttatgtgtgctcagtaacttcccggaactcagtgcctgatctcttttgttttattagcctcctggttctctgaccccctgaggatcgcagtgacctgactctcttggaacagatctttctctgtggtgtgcagggtgagggcgaggcagcctttctttatgctgagctagcacacacacaatgttgatttccatcacacagcttcagggagagaccttacgagacccatatttccaaaagaggggaacagcagatcacacctgcctctggggcttaaatgctgactgggctctcttgcatgaggcttgaacccccagggaagtccagagtggtaagggagagcctttcccctccttccaagagcagcttgcagggcagccaccggctgggcttgttttgcaaagtgcagtggaagcccctgctcttctgggcattccgatggaacgagcagactctttcccaactgcccccagcacgacacttacgtggcacccacatcacatcacgtccctctctcgccactcgaatgaaacgactaggttatgcttcagaactccttgtaccattcctcgattgtttttgatgagagaaaaaaatgtagggcatgtataggcagtttccaaagcaagtcatgtacacagaaaaaggaaaatcgacttgatgctgtgttttttggcactcaccactgactgttttagaaacatatgtttaaaataaaacctgtagaagtctcgtcttggtgttccaatggttttgcctgttttgagttttattttccgagcaattgttattgttatgagtaaataataataatattttgtaaggttgccccgccagcaggcaggccattgtggaggtgagttgcaactcctggcacctggctgtgtggcccagtggcctccacgcacactggtcttccggtgctgtgtgtttctctcggcagcgttcttcgcttatttgtaaatacaccacctcctcgtgtgtgctgtgctgttcagcttggctgcaggtccttgtgaagccattgtttctggctcttctcgcaggattctggctctgaaggtggtcccaaggaaatagcagacaaactcaaaattgttttaataaaaatgggtggccgggcgcggtggctcatgcctgtaatcccagcactttgggaggccgaggtggacggatcacgaggtcaggagatcgagaccatcctggctaacacagtgaaaccccgtccctactaaaaatgcaaacaaaaaattagccgggcgtggtggcaggtgcctgtagtcccagctactcgggaggctgaggcaggagaatggcgtgaacccggaaggcggagcttgcagtgagccgagatcaagccactgcactccagcctgggtgacagagtgagactcagtctcaaaaaaaaaaaaagggggggtgaggactgtggtcctcaaatatgtcattatcataggagataaaagcagtggaaatgtctcattccaagagactaagggtagtgagtatagggtaaagggcacggggagatggaatatcctaaaatcatcttgtggtagatggtggcaccaccctgaatagggtaaaaaacatgcaattgtacatcttcagtgtgccagttgtctggtacgggaatagtgtcttaaagttgttaataaaaatatagggaaaatggacacgacaccctaatgcaagccccggccctgaactcggcctgggaggaggaaagacatgccgcaaagctcacagctgggtcagggacagccttgagtgtggctgagaagcgaggaactgcctggatgtgacatttgccgacttggatagccgggccatgatgcgtaggagaatatctgcttataggaaatatgcaatgaagtatttggtgggaaagggccatggtgtatatcacttatcctcagatggtttagcaaaaacactctgtgtgtttgtaaagattgggaggtgggcagtggggggaagggggaggaggggaacaacgtataaagcaaatggaataaaatatcgtcccagctactcaggaggctgaggcaggagaatggcttgaaaccgggaggcgggaggttgcagtgagccaagatcactccagcctggtgacagagtgagactctatctcaaaaaaaaaaaaaaaaaaaaaaaaaaaatcaacaacagatgaatctggataaaaggtgtataggcatatatatgttgtttgtatgatttttatttttgcaatttttctgtaagtttgaaattatttccaaatattaatgctctttaaaaaaaaatgcccattcctagcccccagacccctgcgatgctgactcccttggcctgaggtggtttctgacaccaaggtcccagaccggcctgagaaattctctggagttggggcctctggtctcggggccccaggcagactctgctatactcctcaggaagattttccaaaccacaaaagagactgaattagcattgtgatttttcacacttttgttcctccattgactttaaaacttgcgctctgaaacttaaaaaaaaaatctatattcaaaagaagaggaaatagtatattaatccctcctacataccagcagttctcaactgagggtgattttgccccacagaggacagttggctgtgtctggggacagttttggttgggagagagttaccggcatcttgggggtggaggccagggatattgctaaacaccctccattacacaggacagccccccagcacagaatcatctgcaccgattgtcagctgagctgaggttgagaagcccagattcagccggtgttaagattcgccgcgtttgctgtttctgtggttctcccctttctgaggtcacctcaaacagacttcatgccattgctcctcttaacacttcaatttgtgtttttattattattatactttaagttctggggtacatgtgcagaacgtgcaggttcgttacataggtatacacgtgccatggtggtttgctgcacccatcaactcatcatctacattaggtatttatcctaatgctatccctcccctagcctcccaccctgtgacaggccccagtgtgtgatgttcacctccctatgtccatgtgttctcattgttcaactcccacttatgagtgagaacatgtggtgtgggttttctgttcttgtgttagtttgctaagaatgatggtttctagcttcatccatgtccccacaaaggacatgagctcaaccttttttatggctgcatagtattccatggtgtatatgtgccacattttctttatccagtctatcattgatgggcatttgggttggttccaagtctttgctattgtgaacaatgctgcagtaaacatacgtgtgcatgtgtctttatagtagaatgatttataatcctttgggtatatacccagtaatgggattgctgggtcaaatggcatttctggttctagatccttgaggaatcgccacacttttcttctacaatggttgaactaatttacactcccaccaacagtgtaaaagcattcctatttctccacatcctctccagcatctgttgtttcctgactttttaatgattgccattctaactggcatgagatggtatctcatcatggttttgatttgcatttctctaatgatcagtgatgatgagcttttttttgtatgtttgttggcaacataaatgtcttcttttgagaaatatctgttcatatccttcgcccactttttgatggggttgtttttttcttgtaaattttaaaataacacaccgtgccattgttacacccaagaaaattagtaatgattcctcaggaccctctaataaccagagtctgaagttccaggtcaaacaatgctctgacccattgagaactgaaatgtgattgtttaattttggaaatctcagcctttatgggaaagataaagaacagtaactccacattttatctactttctggttggatccattgcctcagtctttgagtgtacaggagtgcacttaatacataattgttttctgaccccaagaagtgttgattaattcagtaagtttggagatcataatagtattttttaaaatgaaacttttaggagggattactgaggctgatcattataaattacatcttttagtcattaaattgggcctccctcctcctcaacgtattagctatttttttccccagacacatggaaagctttcagcttctaatgaagaactcctttctggagcatgtttctagaatatgagtttagcagcacacatgatgtcatcctaattcccaactttgcgtgcaagattgttgtgtgaaaatgaaaccataaatcccatctgaattctacttgctgggtccttttacaggaagtattcttctgttttccttttctaaagaaaccacaacagtgtcatctgagtaacagatccacgactgggaagccagaaatactggaagcatgttcatctttttctggccaaagcccatccagagaagtgaagtcatgttttgggatgggtgcattgagtaggtatctggttttgtcccatacgcaagacaccgtggagacttagcggtgaacaagccacaaggaaaaggtgctaactctagcctagtgctgtaagattgcttgttgcctaatgccagcagctttttaaaaatgcaatccaagtaagtaatacgttagaatgcctggacagcaaatgaactctaaagatttcataaatgtaatgaattactgcttcaatcaaatatgaaccaactaaccacccctgccacggttttttaagtaattttacaatttgagaccatgatgcttattaaagatctctatttttcatgacccagggtaatattttgtcgtgtattgcattacttaattaaatcaacaaggtaattcataagaattaccctgcctagccgaagcataatgaaagccgcctaaaatattcccaaccatcattctgactaaactatttaagcgcttatggaaaattagctgttagaattagccaaactcttttgtaacctaggaggctggaattgaataagaaattaaggcactggggaaaatgtcaatttacccttggagagtccatatggaggaagcaaatagttcaaaggcccagctgtaagaatattgattggtgtggcctttatcctggagagaaatccatcaatgaatggcccactgtcactgacatctgtcctttggttcttctctagggttctcgacagcattagatcttaatgtaaaatgctcccagttttgtattgttttgttttgttttttgaagcccagttgctgatcagatagtaaatcaactaagcacttggagaatcgttactgggaaacagaaatattcagcatgggtattacaagtacttcttgttgtagtttctttaaaacaaagaaaacagaagactacttcatataaagaacccaacagcgagaattcagatgggattaatggttttattttacaattttatattttacaatccttccttgtcccagacacggtgcttttctaacagctctgttgcaggcagtggtgtctgcatggggctggcacaacccatggctttttttggatcctcctgactcagcctaggggattggagcaggcaaactcagtgggccttcgcagaaaagagggtgtgctttaactgattatgcctctgtacacctgggttcacacacagggactccccccccgccctctttttttttttaaaggaaaaacacatccatttcaaaatccaggcacatttcatggtagcctcagcaagaggaattgaactgctccgtgggccaatttagaacacttcagaaagtgaaggtcctcttcgccgccccggatccctgctggtgtctgtctcctggccacgatggtatggaaatttgcagagcatgaccctctctgagcaagcagagaggagcaaatttgatctaacacacattctacgggtttggttcaatgtaggtcaatttttaagagagctcagctggccagtctgcaagtctgccagggagctggctggctggctggcttccgccacggccaagaaaatccccttctgcctcaaagcaccaattaatacaagttcttcaccgagctgggtgggtaaaggaaacaggctgaaatgcatccagctttctgtgaaaccacttacaaggtcatcagccccgatatcttgcaggaccccctgctttgggctaggcggaagatgccaatctacatcagaagactctgagataccagctggtgtgaggaggggacacgcatacaccaggtcattttatttttaaagtgtaaagctgtgtgtccaaggagtcaaaggtatttggttcaatggttccaaataagtcggctgaacttttttttaattctggaagttaaggaaatgccatttgaagatgtatcttgtaaagtatattttctattctaccttatgaactaaaaaacagatatattttaggtggtagaacttctaaggatcaacgtgtcttttaccagtcagtgttttgtgggattgggtggtgttggtggttttattttattttattttttttagagtagaaagaagtcctcatatcctaaaatagcagcaagtcaataatgattctattatgtatgagtgcttttgccatatttttctcattctcagttattccattcattctacaagtgtttattgagcatctactaagttccagacattaatgtaagggctggggagggacccagacagactctgccctaatgggggaaacatacctcaaatgacagagcaaataaatgagaaatggcactatgtgctcaaggaacagggcagaaccttgcgagagcagcgaacaaggagaaccgcatttaggaaggggcaggcagggaagattgctgcagatactgtcattttggatgggggttactaagagttggcgaggcagagaaagtgggaagaatgttccagaccaagataagaagggtggtggacttgggaaaccaaagggaggccacagagcctaagtgggatgaattgagcaggtagagggggtgggcctggtccacactaaggaatgtgttttttgctttttgggttttttttcgagacggagtcccactctgtggcccaggctggagtgcactggtgcgatctcggctcactacaatctctgcctctcggattcacacaaatctcctgcctcagcttcctgagtagctgggattacaggcacgtgccaccatacccggctaatttttgtattgttagtagagatggagtttcaccatgttggccaggctggtctcgaactcctgacctcaagtgatccgcccgcctcagcctcccaaagtgctaggattcccgtgtgagccaccgcgcctggccgtgcgctaaggaattagaattctgctctgggttctgtaaggagcagtgcagtgttttaagtggagaagtgacatgatccgttttcgttttaaaaacttcacactggctggtgtatgaaaaacagacctaaatgtttcaagagtgaaaacaggagtctggctaatctattatggaaggttaggtgaggggaaatggtggctgggaccggagaaatggtaggtgagacgaatggaagccagcggacttattaataataataattgcttccatttgctgagtacataatatgggttcggcatgtttatcatctatagcatatattaacttcccatatagtgtccctgtgaggcaggcactatcattctcattttatatgaggaaactccagcatgaggtcggatttcatattcaaagtcataaaagaagaaaatggcagaatgagatttgttcttccactgttgctatactactgctagagatatattttgaaggtagtttggtcttcttgtccacattttattactgagaaatgtatcagcccaaacattctgcagatactgactgaaagtctttcggatccaggaactggcctcagaagtgagtaagaaagaccccatcagttagcccagctgaaaaggcacctctctccacttgaatatttttgtacatgaggttcagttaatcagttaggtaaatacattccttaaaataatcaaccaagaattttctgggacaggaagggagaaaggtatgctttcctatccaacatgcatgtgaccaagggctgggtgtaagatatgttagcatgtgacaacccaagcccattgccgctgtaagagtgtgtggccttgaacacatttcttaacacttctgagcctcaattcctatatctataaaatggccatataccaactcatagtgtcattataaagatttaaagactcaccagttgtcacgtgtcctcccacatcatagaccatgtggatgcttaatgagcagtggctaataaataccacttgcagtccagggcaagaagggcaattagaaaatgaattcgaggttcactttgcttctagtctatagactatttgcgggtggtatgtggcactaatgaataaatataaatgagtttgatcgttcactcgcattattgaatatttcatgcacctttacgcatggaatagtatgaactgatacacataaaatgactaaggtgattattctccacactagaggcaaacagaatcctgatttatgcagttcctcgttgttcctttcagttttgacccatggcaataagtgggaaatagattcacccaactcactccaaattctttataatttctttcaaagacagagattgctacattaagtatagttgtccctttaaaggaatatgggcagaaaaggcaaaagtcagattaaggggaaatagaagttgtataagtatagcaataagagctctgaagtcaaaatgcctacacagtgccagctgtgtgaccccggcaaagttgcctaacctctctttgcctccagtgtctcatatacaaataagtacctacctgccaaaattgttgtaaaagttaaatttaaaaatacacgtaaagtgcctttgcttaggaggagctcaaatgaacgttagtgactgatgctacttagtgactgatgctgttgctactgttacagccaactcttgttttctgaaaggaagaaggaaaattttgaagtttaagagaaatgactgttttacctgtgttggtagaaacgtttgaagaatgcaacgtaagctgacctactaaatctacccttgcgattcattctgagagaagtgggcgtggggctttactgtcagtggaagtaatcgtttatcaggtttacaacttttcccctgtatctgaggccctatttttttgttcttaaaattgtgctactgaaacttgatagatcttatactaggaaggcaatcatgacacattaaaaacagcctgaggccgggcatgatggctcatgcctttgggaggtcgaggcgggcggatcacaaggtcaagagatggagaccatcctggccaatatggtgaaaccccatctctactaaaaatacaaaaattacctgggtgtggtggcacatgcctgtagtctcagctacgcgggaggctggggcaggagaatcacttaaaccgggaggtggaggttgcagtgagccgagatctcgcgccactgcactccagcctggtgataaaacgagactccgtctcaaaaaaaacaaaaaacaaaaaaaaagaaacctgcctgaaatggtatgtaagtcctcatccaagacttgcaaactgtatctagtcatttgaaaggggagaaaacagcccaaagccttaagactgagtctcatgccagctggagagctgcaaaggtggaaacccatcagtttccacctgctcatacatttcagccagtggacaagtcagccctcctgttcttatagagacctccactgagtctgcagcagtccaaaaggctgtctgtgaactcttcgctcatgaacagataggctcatctgaacagtcccaaaagacaatcataacagcatgtctcagtgtgtcacatgattggacccaaaattctgtgtatttgtgacttatagtgaagcagtatattaagaagttattttgcaggaaactttgttgtcccctacagcttccaaaatgctgtatcagcagttttatttaatatagtttgtgaaactaaatgagaaagagctgggcaaaggaagctttttttattccaggggaaaacaaaagttgttttgatcattttgaatcttttagtaaatggagaataacaaaagaaaaatggaatgtacgtgctccattgttcttacagatgtacagtttaaatagttaggatcccaaaatactgaaattatatccaaaaataatttggattttgtaacaaaattgaattgcgtgtgaagagaaatagcgtagcaccgttttcaagtgtctcttccaacatggaggaaaaaatatttcagaaaaatacggaatttggtttgttgctgcttatttttcagaccgtcagaaccatatgctgatgctgcttcctgggaaggcagtgtccaccagtggttaggaacaggtggtctttggagctaaatagagtcaagtttagtctccagggctcagctgtgtggctttggacaagtcacttaacctctctgagtgcttcctcttccttatcaagcaggcaattacagtccttaccctgcagagtctctttcaagataaagtaaggaagtgcgtatcaaaagcgaatgcccccggctgggcaccgtggctcacgcctgtaatcccagcactttgggaggctgagataggtgtcaggagttcaagaccagtctggccaacatggcgaaaccccatctgtactaaaactacggaaaattaaccaggcgtaatggtgtgtgcctgtaatcccagctactcaggaggctgaggcaggagaattgcctgagcttgggaggtagatgtcgcagtgagccgggatcgcaccactgcactccagcctgggtgacagagagagactcagtctcaaaaaaaaaagtgaatgccccaaggcctgacaccctgtgagcaaacaatgaacaggggcaggaggaagatggcaagatgatgagggcaaggcattgagggtggtggccgcgatgctttgctttcattctttaagatgagaacccagaccatgagttctttaccaggctgtgataacttgtgccataaaaaagaagcataaatatttgcaaagacaaggttctgaaagaagtttgagcaaagttgagatgtgagaaataccagatgtcttcgatacttctttttcatttttctcctcttattttatacctcagtatactggttttacagagaatctttcaactgtctgatcttttcataaaatagtccagaaaagccaatgatagcagcatgaagatcttcatgattccagctagtctagagtttctgctgaaaaccagagtgagtgttttcagaggatgcagggtccggtctgggtgcataccgtttgccttccagatcttttctctatatttatttacctgtgattgtggaatggacagttttcattaaaggatatcattttagtaacttggaaaatcctgatcatgatttttaattatgatctttattcggtgctatgttttgttaaagctcttggcccttagtcccacatatgaaagtatttgtagctgtatttccacattctaataaaagaaatccattacccaaatttacatatgaatgattttgtaatttgtggaatgatgacatgataaagtaaatcttcagcaaaaaactcggttggatgctttgttcgaataccaaatggatccaccaggaagaagaaatcactgaagcctacattgcctggcatgatttaattgcaaagagtatctatactgcctgctggtgttaattgacaaacaagaactgtcttgtgacactttggcatggcatgaatatgctgtacagaataattaaaccctccaacaatacgtatggtcttcaaagaaataataggaaaaagttgacatgtcatcaatgagttttttcatattctaagtaattgatgccaatctcttacttttctttccctgtttccctcatttaagcagtttgaaattgataacatgttgtcagcattgaactggatgaccggagaacattcagaattcttgaaataatgaaggaatgaatgagattgtccccaccccataccccctgtatgatcagtgtaagcaatttgaagcatatttcttttatttttaattgatccaactagttctgacacattctatccagattgggttgcgtttctatgataatgattcagtttctcattcgtttatttatgaagcacttcttctatgctaggcattgtgctaggtttagaggtgttgtttctgctttttagctcaacccagtgtgggaggaagacaagtaaacaagaaataaggccgaatagggaaagtcttgttacagaatcctggcagaacacaagagaaaggctgattcacttctggggccggggggtttctttcagctctcccatgctttggagtgtaacatatgttatcttaatgaaatccatctcattcaaactgtgtaactaaattatataagggtaaagttaaagttggataatttcaatattgatctgaaagcaatttggaggtcattcatgttttgagtcaatactcaaatcatttcagaaatgcaggacattttatcaggaagaactttacctacatggtaatattttcatgcaaattctaaatactcgttttcagccagtatgtccaaagattttgaaatcagaaaatacagtactcggccaaaaaggatgggagtctacttgtcctctctaaatgagggtggacaccatgtgtctccaaaccgtaggagtcacctgctcccatgacgtgtccaagaaagagaacagctctcagcactgagcatggctggattaggacattcttgcgttgctatgaagaaatacctgagacttggtaatttacaaagaaaaaaggtttcattggctcacggttctgcaggctttacaggaagcatagcatcggcatctgctcagcttctggggaagcctcagaaagcttgcagtcatggtggaaggtgcagtggaaacatgtacctcgtatgatgaaagcgggagaaagtgagaggaaggggtgggaggaggaggtgccacatgcttttaattgaccagatcttgcaaaaactcattcttacgaagacagcaccaagccatcaaggatccgcccccacaatccaaacacctcctaccagaccccacctccagctttggggattacaattcaatgtgagatttgagtggggacaagtatctaaactacatccatggctaagactgaactcatgtctcttctctcctttatgagtgacccatctctgttgacatcacgcaagagtcctcagtctgttacgcagttcctgattctgggcccccctgaatttcccatccagttgtgtcctggcctggtgctctgtatggacgctcacaccagcctccttgctaaccttcctggagcctgtatttttctctttcccctccaagtctcatctgtgtggctgtcagaaccacctgtggctctgaagcttgtgtctgctcaggtcccttccgtgtttggcggctctgcatggcacaggataaagtcagcagcattgggcagcatgtaggttctgtccccagcctgcctgtctcagcagcagcgggtctccctgcctcaggccctgcgccctgaccacctggcatccgtgtcatttcccctcccctctgcgcgttgcccgctagcatgctgtttctgcacccccatgcctttgaggatgcagtcccctctcgctggaatgctctcctccccatttcccattcctctcctcaccttttccccaccagcgcagctcattcttccccatctttcccggctcccttgggcaccccctccccaggctgacttctgggttggaagcctttcctggggctccagcagtgctttgggcgtgtccctgtcatggagccctgaccactctgggtctgtgtccttcagcagtggggcctcctggagcatcttattcccattgtgcagcatgctagatattgtttaaatgagagaatatttaggtgtcacgtgtcatcccacaacaaacggcaaatagcaaaatcaactcctggcacagttaaaatgcattttacttcctggtattgagagaagcagagtgccttgttagatcgcctaatctaataagcagagaaaaagaatgttctcatgaaattatgcattcaccttctgttttcatttgctgacgtaagatagtccatctaattggattttctctttggggaaatctgcaggctccaaggccattgctgtcacatttccaatactgccattgtccatccaccccccttagttctctccaggggactttgactcccggccccttttaaattaggcacacatcttagaaaacctccatccagcgccttctcagtttcatccatgctccctggcaagtcatggtgctggagaaagatgtgggacgtgtatcacccaggaaggagcagaaagcccgaagcaaaaggggcagtgcctgccgcatgctcctcaaattcacttattctttcacgtattcatctgctcaacatgtaatgtattcagcacttagcacagcacctgcagcaaacactccgtcaatattgcttgaccatcctgtaaggtctggtagcgccacacagtggttaagagcacaaattctaaagcaaaaccacccggacactgtcatggatggcatgaccttgggcaggtcatttgaccctgctgtgtcttggtttcctcttttaaatagggattaaaaaaataatatccatgggccagataatatatggattaaatgagatatcaggggctcagcacagtacctggaccagggtgtgtttagcagctattaatgcttacagccaggaggaggtgcaggctctctgcagggctggaagtgagggaatacagcgatgaccaaggagccctcctgtggctcacattcttgaaggtagagataaataagtaaggagacgcataaacaaaataggaataccaggcagaaaaccaaaggaggactgcgatgggggctaatagtggtgatggggctgctttagataagagatcaggaaaggaccctctggagagacaacactgaaaccaagagcagaaggatgaaaaggtgctggctacatgaaaagccatgtaaagaatgttccagacacgggcacagcaggtgcaatggccctcagagggagaggatctggaatgttctagaaccaaccagaggccagtgttggctagagtagcatgagctagagggaaaagtgagcacagtgtggtggcagggtgggcagcatgaggttgcaagcacctcggaggccatcgggaggcgttgggatttcaccccagggccaacaagaagacactaaagagttttagcagggacagcagcatgatctccaagcaggacctgaggaagtcagagcagggagcaggggcacacaaagccctgcatggtgggttcattcccaagggtgtggagcgcatgacacctggagtcttggctgcagaagcacagattcctggaagggagagctgggaaggagttccgatatcaggtcatattgcttctctccatctctcattcaaacccctgaaagaaaaccaaggaagctgcctgtttttccagctcatagcactggggctgatcaacagaaagcccatcttcagtttggggcttttttttggagaggggggagttggtatttatttaggtatttagctatttaaatggacatatcattgcgtgtttttgttgggcacaccatgttgttttgaaggagatagttgaatctagctaataaacaaatgtattacctcccagttaccatttttgtggtgagcgcacgtaacattcaccgcctgcattttgcaagactctgttgtatgctgagcatgaatttttgctggctttcctcctgttcctgtcttccccttccccttcccctctcttgtcttcaaaatatcttgagaagatacaatgtacacaagtggtatgactgcatcttatctgtaaatcaacatttcttttccagactgcataagaaaaactcgaaaaggaacatatcatttagtgcctcagcagcagtgggacatggtcagggctgtaagcacaagcccctgttccactctccttagacaagagaagacataacacagtgcttaagaactctccagagctccaagcatgactgtggttgtatttctgcttagctccaatgacacttggatgatgatgaggagcagtgggtagttttagggctttgtattgctgttctgagtcacatttcaaaaccttctaattaattttactgctgtttaaccctaaaattactctgtcctccagtttgctgacagttgtctatcaaaagctcgttttctctaatccccagctttcctgatggacttttctctccctcatacgtaaaatgacttttctccttggccatctgtccaaaccagctttcagttaagcctggtcagaagccttcgaatgatgtatctttgttctacaaatgtctgcacccatcactccccttaatattaggtatctatataccttgttcattcaaataagatttcaacattgttaagacctgaattgctaaaatattaataaaggatgtgatagaagtacaagtacatagtaaataatatatgtaataattaatataacttaatctacattaaattcttcctttcctttctctgtaatatttaagctggtcaagtgtgctccttttttttttttttttttttttttgatggagtctcgctctgttgcccaggctggagtgcagtggcatgatctcggctcactgcaagctctgcctcccaggttcacgccattctcctgcctcagcctcctgagtagttgggaccacaggcacccaccaccgtgcccggctaatttttttgtatttttagtagagacggggtttcaccgtattagccagaatggtctcgatctcctgacctcgtgatctgcccgccttggcctcccaaagtgctgggattacaggcgtgagccactgtgcccagccgtgtgctcttttttaagactattgaggccactatgggttctggctcagtagagaataggctgtgtgcatccttagctgcatcttccatgctctgtgcatcccccctccatgctctgtgcatcctccccaccatgctctgtgcatcctctccccatgctctgcgcaccctccccaccgtgctctgtgcatctactccccgtgctctgcgcatcctccccaccgtgctgtgtgcatccccactccatgctctgctcatcctcccacccgtgctctgtgcatccccacccccatgctctccgaatcctccccaccatgctctgtgcatcctctccctgtgctctgtgcatcctctccccgtgctctgtgcatcccccaacccatgctctgtgcatccccgccccatgctctctgcatcctccccgcctctgctctctgcatccccacccccggctctgtgcatccctgccccatgctctgtgcatcctccccgtgctctgtgcatcctccccgtgctctgtgcatcctctctccgtgctctgtgcatcctctccccatgctctgtgcattctctccccgtgctctgtgcatcctccccgtgctctgtgcatcctctctccgtgctctgtgcatcctctccccatgctctgtgcatcttcccatgctctgtgcatccctcatgctctgtgcatcctcccctccatgctctgtgcctccccctgtgctctgtgcctcctctcccggtgctctgtgcattctctccctgtgctctgtgctttctcccgtgctgtgtgcattaccccgtgctctgcagatatgtcctgtgttgtgtgtatccctctgtgctctgcatccttctgcctgttcctctgcagcttcacccatgtcccctctcagccccatccctccagttattcccctcaagtccccgtctctggttttcacatcccgcctctctgcttccctttggaactgtgctgtggaacattcgttcacctcgcctgtcaccttgacctgggctcacctgctgcatctccattgtcaaggtcaccagactcctccaccatcctggagctctctacctatgactaaggactaccccttcttcacactcttctcttcagggccctgtcaccttcccactgccttgcctgctctccttcccctcttcctctcctttgctcatgactgcgtgacagggccagggtgccctgtgaatgagcctgcccaggcagcccctctggcagctcagaggaggtgagcttagaagacaggggtttcagagctcaacgctgccaaggagggcaactttctctggcacgacatgtgcactgctgaggagagtgaggggcagcacttgggaggcccacgtgcctttgccagtgagtgtgagggcccgtctgtgttttatgttttccgcacactctctcaaacactcgctgttaagtagactgcagcggagacctgccatcggggtctaactgatttaagccaggcatatcctcaacatattgcaatccatgtaaaacaaggagctgactctcagttctgaacttggctgggagcaggtctaagaactctgactgtgtaaggaagtgcttctcatctctgacatttgcatattcccgctgcttttccttccctgccatactgatcaggactctggttgcaaaacccagctccagccagcgtaggcagaagagagggacttatgaggaggaggagaggcggagcaggccccatgggcaacaggtccatctccctctccctgccttttgtccctgcctgagggtgacagctttgttctctctgactagctttctcctgaagtaagggaccaggatggaggtggtggccacattctcagagccttgagaacagagaagaaagacgtcatccccagacatcccagctcaacatgctgtagggaagatttgtgatgggcttagcttgggtcacatgttcatctctggatcaagagtggaggagcacccccccacacacacacacacaaaaccaaacggtgtgaagagtggagagtgtcttcctctgaagacaggaaagggcaggcagcaccttcaccatccacaaagttcagtatttaaagcaactcttgactccctgttgtccagacacagaaaacccaggttctgtttagagcctttctctgtcttccaccagcccagctccccagactccaggcctttcaggccctgaccttgacattatctgccaggatttcccctctccttccaccctgtcctgggcctggccgactcctgctccatcgttagggcccagtagttgtcggatccctacgcaaagcctttcccttgcaggatgctccacccaaagcacatccacgcacccagaagtgttactgctggaggatgtccaggttcttggtgttttgaacaaagaattggacaaaatgcacaaacaaaacaaggaaagaatgaagcaacagaagcagagatttattgaaaatgaaattacgctcctcagggtgtgagggggcccaagcataggtgctcaagatccccgttacagaattttctgggatttaaataccctctagaggtttccattggttacttcgtgtgcgccctatgtaaatgaaggggatgaggtaaagttacaaagtcatttaatcgctgtacgccctatgtaaatggagaggatatttcctgtcatagctgaagtgtttccgtttgacttagttctagaaagtcagcatgaatcgacctttgttccctgcctccagaccttactctcctgcctcagaaggactctgtttctactctgtgatcgctcccttcacactggattctgtgtcaaccatcaccctaccagctcgtggtgtcatcaagatgggggctgttcctatttgtctttgtatcccagcagctagcacctggcagcggtagttacacaggaaatacttcctgtggttgtgttgaacaggataaaatagtgcatgttatgtaagacattggaaaataatttaaaatctaagtaacccatgctttgcaatctttaatgaagttctggtagactgcatacagttttattaatagcataaacggggtttcctccccctttcaatttatcttagaaattcaatatttcaggatgtgcaaaatcatttttcctcacctcatacatacattgctgcttttagcatttcattgctgttctattctcttctgtgacatttcaatattttcagccggttctctcacctgcgggggagccagcaggggcactgctgtggatcagaatgattttcccagcaggtggttcaaccattgattccagttggtggagactgtgacttccaagcaggagattttcccaaattggaaatctgcctgtactattcatggaagagtatatgtgtgtgacaaatgtgtgcctttgcaagtgtgtgcacccagtgtgcgcatgaaggaatgaggtgggaggaagggagagagggagggttccacattgagtgtgtgggctattgttccgaggatgcatatctgactctgttgtctgagtctcctctgaattctccccggagaacctaaactgggaaggccctaatgggagcttccttggattatctgttaaaaaaaaaaaaaggaggtcacaatcttgctaccctatagcctagacattcacaacaatgtatcaatgcaattctgcactcatctttttatggtgtttttgtttttccgcagaggtctcattgccagcagtttcacggaaacccactatctgcaagacggtactgatgtctccctcgctcgaaattacacggtaattctggcacgttgggatcaccataatcttacaccactggatctgtgcttaacctttgtagccattttattcggagcaaaatcacatgcccagattcttaacttaggcccccccaagaagcgctggtgtgtcccttagtggtaggcgttctattataaatccaaaacagcagccttggccaggtatgtgcacagacagcccctgagggaatggctttatggcagagctgaaccttgaaaccaccttccaaggactatggatcctcatttgggcaaatcctttttagaaaacctagccagttagagatggcttggaaggcagccttgcctgaactgaacttggctacattaaactctgaggtgccttaaagaactttaaaagaaaactgattctgcttaacctattctgaatgtatccacaatgtggatacgattctatatcgtgggtgttactgtaacatgacatttatcccctctcaggcagtgtttctggtatttgaacttttagctgtgtcctggacaaaatgctcacttcatttgttgctttaacaaatgtttactgtgtactctccatgatctgtcccacatgtgaatatggggattcagagagaataggacagagtcactgccctctgggaaggaggaaggttacttgttttaaagagctgtgggtattttaaaaaggatgagcttgaggcaggctttatgcttctcccttatcactgaaggttgtcaagtagccattactgtctgcagtgattcctcccttctctgcatgacaccaacacttttctttatcacttgtttgacacttggcacttgcaagctgatacctgcagccttccaggaacttggtggaatgagctgctgtagctctcccagcccaaagaaaacacatggaaatccaggataaaatataaacatttaagaatttttgctaatgcctggtcaagctcaaaagagagtcagcaaaatccccaagaggcagaaacaaagaggggatgttattcctgagcactggctggtgagttggggctccccaaaggactattcaaagacccaaagggctattcaagacccagaaagagggcctggtgcttgggtttggaaaaagagaagtaaccgcctgcaactgagaatcccacaaaagccagatccccaggagagctgctttcctctgtgaaaaagagacaaaaagaactcttccaatccagggatgggggctgggaggaagaattgtttgccaggtgtcttggattgaaaaaagacttcataaaaaatgaagacattgaaaccccagttagtctcatgtgtggatgttgggaatagtctgggcctgtgtccaaatttttaataccagcgtaggaatggaattcccagtcaagatattgacctcaaaactggtcccacatcagtgaaactcccatgggcccagacataagccaacccaaaatagttctgtaggaatatttctataacccagataacatgagatgccctcatggaagaaaaagtaataaaaatattaaagatgagccccaaatcaaaattacaagccacacaatgcaaaaagccgttgtacgcaagcatcagcagacaagagaaacaagaattaggacttctgagaacataagagataatggaaaaatcagagaaaaaaaattaaagagaacagaatgggtctaatagaaattccacaatgaaaatacataaaatttaaaaacacacacaggaaacaagccgtgtttaatcagagtgtgacgagcctgtccctgaattgaggaaagacatgagtcttgaggaaaatccaccaaggaggtggataacttggaataactaaactaaacatactccaggacagctgctgatgaaaatgcagaacaccaaggatgaactcttaaaaccacttgaggcaaaagagagatttgtacaaaataatgacaactaaaccaacaataaacttttcattagtaactatgcaattaaaacttgagagctaagggaaaattattgtcagtctcaatcctatattcattaattattttgtaagaataaaaatgaaatagacattttcatacaaagatgagagaaattactaccctcagattccaacgaaggtatctaccaaagggtaactaacaaagaatagctcagtaggaaggaaactgatcaccagcagcaaggacaggaagtcagaggcactagtaaacaaaataatgcatgtgaataaatttaaataagcttcttaaaatgactgttgcaacagtgaccaaatttggatggtttaaaaccagatgagctaatagatttaaaatggtttaagaatttgtattgtactggagaataatagacacgctgattaactttagattttgataagagtgtgtcctgcaattttaagtataactatttaaagagtagaaaaacataaaatagcaagataaaaatgagtcaacatattaatctcattatatgtaaatagatggaatctctttgtaaaaatgaaaacatgatctgcttagaatttaaaataaaatccagctacatcatttttacaggattcacacccaaaatataaaatggttgtgagaactaagaaaaggaatgggaaaagatattgtagacaaatcttaattaaaaaaaaagcaaaacaaaacaaaaaaaaagctgctgtagtggtaacatcagagaagctagaccttaaggcaaaaatgacattaataggcataaagggagtaattctgtaatgataaaaggagcaacttagaaaggtagtaaaagaattttgaaactgtatatgctagcaaaattgtctcaaaatatataaagtgataaatggcagaatccagatgtaacttttaaatctaattatagattcatctagaactaagctttagcccagctcctaattaaaggatttctgaaaatccgaaacaaaacaaaaaagcattaaagattagacattatgggctaaaacttgtttggttcctagaaggttaccaaaaaagctttcaatactgacagcattttacaatttttcctcaaaagaaaagtctctagatgtaaaattgataagcttaattcataaagcaagtcactgaaaatgtctggacacattcacagagtgggagatttaaatatacctctctcagaaatgaagattttttaaatgagcagaaattaatgaaaaggaagaccaaaaaaaaaaaaaaaaaactcaagagggaagatgaattaaaccaaaagctggtgctttgaaaatattcataaaatggacaagacatttataaaattaagaaagaaagaattcccaagtaaataatattaagaatgcaaagagggatataaatatttttattcagagattttttaaatcacaagaatgttgtgaacaatactaattatttcttagaaatgtaaaattattaacactggatcaaggtgaaagaggaaaatttaaatataactatataaagatattaaatttgtaatagtacttttaatatttactgacaaaaataagctcagactcaaatgatttagctggtgagttttaactaacatataagaaacaaatagttcctgagaaaaaaagaataatttttttaaaggagggtgtggaaggagcttctaaaacaagaaaaagagcatgcacaaaatgaatcctacagactagtttcaattatggacgtagttgcaaaaatcctaagtaaattttacaaaccctatccagtacatattttaaaaatacttctgaccaaattatactcaactgaggaatgcaaggatagttcaacattagtatatctactaaggtaatttaatccattaatatcttcagattaaaagtattataactgatagtatttcttctgtgataacctatactgtttcttatagtgattttaatagcttttgtgagtggagaatgctatctatccctttcctaaccccatagagcctcacatagcatcttgcatataatagatttttaataaaattatccatctagcattgcattgtcttaggtgatgccatgtaaaattcatttcttcatctattcactcagcaaacatttatttagcacctcctgtttgcagacactgttaggctatggggagataggctgactaaaatatattcctcagcatataaatcctgcttaagaggcacagagcattttaaagacatttaaaaaacatgttttaatgtaattactataataggagatgtgtacaaaataccactgtggtattttaattgtggctgattttaattctttggacgccatttcactaaggaagtaacattaatctgggtctttaaaagtgggcaaagaagaagaccaagatggggatgaaacctttccatactaaagagtttcaactttacctattgaaatttgggagtcataggaagttctcatgcagcagaatggcctgttcagttctgtgatttagaaagggtctctgatgacagaatggaagaaagattggtaggaatattggtagacagaagacaggaagatttcttatgggcccattgtagttagtgaaaattttgcctacagaactgggccttggaatggtcagcaattggccagagtcaagagtccttgggaagtcaaaggagacaggatcaggggatagagggtgggggaggtgtcatcagtgggactttcccttccacttaggccattggatgggcaatttgtttctcagtggtaccattaaggagcagttgttggttggaaggcagaggagatgagtcttggtttgtctgtgttgagtttgtcataggacagccaagtaaaggtcttctgtaggcagatggatatataagaacctagagtacagagaaagatggagtcctaaagtaaagatctgtggatcaacgtcataaataagtgatgggcagggccatgagttcacatttgacgtttatgtcctcttttacctccctaagatctcatttaaaatatgttttcagactcagcactgaggctatctccacagtgtaaatagttatttcagaaagaaacagaaaagagagatcttagaaataccacaacaataggctccggtcttccaaatgtccacgatctatgatggtgaacagtgcttgtctaatacagacatctctagaatgtgtaaaatatgcattcaaagttatttgaatagttttgtgcattctgttacaatctcccttactagttttctttttcttaggcatctgtattagtattagtcagggttctcttgaaggacagaactaataggacagatgtatatatgaaggggagtttgttaaggagtacagactcacacgatcacaaggtaaggcctcacaataggccatctgcaagttgaggagcaaggaagccaatccaagtcccaaaacctcaaaagtagggaagccgatggtgcagccttcagtctgtggctgaaggcccgagaacccctggcaaaccattggtgtaggtccaagagtccaaaagctgaagaacttgaagtccgatgttcaagggcaggaaacattcagcacgggagaaaggtaaaggccagaaaactcagccagtctagtctttccacattcctctgcctactttattctagccgcgctggcagctgattagatggtgcccacccagattgaggacgggtgggcctctcccagtccactgactcaaatgttaatctcctttggcaacaccctcacagacacacccaggaataatactttgcatccttcaatccaatcaagttgacactcaatatttactatcacagtactttttccccttctttctcacttgggaggaaaaatgcaataagcaagaagacgaagaaatagaggactagagaaacaggggttcaacaactgccaggtctgtttgggacttggattgcaaaagctgaagtctacatatccaggcatcttagtaaacagcccggatggaagggctccagggcgttgatagtgtttgtctccatgtggtgcgggactctgtgcttttctgggttctctgattcacatgtgcacaggagcaggagctcacatttttcctctcctccttttccatgtggttactgtgtgaaagggtgaatgtctgctccattcccctcgtcttcccccggtcctccccatggaactgtctctttacagggaagagggtgggaggagacaggccctgaaaatccctggtccctgctaactggggagtggctgcagcccctgtgttgggcagcccttgaggtcagtagtgggtgagacttgcccctccctccctccatggagtcctctaggcagcagtgttcctcatttctaccttccccacaatgggtcctgaggcttttggctgggaagaaggggaaagaggtcggggcatggggaggatggaagttggaaattgcaggaagcctctctactgtctaggcctaaactagtatcctctccagaatataccagaagcctcttttttggcagtcattaagctgatgctgtattttgatcttcatctgactctgtggatcatctccactggggaagcaactgaaagctagattaattggcacccccaaatctccagaagcatcaagcacatgttgcttttataattagaaaaatggtgacttttcttttaacccagcagttcccttcccccattcctttgaatgcctttccaagcagtcagccttgttacagtaaagacagggagtgaacaatgttgttcactaattaaaacccacagcccagaacagctggtccttccagcaggagccccttaaggagagtccgaggctttgcattgtttttcgtggtgaggacccagatgcagcttttagggttttgtttttattgaatcaggctggaaaacaaaaagaaatttgctgactcatctcctcttctgctcaagtcagcacacagggaattttcctaaatttaaagttatgtataaaataagaaccactttttgttggctatagtgtatagtgctatttttttctttaaatatctcaacaattggtataagctggttgactcagaagagtggctgattttaattttggagttaatcacatcttttctctcgactgtcctgacaggatgaaatatttgtggctttatcctttgctgcccacatctaaggggagattatgttttatattgttacttttaataaggcctgcgggagactatccgtgtgacatttctgctgtttacatgccaaaagacagctctgaaaggctggcagaggtccccaaaaaggctagatgctgtcagtgctttggagggaatacattcgtctgttacatgcatcttgtcaaccaagaacctgcactacgcaggtaccatgacctgttcacatgcccccttatgctgagaatacagcagggattaaaaacagacaagggagcccatgggtgaggggaggctagaggaagaagactgcccttatcctggtaagcacaaacataattaacatctgggctaagtgcaccaaaggaaaggccacggggccctaatctggtctgagggatcatggaaggctttatggggaaaggaacatttgaaccaacagctggaggctgaggaggcatgaaccaggggacaggaggagaaacgttccaggctgatgctgagttttacttggggtggcgggggagaggaaggaagtgtttaggagctgatgaaagtcatagcgtataggacctgaggaccatgttgatagccttggttgtgataggggaacattaggaggtcaataaaggccttcctcaaggcgtgtcatgactatgtttgggctttgaaaagcacccgctggctccagcatgaagtcgtagtcagagggaacaggaggggagagggagggtcccctgctctgtcagggtcaggcaggggcctcttgtggaacagcctgaagcccaggtgagaggagatagcagcagaggccaggtgcacggaatgaaaggaaggaaacatgtctccccttagacatgatcaggacccaaaaatgtttcattcgtggtatatgtttctcactggaaaaaatagagagcatttgctttgatagtttcaaaggagaccagctgagatgaactgaggctggaccatcaggtaaggatagaatctaatattttggccaaaagtgttgtttgggtgacatcccattcatttccatggcaactactgattgtcagaaagggatagtatcttctacaaccagcttggactaaacacgtcagggcggatgactatcaggagttaaccacagttcattacagttagaaagcatctaatcgagatgaaaagataattctggaaggaaggggaaagtcagagatcacgcacatctcataagtgtatcaagtgtaagcagtgttgcaggtgcgcagtgactatctgggccagaggcgtgggggtaagaagaatttaccaagacagttgtaggtaaagaaagggagatttactagagatcataggaaaatacattacaaaggagcaatgggcaggccagcaagagaggagctgactgcaaggagacaaaggcttgctggagatgttataggatggtgcttgtgccaccggtgtgctgaagaaagctttgtgcaatattgataatgccaaggttgcagtgaactaaattgcaattttctgtcagctgggggtctggtgatagctgggcacaggaagattgtgagtcatgtgcacgggagggatatgtgtcctggaccatgaaaaaggcagacttgtagcttatctgcttcttcattttgctttcccccaatcctgctagcctgactcctcctccctaactaggactccacaagccaggctcatcatcatattcttcttaaaacatcattgagaatggattgaatttccctgctgttgctgtactccacacatacctaactcaccggctctccctgcctgcctctccctcacaggctgctttgctgtcccactggccgaggcactcaacaccagtgccttctctcccttgggtcttcacccaagtcccgtggtgactcctacctccacagcacattccacaccctttcctgtccaccatcacatggctgcaccagctcaggccctcccttcctcacagctggaagatgttttagccacctgtctttttctcccaactaccagtataacctagctttaatccagaccccgcaccggcctgaatgatccttctaaaacatctttctatttgtatcacaagattgcatttacattttgatcctcccaaatcatcagcagcttcccccaatgcctcctcagtcaaattcaaatttcttagaccagtatcaccctccacagtggtgacggccctaccttttcacacatgcctatgtttattcagtcattcattcatgcactaattcaacaaatgtttactgatagtgtccaatgtggtagctaacattgagtaaatatcaacaacaggcaagacactgtgcacagaacttttcatatattctgttgtttgatcttcaccaaaaatcagttcttgctatctttatacccagatgagaatactgagacattgaggggctaaataactcggccacacccacagttaataaggattcaaacccagatagtctgactctagaatctgagctcctagtctaaggctacactacccagaatgagcctgatctcatctgatcttggaagctaagcaggatcaggcctggctagctcttggacaggagagtctcagctcctatatgctgtgctacactgcctccagttcacttggaacaaaacactgagtcttggttatacgtttctggctatggtgtttgttgtaatggaattagtctataaatggagtggattggggaagcgggtagcattcatttacaatgggagacacctagagaatgctcttgggggagagcagctgaaccaaagtcctggaatatgaggagaggagaggccagaacaggcctctggggattcactaagtgcatcactccaaggcccaactgaactcagaccagtaaacatcccatactctgtggcaagtctgcagaagggaggatgcagcccctgtcctcagggaacatacattctaacaacatatgacataatgtgcccataacagagatgctttgggagccaaacaatgcaaggggcaaacccacgttcccagaggaactcactgttttggtgacttttcttccataaaattgtcaggaaagggcaggctgtaagatagaccttctgtctggagacaggatacgtcaaggttaggatcacaagccagagtccagctacccaggttcgaatcccagctcgagcacttaaccagctgtgggatgtgacgatgaaacagacaccgagcctggcactcagtcggggctttggggaagtgagccagccatggccactgctgtgccagtgatcatttcacagcagttcttccccacgctgtaccatatgttccttctgaaatcccttgtagattctgagaacagatgagaagctgggatgcggctgataactgagttgttcaggcctgtgtgtctccatcaaattgcaaatggccctataggtcttctgacccctgcccctgctaacccccccgtgtgcattttcacacaatatccaagaaaatttgcagttaggagttagagccaagtgacagggtataagcaaataaccctcccttctctctaatgggtcaatttctctcatgcacatccattcattcattcgttcaacaaaaatacactgagcaatgggtcagtgtggaagaaaatagcaagtggaaaatagagcttacagcagagtgggtttaaaatatttatgttcgtattccagatttgtaacaatgccttacattttatgaattgcgtccccatgtcatgtttatttgatccacaaaactctggacaactaagtgcccgtcccattatacagattaaaaactgagagactcaacccgaagatttccaattctggatggatctagtgatctcactattgcagacgtgctgttcccaggcccagtttgcctggaggtctcaaagactatgaacatgattttgtaagcgtttgttctctctgcagaattctagcacagcaaaatgatttcagtggtccctgaggttagttctttatagtcttttaaccagacatggttcttgttatggacatgggagcagagatgctcggaggatgggtgtggtgacttatttcttcacaatcctgccctgcacactctcaggactaagtgtaatgtagcccagttatagaaacacacagagctgcaaagtcactttttctttgctcagatgcattgtcaccttgttttagtctcaagcaaacatgtagtatgttggggcttgcgtgcaagggaacaaggacctgactgcagtcatgctgaaatgcaggctggcaacagacatgcatgtacatacacacacccagaaacacagacacatacacacccatatacacacaatgcatatacacatgcatacccacacacacacatatacacacatgcacacccatatatgcacatacatatacacatatgcacaccatatacacacatacgtgtatacacacacccacgcacccccatatacatacagatacatgcatatacacacacaaatatacacatgtgcccacatatacatgcgtgcatacccatacacatgtacatatacacacatgcacacccacatccacacatatacatatatgcacaccatatacacacatacatatacacacacatgcacaccatatacacacatacatatacacacattcacacatctgcacaccatatacaaacatatacacacacgcacagcatatacacatgtatatatacacacatgcacacatatacacatgtgcacaccatatacacacatgcacacccacatgcacacacacacatgcatacccatatacacacatacatatacacacatgcacacccacatccacacagacacacacatgcacaccatatacacacatacatatacacagataccatatacacacatacatatatatacacgtgcatatatacacatgcacactgatatacacatgcatatgcacacatgcacaccatatacacacgtacatatacacacatgcacacatatgcacatgtgcacaccatatacacacatacatatatatacaaatgcatatatacacatgcacaccaatatacacacatgcatatatacacatgcacactgatatacacacatgcatatatacacatgcacacccatgcaccccatatacatacccatgcacatgcacacacacaaatatacgcacgtgcccacatacacacacatacacacctatagacacacatacacccatacacatgtacgctcacccacctttggacccctcctatttatgggcttttctctgagtttggaaatgacttcaccttcttatgatgccatgagtgacactgtaatgaggctctgcggtacccaggaaaagcattccgcccatgtatggattttaggtgatagctttttgttgggaacaggccccccgccaaatctggccataaactggccccaaaactggccataaacaaaatctctgcagcactgtgacatgttcgtgatggccatgacacccacgctggaaggttgtgggtttaccagaatggagcaaggaacacctggcccacccagggcggaaaactgcttaaaggtgttcttaaaccacaaacaatagcatgcatgatctgtgccttaaggacatgctcctgctgcagataagtagcccaacccatccctttatttcaacccatccattcatttcccataaggaatacttttagttaatctacaatctatagaaacaatgcttatcactggcttgctgtcagtaaatacgtgggtaaatctctgttcagggctctcagctctgaaggctgtgagacccctgatttcccactccactcctctgtatttctgtgtgtgtgtctttaattcctctagtgccgctggattagggtctccctgaccgagctggtctcggcagcttttcttttctaaaagagagagaaactcatgtttctgagagaaatgcatgtttctgacagccaggtatggagggaagtgtctggcctagagttgagaggcctggattttagttcctgccctaccgttaaccagctctgtgacctttgatggttatttaggtcttggtttccccatctattcagggaaggggctggctaaaagaaaaaggttggccttagatggcccaaagcttccttctggctagaatattgtgtgattcaagcacttaatcaagatagtttggctcattgcatagggcaaggagtctgggaagaccctacaaatttcccctaaagaaggcattcagaataattttcatttggtatactccctaacagactttggtagcattcctttctaatcacaaggtcaagccatctttgttaccacttaagcatataaaatgcctttccttctagtccactgagagttgggtaacagacgtttgattttacttcccacatggcgtagagttgagggctaccaattttcaagttcaagagttcttattccatcttcctcttacccaccattatatttgattgatagtattaaacagaaggaaaagttgttctactggagtgggaaaatgcattaggttaagtaataagtatataaaatacatggttagaggtttttgaaaaggaaaagatgtaattttctggttatgcatgtttggggctctttttctgtgttgtgttttgttggtagaaatagaatgtcttggatcagcagaactaggcaaagacggcctggcctagtgggaccatgtcttgttcggcaatgtctttagagacataagggtgaggaaaagaaagaggctatacagtttagcgcccttgaggcaatcagagagaggaacaggaatgcagtgttggaaggtctgcagagggttgtggccacagctggctggctggtaagggccatgcagtgatcaacaggtcagggggccctggggtgcaagcccctcttaggcatgatggctccctgctgggtctctttctggtgtggatattcagacccaaaaaccaagtgtttgtgaacccacaaggcctagttggtgcctgcctcttagcatcagtgcgtgcagaggtgcacccttgggcagggcacaggctcacctggagattgtcttgactggccactgctggccactagcggtgatgtagcctgtgctcctctctctctgcctttgtcactggctaagagggtcaccccccacccccaggggttgaagactgcatctcctccactccccataatcaaatttcccaaccaaccacgtgatgcatggtgtgacaaccatgtcttgctgagttgcgaaattatctgtgttttgacttatgttataaaaactcaatcacatttgtttaaacacttaatgagacatattgaaaaaaattaaatttcacgaaattgtcattgccttggaaaatctagaatttggagttctcataattatggtcagtaatctaagaagttaatcactgtcaggaatgaacaacggacttgttagtcaactgtctgaaggtgatacaaaagtggtgttaaagctggaaatcagttgttaactctactaatgactgagagaagtgagattgtttactttaagcaacagtttatgagagctgaaatccacccccctcctccctcataagcaatacttcaagtgagttgttgaactggaaattaatttgatactagtttgttctaagctcatgctctaacgagcttatatttctgtgtatttaatttgaaagtacatttaataaataatctattaaaaacaaattgagattgagtataaatgagcttgaaatttcagaggtcagtaattaaaattattgtcaccatttggttttcagttttttaaacagtatttagctacttagagcagcatttcacattcctctaaaatgggggaaattctgtaaccatatgtgaccccaaagatctgtgacagtcaaaacccagtgattctggttaccttaagcagccaaaatcctaacagcagctgccaacctttcactctctgcattgtcttccgctttgatgcctgccgtgtgcccagggctaaaatccctaccagggaagcccggcctgggaaggtactaggatccccctgatgccccagagcattatgatccaattatataaccccctcatagtcagagaattatcatgcttcccctacatacccaactaagagttaatctagagtgagaggacactgaagccattcaaaatatatgtcacacaaaagctaaggaggtgacctggcagcgaggtttgccctcccagatggcctggatggaagcctgatgcatcctttcctaagccacgtgcttattgaagatggcagcttctctgggggaggaacagggcactgtgagagctacactcctgcatctgaaccttccagcccagcagaactaaccccacccctggatgccactccccacccccagcgcccactatctttgcacatgctttccctctgtaggtaagtcctctcctgccatggcccctgcatacctagccatttcactcttcagtgttgtatgaaggatccaaaaaggagcacacggcactttcattgtttgcaattgatataatcagcaacatagaaaaaagatacgctacaaactgataaactgataagatggtgtggcaaaagtgcccaatataagaccaacttacaaaatcaaaagcttccctttacattaaaaataaatatatgtaagacaaaataggaaaaaagagatcttatttatgatatcaacaaatctacacaatacctatacataagcttaacaaaaattttccaacagccacgtggaaaaaaaaatctaaaactagactaaaggacataaaaatgaccgtattaaaagaagaggcctgccatgtacatgaataggcaagcggtttattatgaaaatataagttcttcccaaactgacctgtacttcagtgtaatacaaactgagatctcaatgggttattgtgtagcttaaaattggattctgtaattcatctgaagagaaaatagggaatgataacctagaaacctttgagaaaagaatggtaccaaaagaaaatgatttggagaaagtcaccaagacaattcaatagaaaaaagagtaggtgtttcaacaaatggttctggaacaactagctgtccacatgccgaagaatgaagttggacttgtacttcaagctacatacaaaaattaattcaagatggctaaagatgtaaatataatagctaaacccatacaactcttaaaaagaaaaagatatgtgtagatctttatgaccttaggttaggtaatggtttcttagacatggtaccagaagtgtaagtagccaaagaaaaaaatagacaagacctcatcaaaattttgagcttcaaaagatacaatcaagaaagtaaaaggggccagttctgatggctcacgcctgtaatcccagcactttgggaggccaaggcaggcagattgcttgaggtcagtagttcaagaccagcctggccaatatggtgaaattccatcactacaaaaaaatacaaaaattagctgggtgtgatggcatgtgcctgtaatcccagttactccagtggctgaggcaggagaatcacttgaacccgggaagcagaggttgcaatgagccgagatcgtgccactgcactccagcctaggtgacagagcgaggctctgtctcaaaaaaaataaataaataaaataaaaattaagaaagtaaaaggacaacccataaaatgggaaaaaaatctgtaaatcatatatctaataagggtctagtgctgaaaatatgtgaagaactcttctaactcaacaataaaaacaccaaaatccaatttacaaataagcaaggatttgagtagacatttcttcaaagaagacataaaaatggacaataaacacatgaaaagatccccaacatcattagtgattaagaaaattaaaaccaaaaccacattgaaataccactttatatccactaggatggctataattgaaaagataaacaataacaagtgttggtgaatatgtggggaaattagagccctcgtgtaatgctcacaggaatgtaaaatggttcagctgcttggcaaaacagtttggcagtactttaaaaagttaaacattgagtttccatataaccagcaaccttacttttagacccacgtgtctactcatagtgcatatccaagagaactggaaacacatccttacaaaaatgtgtacacatgtgttcatagtaacgttactcataatagtcaaaaagtagaaacaactcatgtgctcaacacttggataagcaaaatatgttttcatccacaaggcagaaggtgattcagctgtagaaaaggaatgacattctaatgcatgcctcagtatgaatgaacttgagaacaccatgcttaagtgaaagaagccagtcacaaaaggcacttattgtatgattccatttctataaaataacagaacgggcaaatccatagagatagaaagcaggttaatggttgccagagatggaggagcagggaatggaaagtgactgctaatgaatatgagatttctttctgaggtgacagaaatgttttagaatcaattagtggtgatgagtatataatattgtgaatatacaacaaaacccactgattatatatgcttttaaaaggtgagttttatggcaagtgaatttaatcttaattttaaaggacaacttaactctacctgatatcaaaatagagtatagagcaatagtcattggaacagtgtggaattggcacagaaacagacaaatggatgtctgtctcagtgggctagcacagagagtacaaaagtggcaccacaaacatactgtgggcctttgatatatgccaaggtagcatgtcacatcagtgagaaaaggaaaaatggcagcaaagcacagctggctctcatttttaggggaaagttagcattgaacctcacagtcccacaaaaattaattccagatggattaaagagctaattgtcagactataaagatagaagaaaataaagaagaacatatttgtgaccctgaaaacagccaccttgagctatgcaaaaaatgcatgaagagagcgacaaatgcatttagattgatatacactggaaactctgaacaaaaaataccataagcaaagttaaaagacatttcccatgtaataacaggcagagtattaatatcctgagtatataaagaacttctaaaattaatatgaaaaagctcaacagaataataaatgtccctgcaaccccttaaccctatcaccctcctttcatcgccttttagatgatctgagaattttgtcatctacgttgagaccaagagatcatcttagcccctttcccatggtggtgtctggttttcttcatgactcaattgcatctggtgctttttcttagcaaagtcaaggtgggttttgttgggcagaatgactggacaccaagctctgcgctggacaaagtgcatgactgttgtcgtgtgtgaaggagctgtgtgctaaggagggtgcagtggagacagactaacacctgagctgctcaaaagaggagcttctcagaggaaaccctgagaagatgcatgtacctttctctgcagagacctgcacccagctggcgtccagaggatctgagtgaggagtactgagtatactcagccacttcttgccagtctgccacttaattggggctgcagcataacctttgctcgatgataaaattaaccttgattccggactgatatctgtcttcactaaggaagtgtctgtgctgtggtttctttttgtaagctgtgacattatcaaagaatagaatattgcaggcatgacacacgggaacttttgtcttagacttagaagaccttcctatttttctttcctgccgagatagactttcagctctcaattgggtaattcagtgaggtcccctccttccttcttcacccccacttcctctcatctgctttcccgttttcataagccacagatttaggccttgttttattacatttcacagtgtgcttaaataccccctacagttcttcatctcattacaaaagacaatttacatgagggtaaaatggcgatgtcaatgtgatttgttttgctgctggattttgtaaaacgttctgtatcagggctttcctgtagggtgccagagagacaagagtgaaactagggttcatttaaaaaccgctgttggtaatctgtaagtaaatcagatattcccgacatagaccctggctgggtcatgttgggctttgcattaaatattaagactgtagaacaatattttatgcaatggaaaattctatagttaaaaacaagaggcagttgatttattataagtgggcaaaaatgtgttataactgaaatgggattctctcctcctcccctttagggtcactgttactaccatggacatgtacggggatattctgattcagcagtcagtctcagcacgtgttctggtctcaggtaagtggccatgaccatggcggctctagtcttcagccatctactgcaggcaacctctgtcttttcctgctcgtgctaaagcactgagagtgagtgatgggggctcccagctcagctacacctccacctaggcaagagaacacggaggccctctctccactgcttacaagagcatggccacccaggatcttagcctcatgttcatgccccctcttacagtgccatcctcaggcctggtggggtaaaagcgactgaactggttgagtttctacatccaagcattttgtgaattattttccatttatgtggctctgatgctttataattcccagtgctaaaagatagaacattacataccaatgttgaagctgctggcttaatgtaaatcttaaagggcctcctctcattaggaaacaaagtaaggaaactaatttagcaacaaccaaggtgagttgaatagaggcatggattggtagggggtttgctactatgctacgggcatgatgcaggaaacaattaccttcccatgctagacaagtcaaccccaggtgttactcacagcccgcttccttccacatcacagttattggccatcaggtggcccttatgtgctccccaggaaaatcattttgtttgataaatttccagctgtttcagcctttttactggatttgcttatcgaatttgtgaactaaatgtttgtaacctcagagtcctgggtaactttggcccaaggcaccaaagcatgattccatgggagggaagagagagaaggccctggaaggatatacctgcttgagttaaaaagcagaatcacattctgcgcatcagcagttcctgtgacgtctttgcaggttctgtgtgggatcatggaggatgagaatatgcatgtgacacacacaacaaccacacacctaccagtttattctttgctgccctcacttctactccagccagcagagaatgagagttctatttgctcacatgttccccattgctcaatacatctgatttatctctaagtatttaccagcgttggtcctttcatgtaactaaaaataagtacacaaagctattcctcttcctcgttcatcccgttccagtcccactcagataaaaatgcaagctgggaattcccctcccagctttctcatcccttgtgcatgtaaacacatagtcagagattggggtgtgtatttgtttatttttacaaacatagagtcacatcatatacatcattctacggctttcttttgtcacccaaccctgtctgtctctccaagttagcagacacagacccaaatcattgagtgaacacacacatttgcatgcacacacacatttctgcatacctgcatttttttaaaagcatttttatgtcctatttatgcaacacaattgaactttaagatgtctgctactctgaaaagtgaaggaggtgccttgtggtttgaatttgcttctcttcagttattcattcgttcagaaaacattccttgagtgcttcctcattgccagttctgttctaggttctgggggcacggcactgaacaaaatgcattcttcctggagcacttcctagtggaaggaacagacaatggacatagagtaagatacatgatgtcaaggatcatggagaaagacaaagctgagatggaggacaggaaaggcaacaggtagtcagggaggttcggaaggaggtgaggtgagccctttagatgaggtaggtagcatatcagagagaagagcatgtgcaaagctcctgaagcagaaagatgcctgggatattcccagagcagcgaggtggccagcataactagagtggacagggacagggaggcagtagagagaaatgaggtcagaagggaagtggaaaggtaggatcaccaggggtcacgaaggtgatcagatgtcctttggcctcccccccagtgatgggtgccagggagcttggagctgaagtgatgtggtctgacttcacatttttacaggggcactccagctgccaggctggaaatagactgtagggaatgtgcacagaagcggaggcttgggtaggtgtcttcagagtaactctggtaagaggtggtggggcaggcctggtcaaaggtggcaacttttgtgagagtcgagagacctttccacgggtattagagaggctggcgactctaaattttgttagtgatctgtgtcttaaagtcactttcctgaggaagcgtggggtgtgagcacatgaaaggacctactgaagatgcagcaaaatccactaccaggcagggactccaatacgcgtacacgcccagcatgcagagtgggcgctcaggagaaggtgaagaaggagagtttggaagtgacaatttagagcaaagatgacaactgttcaccaccaaggagctgaggtacatgagggagaaattttaagtaatgaagtatcatcctgagaggctgcaggggaggtgatatcagtggaatcagccaggattcagctaggggaaggaggtaagaggaatattctggaagagatttggatcaggataggatttgaggatggaccatgagccccaagagcacagtggaaagggttagggaaaagggagtggggatagggtcagtagaggattaaagacttgtgggggataaggggccagttttcatggaaaaccagtgcttgaattcctggaggagacagagatgagggggtgaaatgggatcagacctggtggcatctgaggtgaaggtgagtgaccaattcaaaatggatactctgggaccccaggtagatgttctcaccctagaacatgatagtcagggtggtgaattagctgtgtgacgatggacaggtcactgggcctctctgagccccagtttgcatggtgggaagtttgcatgttcaaacaaagtttgagtttgtttctcccctgtgatgggtgccaggggagaaacagtaaacaaatgcagtgacctctaggaaagccaagccctgtgcccacctctagtgagcatcatgagacagtctttgttctttgattctgggactggactagttgagggggggggggtgttcatgcagcactcctgggataattccttgcaaagctttgcagctcctgtagagaccagggcagagatacacaaggccatggtagtaaggaccacacacacttggaaagggaaatccacactttactattgtgcctctctggggcctgaaaggtggacctctttcttcaaaggtcatgtgttgaaggctggatattttcagccttcaatttggcattaaggtcattgtgtgtaaagaagagaaaagctgcccgggggcgcggtggctcacgcctgtaatcctagcactttgggaggccgaggcgggtggatcacaaggtcaagagatcgagaccattctggccaacatggtgaaaacccatctctactaaaaatacgaaaattagctgggcgtggtggcatgctcctgtagtcccagctacttgggaggctgaggcagaaaactgcttgaacccgggaggcgggggttgcagtgagccgagattgtaccactgcactccaacctggtgacagagtaagactccaactaaaaaaaaaaaaaaaacacgaattcaaactgacttaaagaaaaacaaaataatgtggagataggcttatgctactgaaaaatctaggcatggctggatacagggtcctagctaatattatcacggtctattttctatctcaagcctctaccttcttctgtgttactttcattctcaggcactatcttagcatgggctgccatagcaaaataccatagactggttggcttaaaccatagaattttatttctcacagttcttgagcctggaaagtccaagatcaatgagctgacaagattgatttttcctcctgaggccttttctcttggcttccaggcagtcattagcttgctgtgtgctcacgtgacctctctttgtgcgtgtacagagggaggaagctctggtgtcccttataagggcacgaatcccatcatggggcttccctcatgatctcatctaagcctgatcagctcccaaaggccccatctcccgataccatcacatgggggccatggctctaacatatgaatttgcagggtatataaacactcagtccataataggcagttgttgttttgttttgttggcagcatgaggcttccatgctcaaaaagcaagaagaagaataagggcctctctcccaagctcagtggaggtcatctaaacacatcccagtggctctgactaggccactggctcatctgtgaaacaatcagagttgtcagtggggagcttagtagtctgatcaaacaggttatggccctatatcctggaccaggttgagggaaaactgcacccagggtccccgaggcagggagcagggaaggggtgaatgtaccaaagaaatgcaatgagcttttgccaaaaaaaaaaaaaaaaaaaaaaaaaaaaagaagacagctgagagccagggacactcagaaacaaataggcctcttccagcaacaattatgaagaaattcccaattatcaaaactgagatcagccatcaatggaaacatccaggattggctggataattttcaggttatctttatagggctatcagattcttgatgggcaaagagaaaaggattctctacaaggagttcctaatagctcctatttaccttaataaaacaacttataaactagtgacattaactcattagagtgacaactggggaaggtattcctagagtaatatccaagcaagacaaatcctcccatagggcttggccttgccactcagtcacaaccctccatccctcttcccaggccagccctgtagtcaccgtgtgccaggcacgctgccttagctctttcagcctcccacaaaggtgcagggcaactgtcagggttgccagttccttccgcatggtggtgacgacctcgctggccagactctgcagtgtctgagtctccacatccaccccgcatccccaggagcaggcacagactcataaatttggcagaaaagaatattgtgaaatccttgcagctgggatttcaggaaaagtcagaagagtaagtgctgcattgtctggtgtcagccaccaagagggaatgggaatggtgatgaggaacgctgtgtgggtctaatgaactcctcactgtgggcgcttctgagaattttgacttcccagatctttgtgctgttgttacaaaagcagcagaccgtgcatcaacagagaaattccgcagctgtacagtcaactttatgatctttcaagtcaagaatcagaccagggtgaggggaagctgtatctgatcaactgctcactgacagaagaattgattgagactggaagtaaaaggaaaaaaaaaaatgcaactagagtagccccagcctgctagctgttaagaaagaaaatggggattaaaaattgtgttaaatgtggtgtgctccagaaacatattaagatctaggaacctggagggaagctggggtgtcctagaagacacattaattacagcccaacagattccagttttgcagcgaaagaacatcccacattgcttcaaaaacacaggatcacaaatcagcaggaagaaaaaaactctgttctagaacatagaagaaggagggaattaacaagttgtttttcatcatttgaagcttgaagcggaaagcacacggagacaaaaacagcacaaagatctcagtagaaagggacatgaaagaggagatggctcttgaatggagggaatgaagtacaacatggaaaatgggtcgtaaaaaggagttcagccatggagtttattcttactttgaaatgactccaagtcgaatgtgaagttgaggccatacgttaattttgtcccgtatcgtatgtctcccatcgatgcgcaactcccagttaatacggtttcggtgaagtgcttgtgattctcctccccctttttacattctggttcccaatttgctctggtggcttggtgctctcattcctgccagccagggagcctggaggcacagccatgagcttcagataatctgcaactctgcagggcacagacatcaaactgtcactgagatgggaagagaatccagctcctggcccagaggaaccgacccactgtactttgtaatgggatagacgtccagccctgtcatgctcctgctggggcatcaaaacagccatgcacccgtcttctgagtttgttcctaaatgccacgttcccactgcttcagctcctggctggagcatgagctcctggagggaaaaggttgtctctctctaatttttctggttctcttgccccgctctctcagctctgactcaggtatctggcaggaggagtctcatgggctcttggcattggaatgagccccaagtcttcatcacctgcaggcacagaggttcgactgaagctgaatttcttcagggcctacctgtgctttaaaagacctgagccaagctcacttgctagatgaggaagtggtatctcgatcagatcgtacactagagactggttgtcatcatagttatttcctttttaaatggggttggtgacacctgagcacgaggtgtcctcacactcacatgcgcaggctcccacttgcacacattcccacacgcgcaccacacactcccatgggcaggtgcccacttgcacacattcccacacgcgcaccacacactcgcacaggcgcccacttgcacacattcccacacgcaccacacactcacatgcgcaggcgtccacttgcacacattccgacacgcgcaccacacactcacatgggcaggcgcccacttgcacacattcccacacacgcaccacacactcgcacaggcgcccacttgcacacattcccacacacacaccacacactcgcacaggcgcccacttgcacacattcccacatgcacaccacacactcacatgcacaggcccccacttgcacacattcccacacgcgcaccacacactgacatgcacaggcgcccacttgcacacattcccacatgtacaccacacactcacatgcgtacccactctgtggggtgctgatgatagttgcagtaggtcatactttatttttcttcattgttatgattcctgttttcatgagaatggggcagatgttattgtcacctgagcagccaactaaggcatggcatcctcaggggcctggagttcgtttcccaacccccagcattgctgtcatgcagtttgcaccttgaaatcgccaccctctcaaagccctttgccccatccccatatcaccaggtactgacccagctcacttcccttcctcatcccagctgcagaccggggcctctcctgaattggcacctcacctttccttgtcctcatgggaagctcacacaagccacgagcaggtctcatgctccttggtttacaggtaaaaagcagagaccacaaaagtgacttcctcatggcctctcagtgataatgggcaaaactagatcttaaacccaagcctggctgacccccgttcaattttttttctggtaaacctcttgcataatttggatccaatcttctttttcagtcccaccatccccttcctgaggaaaccaccctattcccgccatgctgtttttttggctgtttccagagcatgccgccacatgcgtggtgctgcccctctgcctgggacacactactccctgccctcccttttgactttggaagatccactcttccctcaaggcccaagtcaaacactgcttcctcctccaagaagcctctcctggtgtccccatctcctcaccatctggctcagccatgtgctgtcatgcatttcctcatacattgtagttctggtagcatagcaggtgctttgtaaatatgtgtttacgtccctgtcttaaggcccctatccttccttgcccatgccttggtaactgccatacctcattctacgaggtgcctgcaacgtataggtctaacacccagaaggtcaggtgcatggaggtggccttgccttcaccttcctgtctgctacactgggagttccaggaaggcagggactgggtgccccaacacggctgtgtcctagaccctggcatgttacaagtactcagtaagtagtgcaggaatagatgtgccctcccaaaggtcaggcagttcataaaccttaattttggccaatccactttttaaaaactatttaaagtgcagtagaacatatgaaggaggaaattggcatggaatggcggtaaagccactttgaccttcacctttgcacttgtggtgctcgctccatcagcacctgtctgactagcccacctggctctcctccaacctctggccaggtgtctctagccaggtttccacactgcttcccttctcccttctgcttcctcccatggagatctttggacatccgggtaaactcctgtgagagccatccctgggggcccacctcagctgtttgcagatattgttggacatgtgcacgagtcagcaagaagctttgacgtgcatgccacagggatccactggccaccagccacggtggttttgccaggtggcatctgctctgaaggagatccaaggtcaagtctctcagctctccccaggccccactgtcactcaaaactcaggatgtctcaatctaaactcctctgggtaggtctccagactggctctccacctgacctcttgtccagaaggtccacaacacctcgagtctataagcctgaccccagggagatttctgtaacctattgtatccacccaggccctgcacgctctcccctatagcgtctccttcatccctctcttctatcaccatccttgttcaacccccctcttagatttgaaaattgcctcccccactgtgcttctgtctccacccctcctttcattgccatgttgcacattctagaaggtcatgttttaaaaacactactagatcatgtcataaatcctgccaacccattgcactccagcccaccttggctctccatggcttacttgtcaaagcctctagttcagtcttatgcttgttcaatagtcctgcaaatatttagtgatcacttactcacctactggtcacgtgcaaactgcaatgctggttctaaaaaaaacaacgaaaataaggaaactattccctgggtgtgtaaagggagccagatatcaatttaataaaatgttgttagtgacaggaagcaggttgcacaaaaccacacgaggaattccgcagaagggccctagatgctggggatcctgaaggaagggttggctaacctggacctcgaaggtcactcatcagcctcgaaggtcatccccagcattagtgctgtgcgtgaccctgaagaggaggctaaccatccagtctgatgagggcaagtgaccaggcccaggagccaggtcccaactgggacatcttggctctgctgctgattggctgtatggctgtgtctgtttcatagggctaccttcacaaactgccataaactaggtggcttcaaacaacagaaatttagtctctcactgcttttcaggccagaagtctgaaatcaaggggtcagcagggttggtttcttcagcagagtctacggaagaatccctcccacatctccctcctcgctttgggtggcttctggccatccctgctatgccttgacttgtagatgtcactcccgtttctgcttgcatctttgcttggccttcttccctacgtctgtgtgtctcctcttcggtctcttctaaggacatgtgtcgttagatttatggcccaccctagtccaggacaatctcatcttgagatccttaatctaattacatttgcaaagtcccttttcgcaataaggtcacgttcacaggtccagagattaggacttaaacatatcttttctgggggctgggggggacactattcaaccccctgcagtgacctggggactctcatctttattttcctcattagtaaaatgggctcatgttatctgctttacaggattgctgtaaatattaaagaaaataatatattcctggctgagcacagtggctcatgcctgtaattccagcactttgggaggccgaggctggcggatcacggggtcaggaaatcgagaccctcctggccaacatggtgaaaccccatctctactaaaaatacaaaagctagctgggtgtggtggcacatgcctgtaatcccagctactcaggaggctgaggcaggagaatcccttgaaccagggagtcagaggttgcagtgagctgagatcacgccactgtactgtagcctggtgacaaagcgagactccgtttcaaaaaaaaaaaaaagaaaagaaaagaaaaaaaaaaggaagtaatacattcgagagcctggctcatgggggccatgaaggatcaagagtgactgctgataggtccagagttttggggggaatgatgaaaatgtctgcaattagatagtggtgatgtttgcatgactcagtgaataagctagaaaccattggattgcatgctttcaaggagtgaacttaatgctgtgtgaattatttttccataacactgaaatttaaaaaaggagcctgactcagggaatcttttcatacatcatagctgctattattattattgatgtgctggtaatgctggtaataacacttttctttttcttttttttttttttttgagacggtgtctcactcactgtgtcacccaggctgaagtgcagtggtgcgatcttggctcactgcaacctccgcctcccaggttcaagtgattctcctacctcagcctcccgagtagatgggattacaggcacgcactatcacacatgctaatttttgtattttcagtaggaatggggtttcacaatgttgcccaggctggactggaactcctgacctcaagtgatctgccagtctcagcctcccaaaatgccaggattacaggcatgagccaccatgcccagcccttggtaataactattcttaatgtgttttatcacagtttaaactcttacctcctctgtcgtgctcccacaccctggtcatgagatatatttgaaatgggagccacgggcaaggggtctttgtatgtctagcctagtgtctcgcgcatagtaaaaggataaagaatatttgttttgactgtacctgagtagttcacatggaaattactgaagccctgtggtgcgtatgtgttaagtaatactgctgccacgactgtttatcaaacatgtatggggtgagatattacttttacccaggagttgctccaaaaaaaaaaaaagccgaaattaaatttcaagccaactgcttttccaccacatgattgacagcaccacactgagaccaaaagtctttttctaggaaattcagttagcagttggacactgagctagccaggataattcatgttttctaatcatcatcttattacaggcagtcaaaatccatgtgccactgtcctgcttgccgggtgcagtcaaaaaaatcaggatcagacattaagcggccccggtgcctgctgcatcgtggctttggagattaaaaactaattttcagaaggacaaaaacttatcttgaggaaatataggtctcttgagtgtccactttgaaagctaaaataatcaactaataaaattttaatagattcctctttgtttcctgtcaaggaaaaacaacaggattttacatgttaaaggaaggccgctggttttcaaagcagcggctccattttctctttctaattctaattctagtccttttcatttttaattctgcttttttcatgctcctgctggttctgggcccctctctcaaaactgcacaaagggaagcaggcgagtgtggggttgagaggcccaagcccggggcacacaggtcccgcctgggtccccagctctgccacctgcgcaccttggacagtggggtcatggcgggagctgcagccatggtcagcagagtgatcagtgtacggagcgcagcccagaacctggatcctagaagagtgccacaggggggtgaccctgaccaccctgagaacccccttctctctgccccagaacttggcctgagcctggggtgatggctgggccggcctcctcctgtcgctctagagaagggacccacggtcttcatctttcccaaacattggagactttcttctcatcttttccccctactctacctagggagaaagaaccccacacgcaaagtccactggatttaaattccatgctctgagagtcttccaacttcaggtttacaactaaatatctgtgacattcaacttaaaacaaattacattcacttatctaactcagggccagtaagggctgtgagaacatcaaaatgtatctcagaaaccctgaatgcttcaattttgtgtccactgttgtttccagcaattctttagagctaaatgattaattatacccaagacagtccaaagcaattatttaattaagcttattataggctgccaattgtttgcagtaaagggaaggccttcatcctgatttctcaacatctggcctttggatgacttaaaagataaaagaagataagagaatatttttacgactaagtaacaattgctagaaatattccactatgtagaaaaactttttcagtaatttgcttctcatgattagaatgtggtgacatgttttacagttaagtgttcagcttatttagatccgatgtaaaatagaaaatgttgcaatacaaaatgaaatgttactgccattttctttttagggcagaattgatggtattcatttccactttccccttgcctgtttttgttttttttgtttttgagagggactctcgttctgtcacccaggctggagtacagtggcacatctcggctcactgcaacctctgcctcctgggttcaagcgattctcccacatcagcctcccaagtagctgggactacaggtgcgtgccaccacacccagctactttttgtatttttaatagagatggagtttcgccatgttgtccggctggtcttgaactcctgaccacaggtgatccacccacctcggcctcccaaagtgctggaattacaggcgtgagccaccgcaccctgcctccctttgcctatttttttaagttcgcatccttaataaaatcaactttaataaacaaaaatcctctcctacctattccaaagttagaagtctacattttatttcataaagaacatctcagagaaggagacacaagccaccccacagagttgatgaccaaagtaatccctgaatgatctgtttggtgatatacgtggacaccagtgtgggggaaggcaacacttcatagaatgacttttagtcaatctggactttggatgacttagaaggagacatgagaacattttcatgactaagtaacaatttctacagatttgggatttgaaaatattgaaaaatgttttagttgctccaaaccacattggaccccttcttctctgaaggattaagtgttacggttcttcaaatgcacatcttagctctcacaggatttctaattgtcccggatatctcgatgctgccttgtctattaggataccagtatcctgagcatgatagatctgtttctcccattgcccatgacaactcataaaacaggattggtggagtaagccagttaaatactaatgagttgattagtctgtatttgcttaccagttgtgttcaaaatagatacttgactaactcaagcctcttccttccgtatcatttgagcgttgagatactgtcaatctattaaaatttaagagttgttaaatactacctacgaatgggccatcaatgagcataggatgatgaatgactgaacaaatatgtaagcagtaatgaatgacataggaacaccttacacagtcccttctttggaaagaagcttagattgaggaaaactgatggagtttgcaacttgaccagctattcctcgaggattgatgtatacctagatccttgggttgctgcaatataaattatatattagaactaattattatataagattatatattattatataattatataatatataattttctattatattatatattgttacatattatataatttctgatatataacatattgcatattatataatatgcaatatataatatattgcatattatataatatgcaatatattatatattgcatataatatataattgcatatgtaatatataatatatgttacatgtaagataatatatattatgtattgcatatataatatatattacatgtataatataatatagtatattatatattatataatatatagtatgtatatactatatagtatatatactatagtatataatatatatagtatatagtatatatatagtatatagtgtatatagtatatatagtatatatagtatatatagtatatatagtatatagtatatatactatatatatactatatataatatagtatattatacatctaatatataatatatttaattatattgcatataatatattatattgcatatataatatataatatatattatattgcatatgtaatatataatatatgctatattgcatatgtaatatataatatatattatattacatatgtaatatataatatataattatattgcatatatattatataatatatattattatatattgtgtattattatatattagaactaatgccctaaacctcattccatttacatagaccttatcctcactcctgaatttgctaaaataatctgcaaaattttgtggttatgtatgttggggctcagaaaatgataccccaaaatatggatctttgacatgctgaactgaaggaaaaccctcaaggtctctctggcccctggcacccaccttcaccccatctgactctccaaaagcacaggatgaagttgttctctgacattcccttatctgcctaaactatagaccctccaaaaaagaaataaattaccttggtccctctctgagttttcattaactaatgtcacaggaagaaagactgaagcctgtcaacacatccagacagacttttgtcataaaccgttgtctgttctgcaggcccaacagactttgtcccaggccattgtatgttcttccagcccaatgaattcccctaaaaatcatttactcaccccctaaaattatccatacttccctatctccctttctcctaagaagaagggtgtataaccatctgtgcccccattgagtaatcattcttctacaattcacctgtgctatgactgttaaaataaaattgtatgccttttctcccataatatttctgccttttgtcagttgatttgtagtgaactttcagagggcaaaggaggacattttcccttagcccctacaggtatgtatgtgaattattctaggaagagtctaaggaggttcatgtctcacaaaaggttagtagtcactgtattagaagggtccatttccagtcagatgaattttacatgaaaattttgtgtctttctaaagtggagagatagtggtcacctcgctaaataacataaggtactagacacatgggaattcagagatgccagtttgctgttacccaaattgtcatttctccaaagaaaacctttctctcaacatcaggaagcaccttttaaattaaagcacttcactgccccaccttagcaaagagagaaatgaaaaccaagctgcaggccgaggttcccatcgtttgaaggaacccgacagcccaaggctagcattactcatttccaggcagtgggatgtggccttagctgtgagctccagaaggtcagacatgtgtcatggtccatggctaaatgtcaccttctatctctgcaagttagagtcttcagcaaatttgtccatttttaaaaagaatctatgctttctttcccaaacctaaagactggctcaaaaggttctttcttagttattgtcattcccagaaatgtatttatatttttaatgctatattttatatcacagagccatgagtgaccagtattcctatgagcagatgggttaacaaaatacagaactttcctgaagttgtcagtctttcagttaacctgttaacagatgcctaatccatgaatctgcccttattaatagtaaagaaagctaccatctctcaagcactgacctggggcctcccctgggctaagcgttttgactcgatgacatagcaaccctgagaagtaggtaccattatccccattttacaggtgaagaaaccagggctcaaagttaaggtcacataactagtaagtaaaaaactggaactcaaacccagagcttccagactccagaggccacccttgcagcgttgagactggcacttctccctgtagtgttcttgattccagaaagagctgaacacaggatccagaggccggacctcagcctccaagaagcagtgctaatgttctgtgtacttaagtgggttcctttattcacacatctcccacaaattaaataagtaaataaaaaaatataaatttgtactcatggtgcttataattccatcaaatatttagggaatagggctgatcaggataaataattagatgtaggaattgtccttttataaaaagatttcctaatggcttttggagcaacttggatggaactagggccattattgtaaatgaaataactcaggaattgaaaaacaaatatggcattttctgacttctaagtgggaagtaagctatgggtacacaaaggcatccagagtaatataatggacattggagactcagaagggggaggccaagaggcgggagagggatgaaagaatacctgtggggtacaacgtacactactcagatgacaggtgcactaaaatcctagacttcaccattacacaatttatccacgtaaccaaaggctactgtacccctgaggctattgaaatattttaaaagtaaacattttccttttgaaatgtgtctgctaattcagatacagttatcttctaagcagttaaaacatctttttcctcattcttcttcccggcaatatatctttgagacataaaaagagataaaaacatacaaaagcaaaatgcactgtattctttaccataaaatatttcaaacagaagaaaattcctaggctaactttccaaaagatttgccaaatgaatcaatgcaaacatatgtcacagaaacgtcctttccaatcaaaatctgagaatataagtaaattggtgtttctgttttcattctctctcttgttaagaactgtgtcttggccataaacaagaagctgtccttaaaattatatattttttcttgtttctttttcaacaggggacttattgtgtttgaaaatgaaagctatgtcttagaaccaatgaaaagtgcaaccaacagatacaaactcttcccagcgaagaagctgaaaagcgtccggggatcatgtggatcacatcacaacacaccaaacctcgctgcaaagaatgtgtttccaccaccctctcagacatgggcaagaagggtaagggggatacctgattttgtgtttctggaaagctaggagctcaagctacggataccccacactaggacatctggagaaatgttgccatctagatgatgcggcatctgggggatggaagtgcccagtttatctggaggtggtagacattatacagtgggacacaaccataagccaaatccccatcactgtactgcagatgtcagtctcagactcattaaaatatgctgaggaaagtcacacagttgggatcaaaggatgacaaaattacgcccccccaacttctacccccacaagctcaagattcatggaatctcccaagagaccctactatggtcctaggcccagggttgggcgccaccatgacaagcaagacaagattggaccctgacccactctctagcagctctccatctactggaggtgaaagactacatagagccttccttattagcaagtttgggttcttataatttgcagagaattctcactctttgcctacacacttatgcagaggtgaactgggccttcctccacgtgatgtggctcaggaatcttgcttatccacagtccaagctgcaaatgcttgtcctagttccctcctgggaccgtccaagcagtctgtgttttctggccaccagcccctggatctgctgataaaatgtcttcctttttgcagcagcactggaaagagtagttgcctaagggagtctgtgctgcagacagacttcccttcctgacacgtgtagtgtcacaccatgaaacctccacccctaagggtggcctgccccttttctctctggcattatgtgggcaacagaggctacagtagagctcttttaataaggattaaaggcaatcgttcccaacatttggctggaggccctgaatttaaatgagcagaaacagataggaaattatcaacaatttcctgattttccatttctggatttcctgttcctctgttgacaagaaatcaagaaaatttatagataggatgtcgcttgtgcttatatttgactgtccgagaacatttcttctaggtttctcctaacccgttgttgtctcctaacttgaatttcagtagaccactgcttagcactcaatatttaatgaatattattcttggttcattctaaatcatttttctagttggaaacagtaggggttatcccaaatgataccttctaattcttagaattcccctcatacctgtggatagatgtctgttcccctaaaactgctcttatcggaaccagttcaggacttttaactctaattttacattcattctttcagtccaggtattctacttgtgtaaccctcacgtcttctgtttgctagtatgtttctaagactttctatggcaggtgctcacaacctctttttcgtttcctgccccatcacaggaaggggaggaactctcccatctggtactgtggctcaccttgacatggctgcttggtggcagaacactgtatcctaatcccaaggaacagagcttgaaaattacccccccaacctctacccttacaagctcaagagacttttcaacttgtgcttctccccgcaacctgtcttagtggtggatttaaagatcagcctctggggtcccacggcaggtttattttactcttcaaatgcttttgcctttgattccaaaccttggagaagatgtgattaagctgtagctttaccggtcataaacaagtagaacatttgcattttgttttccaggctctttgctttgagtaccttgttgaatgcacgttgcccacgttacaagatttataatttgatggcttaaatgacactcaaatatgtttgtcgtttcatatagaagtacacacttggtctgtacttgccagccatattttaattcttttagcttacagctttctagaagcatgattgtaatttccagtcattttgacttgtggagaaatggggagaatgggaataacaacggtgctttgttaataatgcatattgaagtgcaaatgaacctttaaattgaaaagggaaggcatcaatgccggtcaactcagttctcaatatttctctctagaaagcactgtgatggtttttatggaagagaaagcatcctggacttaaaatgcatgtatataatgaaaatggtgcgaaaaataatttcaaatatgtggaatccttgtgaattggaattatatagtagattgttttggttagcacctacggtaaatatgaaagggacatttcctgccccacttatgctgcctttatttcactcttaaaaaaaaatcaatagaaaggctgctaactaatcttgtttatgcaatgcagcaactgcatttgctttttccctgcatttttctgcccccactaaatgttaactattgcaaagactggtttgcagactctgatttttctgcagatgtttgcgtttttcttcacagagcatcaggaataaatctgcactcagggtatacactggctgtgatataaacctgagctattgtttgtcatttttacaaggctccacattagattttagtgagaacccaggctgcccctcgaagggcacagagaaacagggagcgtcacagtcagctcgttctctctgtggatttttgagtctccatcctgaagcctccttactgttcagctcccccacagcagactccttccctctccatcggctactcattcaagaatgcaaactaattttaacatcatcctaagcaagctctgagcaaggcaaagatggtaaatctactggagaaaatcacataagacatcccaaaggcaaatgcaaattatttttgaattgccttttctttagggattatctgtgccattgttcccctccgttagtatggataattatgagtcaaatagaaaagttgctgccttctctgaaaagaaatgtttgcttgggtactgtgtacatataggacagcgagttggggaggtgctgttttgcttcctcgaaggtggccattctgaaatgaactggtgctattgcttttgtgtttctagacagcctatcgtatttgtttaatagaaggcacagtagtggtggggtatttgtagccatagcagtatatagcacattatatgtagagcctaatgagagttgaatatcaggaactggccagaactgtttgaaaactccttaaatatgacaggcatactgaattcctctctaacaaccatccttgcttccatgcctcttctaagagactatcatgttcttttactaccttagttgttcttaaagcttggtggtgggggctcacgcctgtagtcccagcactttgggaggctgaagcaggcagatcacctgaggtcaggagttcaagaccaacctggccaacgtggtgaaaccccatctctacgaaaaatacaaaaattagcagggcgtagtggcaggcacctgtaatcccagctacctgggaggctgaggcaggagaatcacttgaaaccaggaggcagaggttgtagtgagctgagatcatgccattgcactctagcctgggcgacaagagtgaaactcgtctcaaaacaaaaaacaaaacaaaagaaccgcttggtggggaacggggcagcaccacttccttggccctgggctttgaatatctatttatgtgagtggaggctccagttttccaggtgtggattcctagtgagtttcaaatccactgaagctctggataaataaataatagatctcacttgtgccattcgtttttaaggcttaatttcaatacttcacatttctccctattaacattcagtttgccggattcagcctgttctcctggcagaatgtctcatttgtttacttctgcccgcctacatgtcggccaggtgtcagaggctgtatcctgtgtggatatgatcagtgtgtgctgtccccatgccagtcacggtcaaggatggtagagacaacctttcctaaccgaaattggagctcaacttacaaatacgcagaaagtgatgttagagtcaaggcatggagcgttgcttgcttgagctaatactgattgttttcttgcctagaggaagagaaaccaaacttttgattcatttcatttgctgatattgctggcgatggacactttggctgtggtctcattgtgattgttgttttctcgctgtcaggtgatagcacagctggcttgcatgtggctacccatgtccatcatgactgtcacctctcacctggacgactgcatggcctccttgctgcactctcagcttccagtatcatccaatatcatctccctagaatccgttctccttccagtagccagagcaatatattatatatatatatatatatatatatatatatatatatatatatattttttttttttttttttttttttttttttgagacggagtctcactgtgttgcccaggctggagtcagtggtgccatctcggctcactgcaacctccacctcccaggttcaagtaattcttgtgcctcagcctcccgagtagctgggactacaggcgtgtaccactacacctggctaatttatctgtttttagcagagacagggttttaccatgttgatcaggctggtcttgaactcctgaccgcgagggattcgcccacctcagcctcccaaagtgctgggattacaggcgtaagccaccacgcccagttgcaatatttttaaaatctcacattcaaggcccccatgctcttagattattaggctatcactcaacctccttgccatggccccagtgtcctgtccccatcttccacctcctctcgtccactcttgtccgccattcgccagactccagccatacggcctgttgccaacacccacaagctctccccagcctcaggacatctgctgttgccattccatctacctgaaacactgttcccacaatctttccacacatgcctctttctcatccttcaggcctcagctacctttggcctgcccactgcccagcttcatcctacctgcagaaccctgtttatttcctttgttgtacttttcacagactctctctttctttcgttaattctgcatgggctcaccttctcccaggccccaccagaatatgagtttcaggaggacactggatttcccgaatatgggtttcctgaatatgagtttcaggaagacactgggtttcaggaatatgggtttcaggaggacactgggtttcaggaatatgagtttcaggaggacactgggtttcaggaatatgagtttcctgtccacactgtatccccagcaccctacacagggcctagtgcaaacagcatccctggtagatagcatgggatgaataaatgttatacaaatggtctgacccatatgaagaaagaattgcaatgaggatttattatagccccaatgtcaacttgcttttctaacttgagttaagttcccattgccagagtcctcattgcaggctgatcgggggttatttatcctggggaacttggctgtgatgactttgagaggcccaggaactggttctttcttgagcaagattcaaagaaggcctctgcctccacctgggaacggagacttttgggctaatcccagaggctgatgttcccgtttgaggaagggcttttgttcataaccccccaaaatgaaaatccagtagagcaaccagtttctttttttaaattttttaaaattattattttaatttcttctttaaaaaaaaaaaaacaggatacatgtgcaaaacgtgcaggtttgttacataggtatacgtgtgccatggtggtttgctgcacctactgacccatcctctaaattccctcctctcatcccccacccctcaacaggccctggtgtgtgttgttcccctccctgtgtccatgtgttcttattgttcaactcccacttggttctctgttcctatattagtttgctgagtatgatggcctccagcttcatccatgtccctgcaaaggacacgatctcattcctttttatggcagcatagtattccgtggtgtatgtatataccacattttctttatccggtctatcagtgatgggcatttggattggttccatgtcttcagcaaccagtttcaaatgttgctctccatatcacaaatttaaaaacatgattctttgttgttgtttttttaactggacagccagataggtggaaatcacgtggggataatgtaaacctctctctgtgtgtgcagctaacaggagaataaacctccgccctgagccggcgactcccccagtgcttctctttattatgtggttaagcttccctctgagcttgcagttctctgaattcatgagaaaatgtagacttctctgaaaattgcagagacaggaaaattgtgttcacatgtttgtttttattatctggaattgtgtattttctaaatggggatcttaagccagttggaaatatcccatggtcgtttatttcacccctctgcaggctgaaaagtgtaaacgtctaaacaaccagattcctttccatgagcttttcaatgagagattagtttttcatttctagagctatattttcttctgcataattagccaaatttttttaatgattaattagggaattatggacaacagagagggttctgcctctttcacgcctcaatgaggaaaaagggcaagatcttcacactttcagaaggtgtctcattttgtgtgcacccgtgggcaccatgggggcaaatgtcttttcttttataagtaacgcatagttatcaccataaagcatgcctacaacatatagttacaaagcgtaacagtttcttcttgtaacattgtaaagatatgagaaattgtacctttcctggtgctttatttttccttttccataaggtttccagatatctttaggaacacctaaattcatgaattagcacagctgggcagcaagaaggaacactgctataatacaaacatttttcttgtaaaagtctgtttggaagatcccggactgatggggatttgttttataaaagatgtttccctcaggattatgtgactggaaacctgattcaaagcatacttttgtgattttcttttgcttttgtctgaaagagtggttataacatgcaagttttaaacttgaagcagtgtgtgtagttaactcataaaccagcaatatcagtcatcaggaccaaagaccaacttaacccccacttcctccaactgcattttatggcagaaacagaaggctttgttttttgtttttaatgtttgctttttgagaccaccctccacgaactgctttatttctcttaaaaatgcatttggaattcttccagtaattcacagaagagtgtgaatgctttttgaggaagtttgattaaaatgtgatccacttcaggagctgcctttgtgggggacggggttcctatttctgctgcctgaatcatctccattcatccacttccatatccactttccatgttctctcaactgtctcactcttacgaaatccctgttctccaggggcatattgcagtcttagttttttcttaactctgtttctttccgttctctttctctttgctcttttttttttctcctcatacctttctcacttctctgttcattagtctgacagtttccttttctccagaccaccccggtcttccattgcttctaactagatttttacattatcatttaaaaaatgattatacagttcctgttcaaaatgtattctcctccacttttcttaagtctcaaaacaggtacacttggaccataaagacaaagggaacagccacagtgcattgaactccgtcgtcttctctgatgaccttcaaatgtggtcatcagagaagacctacacgtggtctgaaataaatgacttttgactggctcctgttctagagagtgctttggttttgtttgtttatgtgctcgttttgtttaataatcttgatttgctgctccaataatccatgattcagcagaaagcttaaactcctttttaagggttttccaagtggaaatggaagctggttactcatgttgagaaggttttacaaagagttggttggagttggggtaaacttctagatggaatggaggtgtgggggcctggcggggatgggggatatacattctcaacctaaagtgtttagattgagagacattgacagtcttaatgccagagaggcattaagagagattaagtgcatgtttactcttggcagcataaaagagagaccctcaaggcaactaagtatgtggagctggtgatcgtggcagacaaccgagaggtaagaactttttaaaatttctcagtatggttggttagagataaaagaaaaaaggacatgttttgcaagttattacttgctttaatgaacctcatttcctatgtgctcttaaaagcaatggaaacaacccattgaaacaatggttttctgattttataaagcatacaatattaaaaatttatttgatatataaagtaatggcaaagcctgcaggaaaaaacagagttgctctatagctcagctctccaaacaaggagaattaactgagaggaatgacagaaggctttagattatattctaaaacattttggggaaaagtttagtctttaaaatgggacatttaaaaaatatcccatatgtcattaatcaaaatgaataaatgaaggtatgaatgaaggctatagagacacagcagaaaaatcctcccctctgagctatagcttgatactacattcattttttattttaattaattttgaattagtttttctaaagattatcttctctgtatttactgcctcattggcatatatgaattgggtgattgggtgatattttctcatagactctttcaacacctatgaatgaaacaggcttgactatttttcagaaaatgattcccattctggaaggtcagattagagaggggaatgggaaatttgttgatttttttgtctattctcctctgtattgtttgacaagctgccatgagcttctatgacttttactttttaatttttaaaaacaaatataaagaaaatttctcaggaagttaaaatcaagttgatgatatgaaaaatggctttggactgacttctagttgtctgtttcctctttgccaaaacaagtcactgcctccatcatttatgaggctggaaaattgcagaagttgctgtcttgagagcacttggcttaggcaaatttcagggaatttcagggagtccccagccgggaaagttagtcggcaggatgcaagctcattttaccgtgaactgtggagggtccccagtggtttgtaaaatcccaagacttcacatttccagaagccaggaagatgaaacgtgattgatattcttgctggtattaatgctgccatttaaaattgttaagtttcagaggcaaggaaaagatctggaaaaagttaagcagcgattaatagagattgctaatcacgttgacaaggtaagttctttttcagtagttaaatcattcagatcatgtaaatgtttggaaatgaggttgggggacctcatctgacttagcaaggagatgaggttctgcctctgggccttggtttggaactgtttcctgtcctctgagtgtgtaattcctgggtcctggggcagcttcaggagatgccaaaccacagcagtctggactatggtggccttggtgacatgtcttcctccaggctctcttccggtcaggtggaataccagtctgagggtgttttggacttcccgattagctccagaacccctacagagttcacctgatcctttggattcctcctgagccgggcctctcccaggtctcccgatgacggatcccacaggccccttcaatctgtccccatcattgcaggcctgtaccaatgtaaccctgagggtgggcttgcatttataagggatccataggcttcactgtcctggaacacagaagttgactttcagctaaatcagctattggaaaatccctcgccaagaacaagtaggtcagaaactcacctttcacaaagatgatttccttgctggaggagcccctgcaaaccaggtcctactcctggggtacttgttcactaaccgctcctcacactgcgggccggcaaagaaaatggcagcgctctctgtctaaaccacctgtccttcctcagtgtatcctgctggagaggatgttggctatttgctgctgacgacccttagcctaaaataggcttctcacaagccccgcatattggagttgccctgtgagcttctgaaagcattgctgccctcaaggggcagggcgggggggaggttagacctcgaattttcagaagctccccagcaattctcatgtgcaatgtggatggtgaccgctgtcctaaagcaaccatagtctctcagcaatactgagtctcttgcctgtggggacagtgtgagaagggatctggtcatggctgagcctttcacatccatggtcctctgaaacagcagattttacacatagtggtttgtgagggtgcctcactctagccttgtttccaagcaatcttattcgatttgaattgcattctctaagttttcagaaaaatgaaggcaaaggtcctttcagaaattcggctccatattacaagaccttatgcactctgcatcaataattcagaatgaatcagatgtggtccctccacttgagaacgtcaaggctgtgtagggaagcagacatgcaacccacacagcatggtccaaggcattaagaactagatccatgctatgaatggaggtttatggggatgcagaagagaatcacttacttcttcccagggccagggagtctttgcagggagaggatcctcaaaggtaagttcagtttcactgtgagcatagcagaagaaggagtatgtgtgatgtggacatgtatgtgcttcatgtacatgtacatgcatgtgtgttcctatatgtgttcatgtgtgtgttcatacgtgtgtgtgccctgcatgcatgtatgtgtgtttgtgtacatgcatgctcatattgtatgcaaatgtatgcatgcagagctagggcaggaggagatgaagctgcaaagattcacggtgctcaaggccccggctgttctacgaagccatcttgatgttattctgcagtgaatagagagctaggtgaatgtttttaagcaggggagagacacacatgatagtagaaaaatattcctgcagttagtgtggagggtgggataaccaaagacaaatagggctgagaggagcctattgcatagaaatgataaaggcctgagcgggcgcggtggcttacgcctgtaatcccagcactttgggaggccgaggcgggcggatcacgaggtcaagagatcgagaccatcctggccaacatggtgaaaccccgtctctactaaaaatacaaaaactagctgggcgtggtggcatgcgcctgtagtcccagctactcgggaggctgaggcaggagaattgcttgaacccgggaagcagaggttgcagtgagccgagatcacgccatcgcactctagcctggtgacagagcgagactccatctcaaaaaaaaaaaaaaaaaagaagaagaagaaaaagaagggataaaggcctgacctgacccagggcaggggaagtggggaagtgagaaggacaaggattgagagaggctcgaagggatgtgtttcctgattattatttttaccagttactgtgtgccgggctctaagtgctttgcacacactctcaggtacacactattgttcttatttttaaagcagaggaggctgagatgggcagaggttattcatttgcaggacgagggatgagtgctagtcttgccaactcccagcagcaggggctcttggctttgactctactccccctactgtgagtcccgggacctcatgatgaccaagcagaggctgagggcgagtgggagaccacatgaccgccagtttcgttggagtggaggggcaggtagacgatgcttcataccccaggaaagggggagcaggaagaggagtttgaagggcactctgaacagtcagagatctgggtttgccactcagagagaggctatggctacatggaactttctggaagtcagaaaaacccacatggccgttgatatcctgggatgatattgcccttgtccacctttgaagcaggtcaaacttcctggcaacccctgcctgttgatgtgttttcagtagttactctttgcagattcaactttatcccatagtccaggtgcaggagaatcctggtgaaaggcaaatcctggcaggggggatgaagggtgggtcttagaggagacatcaaagatagcacggcagttagaactggacctcggtctagactggacattagaacccctggaggggagtttgtttgtctatttgtttatatgtttactttaggaaatattgattcccacaccttggcccagggattctgatttgattgacctggcacagggcctaggcacagatattctccagggtcctccagttatcctaacatgaagtgggactgagacgcactggcctagagggcggaaggcttaggtgcctgagctgggagcgcaggtgccactccaaggtgagcgagttggaccattgccccaacggcctcaggctatcctcagactgtccaacgagaagaaaacacgagttcttcttagacctcgggagcaaaaggaaatgataaactatattaaacccaaactggaaattgctgaagccccattttaaaaaagggatgtgtttgggtcctctgtgtttgtatttcttcacatttattctaggttatatcttgcttcagtttgcaaaaccaaaaatgagcaattaggggtttgttaataacttgcactggtaattaaaaaacactgtgcctcggaaaagtcctaacggactccgtggagtttgccggcctggctgtccttgtgtttctggcagggagagagccgatttgctgagcacacagctacccctggccctgacatccctgtccatccccagcagacgccaaagaccttggaggagatacccaggccccctgggagacttggtgcttccaagtctatgaacagatgactcccagctctgttacacaattctaaatttcagtttttcaactctacaaatgaaagtgtctcagtccagaaaacaacgactgtgccagtggcaacttcctcatttgctgaagtcttggctctcctggaccattctaacttaataactgcttgctgcgtggagaaagaggacatcctagactggaaaacagacgagtggtttagtgatgaaggtgacattctggaatgttcaggaaatccccccatgagcaaaacacagaaggcatgtctgacactcatgcttctaggccagacgctgagaattttccccgggtcctcattacattcccacaggagcccggggagtgcacctgcccatggagctatcgtggagtttgcatcttccacccttcacctccagactgtcctccttattcattaggaagttagtgtcagctgcaaattcagggacctgcttctgaaaggactcatcgtctatgtatttaatttcttttctttctttctttctttttttttttttttttagacagagtcttgctctatccccaaggctggagtgcaatggcgccatcttggctcactgcagcctccacctcccaggttcaagcgattctcctgcctcagcttcccgagtagctaggattacaggcacccaccatcaggcctgactaatttttgtatttttagtagagatggagtttcaccatgttggacaggctggcctcaaactcctaacctcaagtgatctgcctgcctcagcctcccaaagtgccgggattacaggcatgagccaccatgtccagcctctgtgtattgaatttcttaggatattttcactcatgtgacagttttcttctcctcctgtcccaaaccagttgcctgaaggatgcagtttccttcattagaccccaggggattccgcctcactgtttcttcccaaaagtctccagtgcagcgtccctggacttcctatgtgcaccactgcttggcagttcactgtattggagttaactgaactgacagttcagtgtgccatgccttaagcccctggtgacctctgagcatttgggtggcaggagcgagggcatccaaatctttgctctctctgccactgccggcccagcccacagcaagaggcaagaaaatatttgttgctgttgtgtaaacaggtgaatcgcttcagctggatctctgactgtgtccacatatgttctgggctttgtaagtcaggcaggcagctgccaagctccatttgtacagcagaggcccgtgagcttctctccgggcctggggtcacagtgggccgtcttggaagggagtcttagtgctcacagaagatggcagtgttacctagtgggttcaaacatgagcgtcagggttagctggcctgtgttccaaccccagccatggagttgcaatcttaagtcacctgacttctccaagcctccgtgtctttgactataaaatagaaataataataattcttaacacatggagttgttttcaggattaagccacagcacagaaaccaccgtggcatcatgcctgtgatgcagtaatgctcactaaacattagctgtggtggtggttattaggaagaatcaaaaggaacccgtcagcagccctggaaagaacttttagagcaggcagcaaaggcatcatgtatgatgacttgatgtgagtttagcataaatgacagtcaaacaatggcactaattttggagaggggaggttgtctgttatattactactaagtatgaaatctgttctaaggatgtggtttgagaagcctagtaggtggagatgcaaaacccatcattatcatgaaaagctccttgatgaggaagcagcaaacctagcactaaggaatgatgacaattagtcctttgctgaccttcattactggctccatgcaacactcctgggaggcaaacctagtgtctccttcccagatgccaaccctgagcccacgcaaggtgtctgaccccaaggacatctcttagcaagctggtgtgagcatcagcattggatcgcctccgtttctgctttctgatcactgttacctttgtatataatagagctgaaaatgtaatctctcagtggacagcagccaaacatgtgcattcagagttccagagccggccaggaacttactttcgccccggaagcctgggctgggagtttgcaagtagatagcgtgggccatgcaattcttgattgaaaacaaactgttgggctgtgttgtagtcatgtaatcgtctcgttaactcattaatgtaatgtctgtaattgtgatctgtttgaaaccaagttggaccaatgcaatcagcatatattctgtgatgcactttgtatcctggtcatattctcctgctaacccaatgctcaccagatgactgtggggaccagcaagggaaaagatgagctcaccttatgtgggttagaatctagggtcagatgttcaactttgagcagtttcttctactttagttcaccatgttggaatggtgcctaactagcaaatgcagaacttctataagttttgttattggccagatgcttccagcaactgagaataggacctgctttcatctggtgcttggctttggctgctatcactagccacccttttctccgtggctacctgggatctcagaagatgagggctttctccctgtgtgctgcctcatacactaggggcattgaaagatttgacagcccaccaggtgacaccatgtcctagccccctcaaccatgagtacaaagccatctgcttgtctatgtgatgcctatgaggacaatgggtaggtcatacctctaccctgaccgctcatcctggccctctgaactcctatgagacaaagccatcccttagtccctggaggagttgcttttccctgccctgacccagaacgacctgcctgtaggtgtagtcaggtatgggccataggctgaagtcaggaacacccaaagatggtgggggcaggcaggggagtgagaagtcttgctttcagtggtgtgccggatgctttgtttcacaggcgcataaaagaggaacttcatttaacagacctttccatgacactgttggtgagctaacttctggctgtggggaggatagtcattaatgttcctgaagaagggctctgtttatgcctttgttattctgaaagatattgacttctttattttattaaaacctgcgttgattataggtgacagaatatgatagtgttagccagagctgagactttgctgaaaaattaatacagattcattttcagtaactaataagcagaacattttgctcaaaatgaacaagttattgtccttggcagaagtgtctgaaagatcctaattcacttattgtttcacttgcagtggatattaactggccatctttagctataatacacatctgtatgtacattttaaatcaccagtgagtcatttgaaatgtatgcttccatacaaatgcaagtagacagtaaaaaagctgataacttcagcatctaattggtcaatcttcgagaacctagttaacacatcactttgcattaggcactgcaaatatttcttaaattccaacaccacaggaaccaaagagcacagagatatttttctcacctgtgtcagtgaccctcaaataacgcaaatctgttctaattttcatttcgagtttttattaacgtgatcccaactccaatgccagttttgcctgttttgcccagttttacagaccactgaacattcggatcgtgttggtaggcgtggaagtgtggaatgacatggacaaatgctctgtaagtcaggacccattcaccagcctccatgaatttctggactggaggaagatgaagcttctacctcgcaaatcccatgacaatgcgcagcttgtcaggtagggagttacgtcttgtctgcttaaaaaaaaaaggagtgctctcggcgaagcccttcgtttcacctgcacagccccaggagctgccacctttctgcagagcacactgccttgtgcaagggggcttctcagctcacaccaggggggcagatgccaccctcacctggaactgaaggtctgctaggaaagtctccctctgaacaccctggaaaacctgtccctctacagaactctcatttccttcttctagaacccggacattttcttctataccaatttttctgattttagctgtgatgtaaagttgttctgagtagcctatttttttgttttgttttttgtttgtttgtttgtttttgagacagagtctctctctgtcaccaggctggagtgcagtggcatgatctcagctcactgcaacctccagctccctggtttaagtgattctcctgcctcaacctcccgagtagctgagattacaggcacacgccaccacgcccagctaatttttgtattttttttttttttttttagtagagacagggtttcaccatgttggccaagatggtctcaatctcctgacctcatgatccgcccacctcggcctcccaaagtgctgggattacaggcatgagccaccgcgccaggccgaggagcctgtttttaaagattcatcattattagtggaaaatgtatgtttatacaatatctaaggacagtactttgggtgaatactgtcagattcctggagggaaaaaagactttattcctcctcctgttgtggctgtgactctttggttttctagatcagagaataccgggaagcatagcacattaaccttgtgttccctctttaaatcaatatgcatcacccgttaggaaccaaagagtgtttggggggctttgaacacagtggtgaccaacactgtaaatctccctgctctcagaagtctccactctactgagagacaacaataaagaggacaatttcagcaggatcaactggaagatgataaactaaggcaaagcatagctctattataacacaaaaattgttgagatgttgccgatgcttttatacttaaaaaaaaaaggaacaatctaaattagtatgaagtagatgtttctagaagtgacaaatttttatttaaatctttaaatactttgtgctattattcttttgttgtcatgtggcttatagcacagaaaggaaagcttctgggacagagactttcctttgacaaacccaatgtagctattgaacatttgtggaaagttaaaaaaccagtcctaccccattgtcacttcagaaaatgcctacgtctgaactgaggctgttggcattctttgataatttacttcggccattttcacagggttcccccctgcccctacccttggatatttgtggttgcctcacattttatgcattgattagtcttgaactactaaaagtacattttatgtattttgagtcagagtgttttgatatttttcccaaatggagtctgtccaacttgaacatctggaaataaattatcatcttatgtaactttattatttatatacatgtataattatatctgttcatatagtctatatagatgtaaataaaggccgaaatttctaccactgtaaatataagtatagtgggataggtggatagagagggagggagggagagagggagggagagagggagggagggaaggagggagaaggttttatatacacttaccactttctgttcaattgaccatagctaaaatatctaacttttcaaacaatatatctgtatacatacatggccaagatagcattggtaagtcatttgactcctttaaaggaaattcaacaaatacagcgttttgtttttcatgcatgaggttggaattaacagcacttgtgttcaacaggcccttggtgtcattagattcatgatcaggttaagattccagatagaaggacgactgcattgaagccatgaagtccccttccagaagcttcctccctaggtgccaaggctttgtgggtgctcacttgttctacaccggctccagggttgataatttttctgcccatttcaattttgcaagctatcttagcgggacaatttgaaagaatttgggtgtctggcagaactgtagtaagttacccaggaaagcagttaagctatggtgaaaatctagtaaaccatctaatgcatttcttttagttaacagtgattctctgtgactattttcagcctttccatcagcagacattgtttaaatggagcagcttcctacagtccattaggaaataggcagattacaactcataagtacaaaagtaataactagttgtcatctgagtcttgaaaacaaaactctaaaaaatgacagaaccatgacgcaactgcagaaataaaattttcagggaaaaaagataaaatcacatgtgaatataccctcatacagctatttttatttttgcgtattttattgcaggaatatccaacagaatttttaaatattagagaatgcccccgttctaatttgattaaagaaagtcctctcttttatttcctagtggggtttatttccaagggaccaccatcggcatggccccaatcatgagcatgtgcacggcagaccagtctgggggaattgtcatggtaagccaagggcattgggagctggttccccttgataatgattccccaggaagtcactacttttatcagactttgtgaagatagatcctttcctttaatgctttttagatttaactctatttttactgtagctgtatttataattttatatatcccacagtgttttaggaaccatttaaaagcaaattgcacacaggaaaggtgggcatgtaaaatagctcagcagaggcaagcctacctcttttatggagaaacattttcaaccaggactttccaaaccaggaattcctcgcagcactggggtgagccagggcattggggttgccctcgtcatgcagctgttgggacgccctgtggtctcaccagacgttcccgtttggatggttttctgatggttctgtctccaagcccaatggcccaaagtctgaggtttttagctttttaccactgcaaatgctttacatgccttctggccagtatacagtttgtctttaaaataaccttattcttggaagtcagaaacccaggtttattgctttacaaggaccattttgtcatatataagctatatatgtttgtgaaaggaaatacagtgggaaaactatttgggtctcgttatgaatgtaggagggaggtagctttgataggcttgccagcagggggcttgtgctccacttcatcagataattaaaggagaggttttcaccctatgctgtccctgctctgaaaatttagtgtctcctctgcaccagacctcagacagggagtatcctcagagaccattcttccatctccattaaacaaatagaaccctgccctcccaagaaactgtgagttcctccatgttttttaaacagaacatgtgtgaatgttcagttgtattacatagtggaaggagttatgttctgctgatgattactttctctccacctactgcctaatcagatattcttcatgaatatacggaaccaacatttccctcttctgtgggttcagagattggtcattaatgtaagcctgcactaagggtcaaagctgcgtggagggattgcccccacttactggatttctggcttgagtggtgactgccttgttttctgtggacctggaggccctgcatgtgatctccaccatggcaggtccttggcaagtttggtttttgtgatgccaggttcacttcaagtcagatcccaactctatttttacagagcagactgtacatttttaagagggaataattttctgtttcatggttccatggtcagttgctactgactttgccacttcaagttggcatcatattttttttagagctggaactcaattcttcataagcatggtaagttctgctgctgtgcggtgctgaaatgggcctgtaacccatctcaccagagtaagcggctttcttcagctcgtgtcccttattccatttccatacaagcatttgatgaaaattccttctttaaaaggatacagggaaggctatttttaaaaaaggtatatgaaaatgaatgtgggaaatataagcaaattatgtgtcatgcaataagattcaattgaagatcaaagttaattatcaggaaatatgttttagcaatttgacagcagttaacatcatccttagacacactgcttacacgttccacatataacagaaacatcaaataggataaaaatgcctcagcacctttgatttctacaaaagtcatgaaatcagcaagatcaacatcttgaccagaccaaaaacttctagactcactttcttctcctgtgtctgtaaagttacattcacgggcatcccgtgtgactgtgcttcattagaggaccacaaatctaagaggaaggaatcaatgtagcaaggaagcagagatcctcataaaattgaaaacaggattgtagtaccatttctgtattttccaatatagagcaaatcattaattttagtgactgaaagtcattcctttttatctaactggcctaaaacagccttgctttggaaataatattaataacatgaataaagagatattttttcttactacaaatgtaaactgtttatcaaggtcttttaagagacattctgtttataatcattgatgcatgaaagaatgtaaaacaatctggcaactaaaaaccaagacattcaatgacacaaaagaatcagaagaatattttttaagggtgaattccttgaattttgtgccagagcatggtaacttcagcccctatgttcttagactgactacattctcttcaccattgtgttattttcgagaaccgatttcctgaaacatatttgtaaacttcctacaacaggaaactctaaaatctaaacaaagtaatttattaggaatttcatctactgtaagattatcttggttccttgatatgctattgttttcttagacagaagcctcattgtaaacactgtcaacaaacctgtaagatcttacatgagcacacttttatccaggagcctcacacagactgtatcagtgtgctctctgaaattcagtatcatatttgttttagcccattttctgttgattctaacagaatacttgaaactggataatttataaagaaagggaatttatttcttacagttacagaggctgagaagttcaaggtaggggggcacacctgatagggcttcttgagggtgaggactctctgaagagtcccaaggcagtgcgggggatcacatggcaagggggctaaacaaactagctcaggtccctcttcttcttataaagccactggtcccactctcatgataaaccatgaatgcattaacccattagtccatgaatggattaatacattatgagggcagagtccccatgacccaatcacttttttttttttttttttttttttttgagacagagtctcgctctgtcacccaggctagagtgcagtggtgggatcttggctcactgcaagctccgcctcccgggttcacgccattctcctgcctcagcttccagagtagctgggactacaggcgcccgccaccacgcccggctagttttttgtatttttagtagagacagggtttaactgtgttagccaggatggtcttgatctcctgacctcatgatccccctgcctcagcctcgcaaagtgctgggattacaggcgtgagccactgcgcctggcctgacccaatcacttcttaaaggcctcacgtccaatactgccatattgggattaagcttcagcatgcgttttggagggaacaaaccttcaaagcatagcagcactgtttcttggaagcctcttggaaaacatcttatctctttcctaagtagcacaaagcaagattcaaacagggtattttccttactccatggtatacaggccttttcagaaatgttgtatataggcactgtttctgtagatcatatatgctaattaactaatttcagtttgtaaaagttaagtaactatattttttagttaatttctagtatctgtttgagccaagccatccaggcactccactaagttaggggtggccaagtagtgcttgttgaatggagaagccgccttccatatccaagcaaaaggttaatgaacccccagccgcaagagtcagagaatcgggacacctcccatttccaaagtctgcctggcaacacaaagagccagcaagaataagatatagctggtttataatcttaaatgaaatgaatggctcttcaaacagatgactcaatgtggtcagatttattatgaagtattgtgaattttccaactgtcctccccgaccaagcacacaggaagaggcaggctcaatgacaacctctcagggctcatttagaatgtcattaagcgtgcttgcacctgtcacctttatatcagcatcatctcaatcaaaggtaaaatgatacttctatggcccatgaaggaatgagcttttcctatgatgcaggatgactttttgcttcattcaatggaagagttttgtggggcaattgtaggaagcagaatggagaccctgccttgaagatgtcatgtaaaaacataaagaatcacacatgtatacgtgcggcatacagacattcctcagccgaaaggaccccaaactggcttaatgaaatgtcaaattatatctttttaagtttaaactaaatgatagcgttttaccttggtcccttataaggaattacattaagtcaaatgttaatgaaaggtatatttctgtggggagggagacctgggaaataaggccaaggagatatgaattatacacctgtacttttgtgttttctttgaggaccattcagacaatccccttggtgcagccgtgaccctggcacatgagctgggccacaatttcgggatgaatcatgacacactggacaggggctgtagctgtcaaatggcggttgagaaaggaggctgcatcatgaacgcttccaccgggcaagtaccattgcttccatctgctttgacagtgtgcatggcttgaagtgtgtgttgggaaccagatgagtcaaagtgtctctggttttctggtcagagcacccagggaagcttccaaaaagtaattccttcccaagaagcaagggtggcctgtgctactctggagagccatgggcagccagatggcaatgctacatggtgtgtacaaggaagagggctgaccttttccttgaggaatggtgggcatggatgctgtctgtgtttagaaatcgctaattatcttcctgtcccagcaagtgttttttatttgagcctacggctccagctgccaggcagtcccaggagccagccatctgaaagcctgggcagtggagatgggccacatgtaaactcactgggcagagtggagatgggccacatgtctttagagggtgctgggtagaaggtatttctttccccagggttggccctagggtgtctctgaagtcggtagcttgggggtttgtagtgtctctgccctgacatcaccttaccagatcttagaggtttaaatgaaatgatttctctgctttggtatattacaatgctgttccttatttaatgctttcctgacactcccgacttggttcaaccagaaaagagcaagacagttccattatttggagtgttcaaacgaagtggaaacagatgcaccttggagggattagagattcagatgtgttcttatatctataaagggcctatcccaaactagaactttgtgctagtttaagaagattctcattagtaacgggaagcatgcgctggatacaatgctatcttctttattataccttgaaaccttatgaacactgactttcatggaacattccagcccaagcctgctctctgggtttcccaaaaggagacactggggcaagaggcaagtgctctgagcagcccagtgactcatctctgtgaagacttgctggccaggggacaagcgtggtgtgaggggatacctgctactgcggtttaaaagacccagtagagggaggaattgttaaagaatgtgtctgtgctttttcaagcaatagccttgtgggcctcctgggaaatagtttgtagggcattgagttgcccttgaaacaagaactgagcagaaccacacagctcatcaggggattgtcctttcatgggagccatcaggaggcatcttcttacagcaagtgactgattcctcatgttcatcgcccccatttgggcagaggcttcaggggcatctttctgtttgtggttccctcttaagcataattcaagggagtcaccaagactttgttgaggaagttgctttgtgagtgtgtaatgacagaaaccaaggatctgtacacaaagtcaaagtactaaccgataggaaatgaaatattgcaaaactcaagatactaacatgtgtgtctctccaaaagggaggccaccctaaaaagtaatatgttcctagtcactaaaggtgtctgagaggaagcacagtaattgtttgctggacatttggggcaaggatttccttcttagggtataaggttgggccaagggcctatagatgccttctgtttccaacatttcacaagccctgatcgctatgctgggccacacgctgggtgactttcagacagtgagtttggcaggagactgatgtgcaactgagtggccttcgtgttttctcactctcaatgaactcatagccatagaaaatgcactgtgtgtctaatttccctgatcatcagatgggcacaaatacattagcctatgggcctccagaaatggtttcccatgactaagaagatcatattgttaatattgttaatgttttttaattattgataaaccaatggaagagaggaaaacctagatcaagaacactggacttgaagagatctggttgtcccaattctcacaccattttttaaaataatataggcagtttagtaaccccctggctcttacattcctcatcaataagatgagtgagtcagtcttcatccacccatccaaccatctatccatccacccatccacccttccttcctcctttctttccatctgtctctccacccacttgttcacatattaaacaaatatttttgacccctgtgctcgtggggaggaatgcacagatgatgaagactctacagctctaaaaattatataattctgaaggcacaatagcaaggcatattttctggcactctatatggttttatctaaatcctttccaattggaaagtcttcatggcagtgctgaagaatgcaagccagatcgccccagagatatttgaacaccgtaggtagaaatggtattgttaagagctcgacaaatcatttaaaaggcttttttttcccccattaccaggggtttgctaatagcctttatttgatttataccatattagcaatttctgagttttctcttttgctgagcttgtgcttttgtataaatcttttctatttgcttctcatttatgatcccacattcctgtccagagagtggtgtttttaattttctcagatggaaagcaacttcctaagcaagtaggtgaattaatcacaaaagcccacagtgagggggaggtcgagcggctcagtcaaccctcagtcatccatcacccgtggtggagttttcccggctgctccggtattatctcaaaatggtggttctcttacctcatagtgtctccgagagagtgggagaatggactcaatgagatcacatgtctgtaaattgtaaatcattccacaaaggtagtatattattacttagcttacaggggttttggaactatcaaaaagttaaaggcttttttcagaattcctactcatcattgctggaaagactcccagtgcccttagcagtcactcagcagcatgtccacagtttccgtgtgatggctcactttaaactggcccacatccaaacaccagccagcctgtgtcttcctcctcccaccactgatggaggcttggggatgtcagttaaattcagtctcagctccaaaggtgattcagagatgaatcagtaactgctttaatgatattaacatctcagaatcaaaaagaaccaagtattgtagatggcttaaaggagaaaagtatatcccttcatataccttgtttattctttatcaaaacattccagaatcctaactctgaaaacattaaccaattgctgtcactgacaaatgggacctgaggcctgtaaatacaaggatagagtcctatttcaacttaagacttgtgtgacttcagttgcacattgcagggatggttggagggggttccttatggattgtatcattaattactgcaaggctttaagtgtgtgtaagagtgtgtgttttatgtctctaaacatttaagacctgtcctggaaatgactctttggcaaaagcagtatctggggattcatgtgggagtttaactcagttgagtttatccattaatgagcttggagcccttggtcttagggaggtgagggctacgtatgctgcatttataggagtaagaaaattgtgaatgacttgaacactcatagcaaagaatatttagcgtaatagtaaatgtcacttcctagagtaggaaaaaaggcaatattaacattcaaaaaatgactcttacagattcctttttttttttttttttgcagaaagtttctgttaaatgagagttggaggaatagggccatctcctcgggtggggtaggtgaatctgcaagtcatattcaccgagcccctgccactgttacacactgataggtgttagggacacagctgtgaacaggacaagcctgtttcttgccctcttggaactggtgttctagtggtgaaaagagttgaaaaatggaaaatttaaaacttgcagtttgggccaggtgtggtggttcacacctgtaatctcagcactttgggaggccaaggcaggaggattgcttgaggccaggagttcaagaccagcatgggcaacatagcaagaccctgtctctatttttaaaataaaaaaataaaagtaataaattgcaggttggaaggagtgctgtgaaggaagcaaaggaagaggacaaagagaggaaacatggggtgagggagcccactttaagtgggggtttgggggaggccaaaaggaagacagggatggagagcctgcaaagcatggaaggaagggagttcaggtgcaggggaccatgggcctgtgggcgctgtggggacaccttgctgccaggagccttggggctgtggggggctggagggaagtgatgctgggtagaaatggaggaaccagagccagcaaagcccagttggccagagcaggaacgtggattcttatctgcagagcagcgggacatcattgaagcttctcaggcaagataggaatatgatctgatttatcttttaaggtttcctcatttttaagaagaccatgcagcctctgagatattgtagtttgccaagttaaggggttttctgtctgtacaaaaaagaagagggaggcttcctttagaagaacaagtaataatagtgtgtgaattctagtttagttctggtgtaattcataggcatttggaaactgtgaagaggaaggatccttcaccagcacactcggtgctcatcacgccacgctccacactcacctctccagccttgtacacttgatgtaaaatatttcttttggtttgagatttctttttccttttcctatagtgagcatcctttagggattctgtcagagagccaccaaggagcacattcacattttcttcatgtgtatctgaaaagaattgttgccacagttgtcacacggatgctgaaatcaggagtttgggcctgtctgggttttgctgggtctatactggcaaatggcttcaactgacgagtgtgtccccagctgccaactgggagttggggcgggcagcgtgttcgtgttgtgcactgaggataatgtgggatgagaaaataagcaaatgagggttaccccctgctctcctggggtgcaaatcattcacattaagctgaggtcagaccttctgcaatctacacccagatcaaatgaccacgtttaaggagaatgtgttgccatcctacttccccgcaagcatgtataactggcccattcgattacatttaattccattcaggacacattcatggcacacctgcctggacacggaacacaaacagatgtgtccccaggtctaggtggcctccacccaggtcagccttctctctctctttttgtttttgttttttgagatgtagtctctccctgtcacccaggctggagtgtgcagtgacacagtctcggcttactgcaacctctgtctcccaggttcaagcaatcctcccacctcagcctcccgagtagctgggattacaggcacacaccaccatgcccagctaatttttttttttttggtatatttaatagagatggggtttcatcatgttggacaggctggtcttgaactcctgacctcaagtgatccgcctgcctcagcctcccgtagtgctaggaatgcaggtgtaagtgaccatgcacagcctcggccttctctaatgacatcagagaagacagcagccctgcccctgactcaggacaagcttgctacaggaaatgaggtcaacagacgcgcagctggccaccaggcagagcaaagccactcatttactccactagtatttactgtgtaccctctagaggccagatcctggggagcagtttcggagcaggcacagaaacacaaggcaggatccttgacttcagggacctcactgcagggtacctcatcaaatctgcttacacagtccgggtatcaagcaccatctagaagtgatttcagtgtgggcctctaaaagacagagagaaaaatctataaccataacatcatttcacatcttttaaaaagcgaccaataatttattgcaaacagggagcaaaggttagaagaggcagcaggcagaaaagatatcctggaatagagtccagtctaaaccgatctcggaagaattaaatacaggctgggcagaccgctccctgaaaattcctacctcatactgtgggaaaactggatttctcttggaagagatttctgcctgaaaaggtgttttaagagggtaaaatgaactgcaattttcagtgaaaaaaatcccccaagggctttggaagtggtaggaattgatagaaattcaatgtagcgggaaagtccacactctgtagaacttgctttcctgaaaatcagtggacaatacatatcgttagaattctccctcgaactttggggtgctgttggagattatgaaatacatttgtcatgctggaattttaccaagatggaattgaagggaattatttttccatcttaactcttcatttgagagtgataatttttttctcaatgaaaagtttaagaaaatcttcatttccttcctcaaagtgttaggtgaaaaaatggaaatctttatccagagagagagaaaaaaggaggaacagctacagaatgaggaactctggtaagatgaaaacactactagttagaatcaatttaattactcagccagagtaatggagtcagctgtaccccgacattatcacagggaaaaatgaactggcaggagggattcttgaaaacagttcaagaagggcgcatcaatatgcagcctgttcttgtttcttctccatgtaattagatattgctcactggaaaatgaaagaatttgtgtgcaattccattagaatatgaaaagctgctgcccaagttagaattgtcctccccgttaagctgtacacaaaatagaggtcaagctcgggaggctgattctgtgtggccactgatccttgaatatccagtttaggggatattgaccctgaaggactgcattcatggtgtcctgtttcatcgatgaactttttaaatttaatttaatttttttgagctgagcctcgctctgtcacctaggctggaatacagtggcacgatcttggctcactgcaacctccacctccccagttcaagcaattctcctgcctcagcctcccgagttgctgggattacaggtgcacactaccaaacccagctaatttttgtattttagtagagacagggtttcaccatgttggccaggctggtctggaactcctgacctcaagtgatctgtgagcctcggcttcccaaagtgctgggatacaggtgtgagccacgcacctggcccatggatgaacttagtgagatggtcatgactatacctattttattttatatatatatatatatatatatatattttttttttttttttttttttttttttttgaggcagagtccattggggccatctcggctcactgcaacctctgcatcccaggttcaaatgattcttgttcctcagcctcccaagtagctgggattacaggcgtgcaccaccacacctggctgattctttgtatttttagtggagatggggttttaccatgttggccaggctggtctcaaactgctggcctcgagtgatccacctgccttggcctcctaaagtgctgggattacaggtgtgagccaccgcacctggccaactatacccatattactggagctcagagtgttaaatgaactgcttgcatttttccagaccgacctaagtagaagccccaggacataaagtcaagcggctttttcccagtgtgtttgacacatggaagtggccgtgaacacatctgggctttatgagagaactaaagctgcctcagtacagagccatgtccctgtgcaacctctgggaggtgggaggtagccccatttttaagccatttaattctgcaaacctccttcaatttatgttccaacagcagagaatgctttcctgtcactggctcgttaacccagcattttatttgttgtacagcatgtgtgaaaacatttcagctgaaatcctgccaatcctgcaatccccctcccacacacttacccccatggcttcctcctctccccaggcacagaggccacagtgtagggtaaaggattatttctagacttctctacaacagacaatatccaaaaggactcattttcagctccacaaggtcaggaatttgtgttttgtttattgctgaatccccagcacctagaacagtgcctgacacatagtagagctcaataaatacttcttgactgaaaggatccatgagcgggtggctggatgatggatgcatggatgggaggaaggaaggatagataaataataggtagatgggtcagtggatgaatggataatgggtgggtggaatgatggatggatggacggatggacagacagacaaaggatggatggaaagaaggaaagatgggtagatggataaatcaatgataggtaggtggataggtggatgaatggataatgggtaggtggaaatggataatggatagatagaaatggacagataatggatagatagatggtacaatggacagatggatagacgttggctgggtgggcggatggagagagcgatgatgagtacagcacaattagataagtgcagagtgaggttttctcttccttatctgtgtaatggcaaaatctctggggagaacgctctgaggccactgtcttttgtactaaatctagcaattgcagcagcagcattttcattttttgtttattccacatcattctacaatggatttacaatagtttgcaatgatacacacaatacaataaatagaagaaaataaaaacaaaatagagcagagaaaacccagataaataggaggcagagtccactgcttttctgtacataatccatggagacctgggtgagggaaacaatttgctttcaaacagtagagtctttccagcagggccttcccctgaaagtctttgcttaatttagctaaagtgggaagagagagatcaaaaatatcaaatctaaaagcagttgtgagcataagactttgtagaaccattctccagtttacaaagatctttggcatctcctttcattgtcacagccctaaaaataaagaacaggtacaatcgtctccattttacaggtgagcacactgaggctcaggaaggccagagggcccacaggtggtcagggtcattctggatctcagcctgcagcctcaggctcctgatccattctttggcctttcactgggtacctgtgagcctttggctcgcaggcttggggatggggagggttgagagggacagctctttcccattcttgagttccacattgccctggtggtaacttcagtgtcagttgctcagtggggcaagaactgggcacatgtagacttcagccctggtggcaggcttgtagatatctaccgtgactgctttttctatcatgtttgattagaagcctctatcctgttacaggcttgctaagtcagcagaaagaactagcgtattctgtgcaggtctgtctactgggctaggaagaaagggtggtaccatttcagacatgcccactgtccattattaaccactgcatctgtccatgtctacgagagtctgctcctccaacaacccccacacaaattcagcagtcatttcttgcaatgaagctgagtagctcgtctgatacatggcctctgatgggctgaggtccttttaatatggacactgtgtcccccgcccctgggttcttggtctttcaggacttggtgcaggaagaaatagccatcgtagctcagaagtgaaaagtccactttctggtaacgtccagaagcttcctgtacatgtctcaactgaccagagctcagttggtgactttattaaaaattctgggaaattatatttgcacttaaattggtttcagggaggaggagcagaggtcaaagttcacaagttaagaccatgaattataatgtgctgcagatggctgcattctggggcccaggtgtttgctattaacaatggaaatggcctactaaggatctttctggtcatttgctcctggcctggtggttttcttagctttctgtggtccgtctggttggcccactggctcagcgtccagttataaggcagtcactttctgtttctggagtggacgtgaggatggattgccccattagcttcagcctcggttctgttctatcgtttgagcctgtgtggtcagagctgtgtccctgtgcaccgctgggcaggcagagtgggctgactcaggcccagctccctctcccatcacaccatgaggaggagtcacgaggcttttgaggcggggcgcctatttcccctgcctgcagctcattagggtctcaacaggcttgcagccctcctcaggtgtgcacgatctggcccaggtatcacctcaggctagctggatgaatcccaagactgggcctttgtcttctgttacaccaaagacctttagggaagtcctctaaggtacacctggaaggaagtgtagaaccttgggtgttccttctgtttacgtctggctccagggagtcccgaggcatcggagcagctgcctctcccaacccatggatactactgctgctggcatagccatttgtgctgggtcatgcctgaggctgcccagaggccctgccctggggcagctcctgatagccctcgagacggtgtggttgagtgggaagaacacaggccttctagtcagatctgtgctttcagtctccacgcaggaactgcagggtcccggcaaggaacccaagctgcctgcactcagcttcctcatctctaaaataggagtcataattggctcccagaggtgtcagtgagagaatgtctgccaggcttctggtccccagcagggtttcactaaacaaatggtggctcctggccagccccgctccaggcagcatggagtaaaaagcccctaaaatgagatgacctccttgcatccacagcaggcctgccacggcactgaacatgaggccggtcacctgcgagtacaaatgccaccgccctggcctaccaggcgtgctacttggttgcacataaattctgtgtgtggtgattgaaagtttttattgttgggcataactggggaaagacctgaagattttcctgaagatggccctagaatttttggtcagcagcttgtccaagcaatgtccattccccacactgtggtcccctgccccctcatactgtaagaggacctcgctctcacttgggaagagaagagggaattcatgttgggcttatgcttctcaagggactaggaatatgtagaactggctgtgaactaagaatggctaagttgtttttggaaaagctcagcaagctagttatggaatgaatgataaaagttgtggccggcatggtggctcacgcctgtaatcccagcactttgggaggccgaggtgggtggatcacccgaggtcaggagtttgagaccagcctggccaacatggcaaaaccccatctctaataaaaatacaaaaaaattagccaggcatggtggtgtgcacctgtaatcccagctactcaggaagctgaggcaggagaatcgcttgaacccgggaggcggaagttacggtgagccgagatcgcaccactgaactccaacctgggctacagagcgaaactccacataaaaaaaaaaaaaaaaaaaaaaaacagtcattagattgtcttctccagagaatggatcccacaatttgtggccacgtctcactctgagctcagtgcctggacttggctgtggccaggaaatggacggaagatgtggggtgagctcatgtgacatgagctttatgaaaagggccagaaaaaagctttcaggaacagaagacaaccacagctgcgtagcaggtaacagccatctaaatggcgtttttgttttgtttgtggattgcttcattggttggttgtgctcctaactacatgctcttgttgagctaaagaaaaactggcccttccagaatggaacaggctgttttgcttctttgacaccatctatgtattaaacggagggaatgatctttaactgtttgctcatcccttcgcctcctgaatcatcttgctctcaaatttacttgtatttgtggttttacagtgtaaagcgtgctctattttggctacaagtactacattctataccatattggaaatgttcttgagcactatcatatacggggggattcgcagtcagggcaactcccaatgggagaaagaaagacacatcttttgcctgtcagtactaggagctagcatttcacagtgcttggaagttaaccagactttgatctttttgtttgaagctcgtttagcctccacttcagtgcaatgaggtagttgttatccctattttatagatgtgaaaacagaggctcaatgaagtacagataggctgctcagacataggcttcggacttgagttctcaccacacgcccaggtaaagaagagcctcctgggtctgcccaatctgtggcatctgctgtcaggagaaaaacaaaactccattttggtctgcaaaaagaaaccagtgggaagcagaatgtcagcaacatattttccaaaaccagttagccctttaccatctaatcatttgtcagctgtggacgatatgaggttgttttttgttttgttttgtttttttcccccaatcagtttaaactgaaaaatctggatggattcccatccccggttccctgcaactttggcttttcctatcacacagttatgtcggctccaagctgttctcagccgctgcctggctgttccatccttcttcctcggtcacttccactcctttcctgccgtcagcactcagacagatgtgagcccctgagcttggaggtggggaacctagactcagtgcgtgtttattaatgaggccgcagagtcacaggaagcagcaggaccctgacctgcagcccccttgaatccagcctgattatagctggtttctccagacgcctaatttccagcaagaaaagcagttgtctccgaatcatacccagagagcttttgcaagtcagataactcccgacttctactgtcgaggttgataaattggcctagtgtgattcacccccaagaatatagcagtgagacgcacaataggctcctacaagaaaagaaccttctgactgcagatttttcaaagtaaaagtaagccctaataatattttacttggcagctttgtgatggctaaaatatgaagctgtgactgcctttatggtggggagctgtaagtggcattcctctttttaaaagtggtgtttttttccccaaaatcacccagctgtctgtttcatcctctttttatttttaaccttgcattcaacatggtaaacttgcctcaagtgtccctggtagttaaatattagagaaaaaggaaagcaaggctaacaaaagaggtcacatcgtagcgggggccacagtcaccctgccacggctttggagataaattctctgcctctgagctgaaagcagcacttttttttcctgggccgcaggtatcaccattttaaagcattctcacgccaagggaaaggatcgtgctaaagggcttctttcctgagtaattctccagttttattgctttgcaccagtctctcactgctataggtcacttcagttagctgctgtcctggcacatgtgggataatttattagacatgttaaaaagtacattgtgatgagcttgccaaaagctacggaagaaactgaggcttgtctttttaaccacagacgaggggctgtatgagatctttgatgtcatgagcaactacctggcccaagtcaatgttcttttcatggatgctccggggaataaagctgttaaataagaaaaatacaagcacaaaggaggcacaatgaccatgtaccatactttggatttggaagcaggtggaagggaaacatcactctgttcacaaccagaacttttcctacactttaattactgtgcagtatgaggattagtcaatttcacataacacttccaggtacttgaaaattcatttctgatatgaagtttgtttataagacagatactcttgggatttttagcacatgcctaaaatcagatcagtagcatcttgccagcatcctctctctggcatggctaagtgagccatagcagtcttatcaacgatcgcactgacagatcctgcctatgattccttgccttgcctgttgtccattggcacatctttcatgtgatcacaaaatcaggtcaggttttcaaaatgccatacattgggcttttcttagaagatgggacaagagagcaaaacagaattattttttaggatatgacaagtggcccatggtgagtctagattgcattttttattgtcacgacacaaataggtacaacagcatttgaattttaaatctagggaagttgtttccagtctctaatgggcatcaaaatcacctggatcattaacagatgagcagatagcaaattgtggtatggtctcacttgcaatggaatatcatccagccataagaaggaatgaggttccgatgcatgctaccatgtggctgaacctcgagaacactattctaagggaaaggagccaaacacaaaaggccacatggtgtaggattccgtgtacatgaaatgaacagaacaggcgatctgtagagacagaaagcagattcgtggttggcaggggctgggtggggaatggagaatgaggagtgatggcttcatggatgtggggtttgtttgaggggtggggggaagttctgcagttagtagtgatggctacacaacattgtgaatgtgctggaaaaaaacattggattacatatttcgaagtgacttaaaggatgaattttatgttgtgtaaattcaacatcaatttagcaaatcgtctgcagagcttattaaaatacaggttgctaggcccctaccttgagttttctgacttagtaggtctgagtggggcttgagaatgtgcatttctagaaagttcctggtgctgcttgtcctgggagcacactttgagaaccactggtccaggcatatgtgggatcacagcaggatttgtctcctgtgtttaaatcggtacattgaggattaatcaatcaccttctgtgtttcagcattcactgctggtcatccagtgctgaactggcactggtaataaagaaaatggtttttagtacctgaacgtggaatcataagaattggtgaaatctagtactgccatcccctaactgtgaactgtcaaatcccttcacctcatttgcaaatggagcaataataactgtttcattggattgttccaaaattttaaattcaaaaaaaagtataaaagaagaaaaatattaccatgagaaagcaccaccatatcacctagctaaaagcaggtactccataaatagttatgccaaaaaaattatatattttaactcaattactagtcttgggaatttataatgttgtggccagaatatggtgacacatgaaggcagcgagaacttacaacacagccttggactgcacagttccactcagactccatttatgtggcataaaagatatgtttctgggggtttgggacttcaaagaccgtttctggaggagtggaattatatgggccttggagaacggctggagaggaaatgagataggagggtgggcacatcccttaaggaaggagcttggcaaggggggcatgggaccaggttcaggtcatattggaattgggatcctcttcagtgctttgagtataatagacacttgaaaactattgctccataagtgagtgaataaatgagagagttgtgaatttgccactcaaagttgtattctgccatcatcagaggtatgtaggcagagtcagcacctggggagcaggtgatgcacctggccttgctgagcattggcacctgctttgctctaggcactaggtaaccagtggctacttaggatgtagaaaatattctaatatgtgtggattaagatggtgttaccattagaggaatctaatattcgctactggcaaatttcccttatctcttaagatttgaagtaattttcatttattaaattttttgtattggggggcagtcattgggtttgctgtaagttttccatacttagttctgtgtcttgatcaaatgagactatcttagagcagcaaaagggagatgaggagcagacctttgcctgcttaaaaagcagtttgctttaaaaaaataaaaaggtgggggaataagggtttggagttcttatgaaaaacacctttaaatctttaatccatcttgagttaatttttgtaaatggtgagaggtaggggttcagtttcaatcttctgcatatggttagccagttatcccagcagcatttattattgaatagggagtcctttcaccattgtttatttttgtcaatttttgtcaaagattagatggttataggtgtcggggtttatttctggggtctctattctgttccattggtctatgtgtctgtttttgtaccactaccatgctgttttggttactgtagccttataatatagtttaaagtcagataatatgatacctctggctttgttctttttgcctaagatagctttggttattcaggctcctttttggttccatatgaattttaggatagttttttctaattctgtgaaaaattacattgttatttacattgtaatctgtacattgctttgggtagtatgaacatgttaacaatattgattcttccaatccatgagcatggaatatttttttgtttatttgggtcatctctgatttctttcagcagtgttttgtagttctcttatagagaactttcctctccttggctagatagattcctaggtatttcctttttctgtgtgactattgcaaatgggattgtgttcttgattttgttctcagctagaacattattggtgtagagaaatgctactggtttttgtacattgattttgtatcctgaaactttactgagttcatttatcagctccaggagccttttggcagaatttttagcattttctatgtatagaattatattgtcagcaaagagagaaagtttgacttcttcttttcctatttggatgccttttattttggctttggcaaataatttatggctgagtccccaaaagcaattgcaacataaacaaaaattgacaagtgggacctaattaaagagcttctgcacagccaaagaaattaccaacagacagcctacagaatgggagaaaatattcacaaactatgcatctgacaaaggtctaatatccagaatctacaaggaacttaaatcaacaagtaaaaaacaaatagttcaatttaaaaatgggcaaaggacataaacagacacctctcaaaaggagacatacaagtgaccatatgaaaaaatgttcaacaacactaatcatcagggaaatgcaaatcaaaaccacagtgagataccatctcacaccagtcagaatggcgattattaaaaagtcagaaataacagatgctggcaaggctagccactgtggaaagcagtttggcagtttctcgaagaacttaaaacagaactcccatttgacccagcaaccccactactgtgtatatatccaaaagaaaataactcattctaccaaaaagacacgtgccctcatactttcattatagcgctattcacaatagcgaagacatggaatcaacctaggtgcccttcaacagtggattggataaagaaaacgtggtatggaatactacacagccatcaaaagaacgaaattatgtcctttgcagcaacatggatggagccggaggccattatcctaagcaaattagtgcaagaatagcaagtcaaataccacgtgttctcacttataagtgggcactaaacattgaatacacgtagatgtaaagatgagtacaacagacactggggactattagatgggggaggatgggaggggagcaagagctgaaaaaccacctattgggtactatgctcactacctgggtgacaggaccccagaccccagcatcatgcaatatatccatgtgacaaatttgcacatgtaccccttcattgctaataaaagttgaaattatttaaaataaataaaaataccttcagtcattcccagtgcctggcccatacagaggcacagctcccagtgtattgacactccatgggatcttctcaccatcagcatgaccttgacctatctaagaatgatgccaagtagaaaatgggttgcctctctgggtgtgtgtctgcaggaagagcagactgtttcccactgttgagtaagttcctccaggccagtcctgtctgcagacacttgtaccagctctttcccgaggtgcactcacaccttcttcccttcgggtgaggggctcaaatgaccctcttactggtgaggtttcctggtgaggtccactgtccctaaaagttcaatacacaccctcttcccttgctcttttatttttttctccttaattctactctttctaactcattctgttcccttagcttgcctattatctgttggccccactgaatgcaagctccatgagggctgagatttttttgttctcttcattcccatatccccaaagcctagaacaatgcctggcacctagtcggtgttgaataaatacttggggaataatggaatgatgtgtgataggctgttctgattttcttcctctaaagcctgacttcctctaactgcccaaatagggttcataaatatcctatcagagtgaatagtcacctgcctccttgctgagaaatcatgaaaggatgggatgagtaatgacatcctacaggtagaaaatacttctcagcctcatcaccattcgtcatcaaaagtaagttcttgaacaataaacgaggcatttttttcttcattacatagaggaaatggtagcgatattggctgacccagtccgaggaaatggcaggaatgtttgtggaagggctgctggactccccattgaccttgctgggtcgcctgagcaagtcagaaaaaccccaggttggtgggaagagaagccactcacacctgctcatggctggagctgtcacccatggtcaggagttgctggaagtttgaattgtcctgacctggaaggcaggcggcatgctggtgagctcaggccatgtggaaaggagccctgagaaaggatctgttcagtgttggtgaattcatcaagacctcatttcgcatctgaggaggacatcgctactttccttttaaaacagaggcatccctgaagaattaatgctaggatgctgttcctcagagcaaggttgaaaacccgtgaattggatgacgaccatttatgtatgcatgattctaaatgagaaagaattttgttaacacttgggagttgtccttcagcagaatgaggaaaagctaagggaagtagaaatagattattacacagatcactatacagtctgacaacacccaatgcagacacaaaaatacaatgatgatctttgccaatgatgatctgttctgttctcctctcctacacattctgaagtttaaatcctggacttaaactgttctccttcatcctatttggatgggaaacccccaaaaaacccaatgtttgtgtgtttgttgctttgaaaggaatgagatggggaaggcatgtctgagcttagtgaacggagctggtctcagctctccaatccctggggtctacggacgttctctgctcctttgggaaacaggccaattcagaccactcttttccaggcttctcttaattgctgtgattctggctataaacccttcctgagacttaacatttatcctagagtctttcctaattaactctaatattttctagaaatcacttcccttctagaatgaactgataatggtttgtcacagaactaagttgcgtatcactgagtgagaatgatgtttcatctcctagatcaggcctggagacatatatgtcctaggaaaactctcagatacagaagaagtttccatctgtacctccatgaaattgatttttatttctttctttctttctttttgcaaagagaagaactgctcttaagtccctgtgtaatataccaattacttcaatataatacccttctaaattgcaaaaacattatcatttttcttgtgaatcattgtttgaacctagttagtatattttgataccaggaataaccagtctgtctgccaggggaagttacaaagatttcaagattgttacagcactatgagtaagtcctggtatgttgcctttgcatccacagaggagcactttcatttattaatttatttgtaaattagaattattaatatactccagagttaatagcccgaggttgatagaaaccacttggagggaaaactaatgcaggaacagaaaaccaaatactgcatgttctcatttataagtgggagctaacattgagtacatatggatgcaaagaagggaacaacagacactgggaaaggagaggatcaaaagactccctgtggagaactgtgcttattgcctgggtgatgaaataatctgtacaccaaacctcgctaacatgcagtctacctacataacaaacctgcccatgtacccctgaacctacaattaaagttaaaaaaaaaaagttaagggccaggcttaaaggctcatgcctataatcccagcactttgggaggccgaggcgggcagatcacctgagctcaggagtttgaggccagcctggccaacatggtgaaaccccatctctactaaaaatacaaaattagccaggcatggtggtgggcgcctgtaatcccagctacttgagaggctgaggcaggagagttacttgaatccgggaggcggaggttgcagtgagacactgcactccagcatgggcaacagagtgagactcggtctcagaaaatgaagttaagaaaaaataaatacctggtcattaaaaatctgtgcctaatagtatgccttatatacttggggaagaaaagggaaaccactcggagaggatggtgcagtgttatcagtttggtcctggaaatcagcatgatctcaaaattcaccaagctcaatcattaagtggccgctggtctaccatcatcaggggagcgtagcagcttgcgttggtttggccaattgattgagatccagttctaatgtcatccttataaatgtctccattgggagagggtgcttgggtttgctggacagcagcccctgctccctctctaagtaataaaactttctgggtttctggcatgcttataccttaataatccttgctgcctcaagacatgggaaaatgcatttgtaaaaagtgagacactctgtgtatgttggataacactggctgctttggaatcaaaccccaaatgctcagtgggttaccatattagaagcgtgttttccttctgtatgatgctctgaggctctaggctgcaggtggccttcctccatacagtgagttaggaccagatgccatgcctgacacctccatctcctaaaaccgtgggatactctaatctcagctggcagatggggaaagaaaggatatgaagaaggaatactcgcttaaataccatcagccaaaagtgacctatatcacttttgttcatgttctagtgccaagaatgtcatacagcccacccaggtacatgggggctgggcagcccttctagagcacagaaggggagcataactttgctggggagttggctgaccctgccacacccggttgtttagaggcacccggttgtttagaccctgccacaccgtggaatttagagacaagggtaagacctgcatttctggatcacctccattctcttacaactgtgctgggggaagatagggacttggcctttatagacctgaatgccagcatcagcaggccctgccctacagtggaaccatgtgtccttggaaccatggaattaataaacaccgtcatttgtactcttttcttctttgcactttccaataaggacattgttatgtgtttgtattacaagctacagtccctacgaattcacttttcgtagcatcatttcacccagaactattaataatgtctttaatgagactctgcctgaacttattgatttgaaaaccatcgaaagatcatttcttttttgataaagcacttcttcatcagccgcgttggcactgtacggaatggatgtcgggatggaactgaatgtgcctcacttgacactgcatatctgagttttttgatatgcattgttcattgagaccaccagtgaacacctgggcagatgtggccagtgggtgccttcttgtgggcacaagaagggcagacaaagccattccatgccctgtgacttactgttctgggctctcctttctcaggtacccatttcccatggtgttcagcagttgcagcaggaaggacttggagaccagcctggagaaaggaatgggggtgtgcctgtttaacctgccggaagtcagggagtctttcgggggccagaagtgtgggaacagatttgtggaagaaggagaggagtgtgactgtggggagccagaggtaagaaccattcccagaacaaggatacaagaagacttgtatcctcggctaggcaaagaagagagaacttggaggaactgtacagccagatgaaagtactagaactcaggaaggaagagtcctatctgcccatcctgaacaagccccgtgagctagggtggctttcttgaattttaactattgcatggaataagtgatcacttcatttaaaaagataaataatcttatcgaagggtacagcattctcagcaagatgaggccaaaaacaataaaaaaaagtgtttagctttgagtttgacagagaagaaagccctggaattctagcttcaaatagctaataagcaccatttctttttcttcataaggtgtgctaccagaggggaatctgaataagcagcattcatttttaaccaggagcttcctctgcagttgaaattctgccttgctgctgcagacgcctctgtatgcatgacttgaggcttctgcctctcgagcttgtagctttcagaagcaataagtgaaggcagggaacgtttttatctagcacagggcttaaccctgttttccagccaatatcaggaaatgtccttgttttaatagggcccaagataatcactataaaaattataaaagtcactttttaatctctgaataatctcaagaaggaaagagagaagacagcatgagacctcctagtaaaacaggtgccccctcgaagtctggaggaggttgtgtttagaataaatcaaagcaagcagttgtacagcaggcagcctccatgtgggactccctccccgagagtttatgcaagctgaaatagtagacaagttcaaggcaggcttagctaaattcacagatggacttaatgagggcttaggaagagcatctccaagggctgctctgaaagagggagtttagggtggaggagaaatcgtgttgagactggcgcatccggtatattcctgtgttcatcacacaaacaactggcaaacagaatgttcatcatatccccatcttcaagtctctgaggttttccataccaggaggaatgagcttggtctgacagtttctgcaagaacgctggaagtatgtaagtattgggtgggagtaaggggggatgtgatgtagaagtggtttcttcaaatgtttttatgcccttgccaaactcagaacttaaccatgataatgacattgtctggaggggtgtctaattttgctcaccatgagcagggaatggttgctgtgtaggagcaagtcctaattatagtgttacagaaactcttctcaagattagcagaggaaaacttaaaaccatcatgggttggggtatgcaaaggggaaattccttgtaggccttgttaatttcttaaaggaaaaaatgaattagtttaagtttctcacctttctcaggagaggccatgttggctgaaaatggtttgtctttgaacttcttatgattgtttgttcatctaaataaatttgacagctcttcatgaagccatgaactctcgggtttggaatgatttcgttagcagtcatttactccatatgccaccagcagcagccacatcactgctacaatcacgaccaccattgctaacatcaccatctccacaatcgccaccaccacctcctccacccaacatcatcaccatttctctcatgaccatcatcaccatatcactgccactgccgccaccgtcatcactacagccctcaccatcaccccactattgtaaccactgccatctccacagctactgccaccaccgtggccacaccagtatccacatcgctaccagcatcactgctaccatccccacccctatcattatccccaccaccaccatcacatcagcaaatgcttgagtgcctaaaatgtgtcagccactcatattctgatcctccctcttttctccatgaaggagtcatgcggcttgacagggtgctgtctcgccaggtggcatgttgcattatagggtagctttgattattacaaactccctccttgtacagagccaaactgcttgcatgcagttaccaactttgtatttctgcggttaaggtccttattttgtaggataacttcttgatatttgaagatagctctcattcccctcatccaaagttctttctttgaaagttacaggtgagccttttgcctcactttttagatttgcttttttttattttttgcttttcaaaaaatagtttcaagtagttattattagaaaataatagtttcaaggttcaaactcaaattgtgtttggcagtgtgacaacctatttacagtttccaaactgctttgcctaagaattttaggcaaaaagacttgttaacctgggttctttatccccctacccagtgctcaggccctggttattctgcatgcccttacatcagattgacctggccattccctggcccacagagggacccagtgtgttacgacatcagggaaggagtagtaaatgggatccgaaaaacaactgccagcacccaatggaaaccagcttctcccttgctcccagaaataatctccatcattttcaagaagatggcttctagtcttctcccagttcattgtgattaagaatctgtgtctgctacctacaacctgagaatgacaattagggctttgcagagaattctctaatgctttcattattctttcttctttggagacttggtattcattggctctgttggacttctctattgaggactaaaataatcaatgtagcagcagatgaagaatgtgtctcttctgagaaatatggtactgcagaagaaatagatcctgggtggtttgaaggcaggttgattgctgaagccttcccggacagggcattggatttatatcaacataaggaaatcctgacaactcactcattcttccagctaacaggattgggaaagcagccttatctccttgtttaaagtcaataggatgccagtagcttgcgaatatcttttaaacttagttatctttctcacattatcatcccctttgaagtcagagccatttggcatggctgcatttccatttgagctgctgcttatattactgggtgatttgagagaggggggaagatatttcttaaagaattttaggacccagatttaggatggctgatttaacatggaatttcaagaaaacttgtaatttggtaaatgtgtcatccatagagccatttagaccataaggaccaggatagcagtggtgtgcatttgatgacactgatttaaaaatgcaattaatggactactttttttaaaaaaagttcctaaactcttttagaattgtaagtccacaagttagaaacccttactgtcataaaagttacagctatgacttctggttgacagttttatcttattgtatatattacgcattctggatgtttataaagtcctcaagcaaatttaaaatttaataactttggaagtctgtataatagaatcaaatggaacatcaaatgagagcataattagagttttacataggatatagtttcagtatctgggtttgccataaatcttctggattattgacaaaattttattaattgcatttataaaactcatgataaatccattcaagaaagatggttttcaggagtaaagtattatattattaaactagtatgtgattagcttcaccccagccaatggtatataaatttttcaaagcatatcatatactggataaaataaaagaacattgataaattactcagtattaaagatctatgaactgttccatcttatgataattacatttcttctaaaatgtgtaaactgcagttacttgaatgttctcaagtacaaggacttcacttgataaatgcgtgcaggccttttgttgagaactgagcgaaaaatgtcaatctcttgtttttgttaggaaaaaatggaagcaatgggtacgtgtggagcacagcattataaaggagttactttcttttctcacttttgtttcagagaggacagtacatctaatgcttgaactatccatttaaatccctcgcaaatcaatgggcacagcccacaggcctcctgccggccacttgcttgttataaggtccatttctgactttccgagtgatggaattgtcaggccagacaacttacccgggctgctcaagggtctcatccacaaccctggcgagattgcagggaattgtggttgaaaccactggtttgacttcatttcctgccagtactctctaaatcaaaaaaggttcatttttgaagagtacagattgtatgcatctatgtatatttttgattgggtaatttcaaagtcctccagggatcctgatgcagtccactgcaatgagatccgcctggacacccctctacagagccccagtgtactgctgactagagtgatgtccccagccggccagcctatgttacaactgctttacctttcatgagggcacttgtgtgctactggctttttccagggactcgtagacccagttggttcataaaaagcagaagctttgctttcctaacagacggaaacaggcaggtgtgcagttcaggagctgggccctcttggtctttcttgctttttgcagccatttaaggtgtgatgtttgcattcagtgagtgcatactccataagaccctgtcaaacaaatgccattcccctttccaggaatgtatgaatcgctgctgcaatgccaccacctgtaccctgaagccggacgctgtgtgcgcacatgggctgtgctgtgaagactgccaggtgagtcaccggagctacaacttgacccccaggtcgccaacaggttcaggtggttcagatctgatgcagggcaagcagtgtggctggaaggtttcccagcactcaccacagcacgcaccatccctccttctcacgccagttggtgttacccacctcttactgtttagcttccaatcttggggtgaaatgcacgcttcagttgccagtcacttgtgtttatttatttaggggctgacaactgatcagaccgataaaccctagttcaactttaaatgctccatttgtgccgtcagaggcacatggggttctactatgctgacaagaagagcaaggcgagaacaagtccccatccactgtcactcaggttcccccaggttcatcttcttgatcccgcggacatctgcctgctggcttgtcccagaagttttgtataaacaactcaatcttaatgtcctcccaaaagaagttgccaccaaccccgcccagccaagaatggcagttttatactctcgccattgctgctggctaggactgcgtttcttttggcagttccattgtctcattattcagagctgatatctgagagtagaagcctgagcttttgattcaacagttccaagggtagagttttatttcattttaattaagcaattgatcctgacattctgcttgcaggaaactccctcttagctgccccacgtgagcacggtgatttagaagtgcattataacatttaatgttcggctttaaaatagccttcatcctcttcctaatgctgattaacttctggggaatgttataagcagctggctctccctggctcccagtaactggtgaaggaaggtgcctggaagggagtcgggggaagggggaagcaagtctgagcctgtgcccaggggatgcccaagtaaggggagggaggaccacagggcaatgcctgattgtggttcacttttaggttatgactttttaacaattgctttcgacttccagatcttctagaagttggcaggggtcttatctctttgcgtttgaggagtatgcagggaactaagcccaggactcgcagggttccctagctgtgtagcctcagacgggctactctgagccttaatttcttcaaccacaaaaagctgagccattggtcagatggcttctaacatcctttacctctcccttgttcttctcctgttcttcccataaagcagtaaagagagagttccagttctatgatttgacgactgactaaaattgctatcgtgattgtgaccttaaagttatttttattaacttgcccacacatgccaacaccataaatgcaaatgtccccttgaaatgtgtcatagtgttgacacccagagacctttttcttaagaatcaaccaggccagcagccaacgcttccctccttcttcttcctctgaggtgccaagtgccagcagccagcttgtgtgtttcttggagaaccctgatgttgcatgacattaaccagaggctgctcttggttgtcccacccactttagagtggaacagtgaaccccagaacgagaatctgatgatttaatgaggtatctctacattagaagcaacttcctttgaaatcctcaccccttatgtgggacttatggccttgtccactccagcccaggagtaatgctgagagctgcctctccctttccccgggtgcatgtgtcataaatggccctctccttccagctgaagcctgcaggaacagcgtgcagggactccagcaactcctgtgacctcccagagttctgcacaggggccagccctcactgcccagccaacgtgtacctgcacgatgggcactcatgtcaggatgtggacggctactgctacaatggcatctgccagactcacgagcagcagtgtgtcacgctctggggaccaggtacgtggccgccacaagctcggcatcaggagaggcactggcagacctgggctgtgggactgggggcatgtgctctgttttggttagcccccactcctggcgggcgctgtccacacagcatccggtgtgttcagtcgggagtgattgactcccagggagggtctgaggccgcactgggcatggggtgcacagaaatggacactgcctggagcctggccttaagaagctcagtgcggtccaacaggagctgcaggagcacctactgtgcgccccgggggatacagaagatgcaggagcacctgtgtgccccgggagatacgggagctgcaggagcacctactgcgtgccccgagggatggcagggatgaatccaccatgactcctgccctcagatagcatagcacgtagttggacagacagacagaactttcccaccaccactgagattttagtaatgcccctttgtactcataagaggaccccaaccaagtgaggggcccagggctccatggggaaggccctgatcagacttgaagcatgagtgtgtctgtaatcagaaggcctgagagcagcagtgagtggctctcaaatgggaaagtggggtggttgcgtcaaacaagagaccatcagttcaccatttcaccagttcaggctgggcacttggcacactttgtctcttctgaccctccaacaagcccctgaagtggggactatgaagctttacagaagatgatgctcaaactctgagaccaaatgtcagtttccccaggtctccgggctaggatttgaacctgggttactgtgacccaatgcccatgtgttactcccacaatgcacagtcaccctgaagagggaggtgttgctctaaagctccaccaaagctccaaaatgaagcagaagctcagatgcaaaagggaagaatccatcccctgcgtgtctctcctccatgccccaccttctggggtcagagatccaaggcctcattgggcagccctggactccaaggccccgtcaccccagaaccatttgagattcaatgcctgtgtccagctcccaggagtccaaccgtgaaatccacaagtgcaggccccaccctgtcctgcagttctctttcccttatgataatgtggttgagtcctttgtcactccctcctcctgctggctgcagaaatgacctcagcccaggccagagaccccagctctggcaaggcctcttgtggtcggccaggcccaggctgaaagccaagcagaatcaggcaggatctctagcgggagggaaacctgataggacctttgtcagacttttgttgtgaggctttggttttaggagtgatgagggaaataaagtggaacagaaattgatgactaaacctcgaagcctgggttttcaatggaatgtaaaagccacgcccaggcatggaaaacaagatggatgtctctcggagctgggtcctgctgggaggcccatgtcccctgccagccagcgatgtcctctgtacttggagctttctgggggggaaaagaaagggcagcttggtagcaaggagggacgagcgcaggcctctttagctcggcctctgaggagttgttctgatgctcctcagcactcagggatgcgcgtgggcaggtgggatggggaggcctgcagttcccgggcccttagtacttcatccttggaccctgagcagccctcagtcctggcatcatcgcctgctgggccttggggcaccctgggcaaagcagggggcaggagcagtgggggacaccctgttgcaatgacaaggactaagccagtactcgctatacacattgaatggtgtttgggcttgacatggtttagtgacttcaggcagcttttagccaactgaggtcactttgggactgcggctactgctgcaggccaaatcttcatggcttcaggcatccctagtgccgtccccgtcccagcctttctccagaatcagcagtctccttttcttgagttacaagggctgtgatgaagctcctttccaaaaagcattttgtggccagagcacacacaacacttggagctttgggagtgaaatgtgttccttaatgccctgccgtattcgaacagctggccccgtttccagagtgaggtcagagggaactcgacagtgctgtctgagccacccccattgtgtgactcagctggctgtgtgcctctgattcatggtgaccaaagctggtatttattatctcatcagtctagtccttctgtagctgcctgaccagagagagaaccagacaggcagacagactgacaacctgacccacagactgagcttttcaaaagcaagagcaataggaagtcacctgcttgggctctcatcatccccatgatggagggggaggctggaggtctgagcacccaggtagccacgtcctcttcctaaggagggggcttccctgggagctcctggcttagctctactctctcccacccactctctccctggtaaccaggaggcctttgctggggtggtggtgggtggtgtcgtgtgtggccactgcacacagcatggaacatccatggcatcaggactgttggtaacaaatgtaaagttttggtgaagaggctttatctttggctcagggttcctgaaagccacagcacagagaccaggcttgggaagccacctcgggcttgtgacttcctgggttttggtctgtcctgcccgcccctcctcagttcttcagatcattatacagacttccttgggagagcagagagcagggaaggctgcaacccactgtggcccttgatgccagggagctcttggaatgggcctttgaccacctcctttgggagtgcagtgtgctccttcctccccttgtcggtgtttccgcctggtttccagtttacaggcgctgtgtgagtttcccatggctactgtaacaaattagcacaaacttaatggcttataaatgcttcattttacagttctggaggtcagaaatcctgaaatcaagatactggcaaggcagcattgctttgggaggctctggggagcatctgtttccttgcctttcccaacttttagaggccacttgcattccttggctcatggccccttcctccatcttcgaggccaacagcacagcatctgcaagtctctgtccctctccgacttctgcttctgtagtcacatccctttctctgacactgactctcctgccttcctcttataaggacccttttgattccatcaggctcacccagattgtccagggtgatctccccacctcaagatcctaaaagtaatcacatcttcaaagtcccttttgccatgtcagataacatgtgcataggttttagacaaggatgtgggccttttaggggagccacaggcattgaacagaccacttactagcaagggaccttctgcaaattgctcaaccttgttatgcctcatctgtaaaataaggatagtgatctacctaccccaagggtctgttatgctccaacatagcctataatctattccatgtaatatatgtggttctatgctagatgcagagctcctagtaaatctaaactctataaataagatgcagctgcactcccaggaagcttagactagtgagcaaggtactcaaatccttggggtctgtaaaacgggctgtaagagggtcatgggccagatatgttggggtggaggaaagcagccaactaggaggctttgaagacaaggttgccgtggaatagtggtttgccaggggtggaagaggatggatatttccagtatacagaacagcaacagctcagggcacaaagggacagtggggccaaccagggcaagtgcaggtagttctgtgtgtgtagagcttgggctgtgccttgaagagcagagatcctcaactgccacaccattctctcatttgtcaagtatttgttgatgtcctgctgtgtgtaagatgctgactcaagagccccgactctgccagagtgacacacttcccacagtccctgtgcactcctgcctggatctggaggggagggcggatgtgaatccttcacaatatcctcccgggaggcatggatcccggacaaatgcagtcctgggagcggaggtgacttcctcagccaggcccctggccagccagatataccattgagaacatttcaatgctttgttgtagtggttggtttgaattagcttttcatgattcagaaaggaaaacttattgtcaagtttgcatttgcagtatttccccacccaggagcaaatgcttcaggatctggatcacgtatgcactggggtcatcacaggcctcctgggaaatgtaggaactcagagctctaagagtccttgagtccttgccccaccggcccttgacatttgcaccccagtgaccttgcccgagttgctgagttgcccagaattctccagttacattcaggatgtccattactcaccctccagatctggcgacccaaacactgactggacgaagcccttccttccaactaatgattcccttttgaaatgggcttttctcaatctggcgttatatttcaataaaacaatcctgcttccaaatctttctacaaataaaacaacagaaaattcaaaacacatgcctgcaacttctaactggcaaagcaatacactttgagaatgcctttgggttttttgttcatttatttgttgttctaattgtttttgttgttgataacgtacgttctcgttggctgagagtataatttttttctcactgatttttgtcccacaaatctggtatctcaagacttcctatgttgatttcaaacatacaaatgttattcacagttcaaactgtgtggttggcgtttagctctctttgcccagtttagtcttaatatctacaaagattttctgtcaatatgacatgacctttactccttctgaaatatagctggatatttttgtttaggtagcaaatttacttttaccaatgttttttgtgagaaccaccagcatggttactgaaaatattccttggcaattaatcttacagataactacacatctatagtcacgaacaactggcatcagagaattcccgaaatgtgttagttttttctattttatcactcaccagaatgcaatgtttggtttctgcagtgtgagctgaccagaccatttttatgggctggtgaatactcagtgtttatttgcaaatctggtttacatgagcttggtttattgtgacccacttggggcagtgcatttatgaatcacctacaactcctgtggccacagatgggaaaaaaagagatttttgccagaagtcttattgtttagaagtcaggaaagtctcccttttgtcccatcaagtgagaaagaaatgatcaaatttgttcatttggacttcattttctgatgaatacaaaggtccgtctgaagaagagagatgggaaggacaatacagtctccagttgtctgtaaaaatgcctttgtctgtggatgttagtggcaggggttagggaaatcagtgacacagggaaggaggagctgatttgactgaactggggaagtacatttgcatcgtggagtcattttaagtaagattagattgagtaaactgtgggcttaattcaagatgccatcatttctctttcaaaaaaaatataatgacattgggaacttccaaactacaattacaaatataagttatagcactctgaagataaaactggtaattaaaatccatcactttctacatcattataaaatatagtatggtatcaaaattccctctgaaaggctaaattttatcttttgataatggcaaaatacctaagtgttccattattaaggactcaaaggctctacattgatgtaatatggtagtgataagaaaaccattgtcattctttctaagagatgtgaaatcgcttgtcttcatgaagacagacattttttaatgcagcaactttgaaccaaatctctgcctttgtaacatcttacaagtggatagaagtcatttgcactttttaaattattgaccactctgtctctaagataaatgccagatggcagctaacgcacaaaagccacgggaagcactctgttggcccctcctccgctatcctgaccgggatcagcaggttctggacaggcagggcgcgcagagagttgtctgcgggctccgtgcctttgagcctctttcctttaatgatgttttctttcagtgctggagctgcatctgctcccaaggtcagcactcagccccctttggtttccctgcttataagttttcttccttaactttgagggaataacaatttacctttccaggaagtaaaacgtctgtctttttatgaccttacataagatcccacagtaatacttcatttgatgtcaatgaataagtggaaatccagagacatagaaaagataaaccagcagacagcgttcatttacccaggctgctgtgtttgcagaaccacagttgacttcctccgggaagggcactggagacatgatgtgctttccccaaatggcttttcactcattcgttcttggaacacatctgctatgcgctggcccgaggcagcatccctgcccacaggtaggagccctggggcctctcaggaggcaaaagcaagtgtggtaaatacaagaggaagacaaccttgggaggagggaaaggagggccaatccctgcctccatggcaaagctgggggcagaggagagccctgaaggacacgggagccctggaccctgatccagctggctcaggcatcgagttccaaggaagacactgactcccctggcttcggtcatgtgcccagcattgacccgatcatataacctgtgggatggacctctctgattcaatcttatgtgcatacctctgccattagataggaaagttagctccaattaactataaaaaatggatttcccatggggaaaatgttctcgttcctagaagaagggatatgggagaggtgttcaacaaaacaataaccctgtgtctcctaccccacagtccgttttcacaaagtgctgttgctgctccaagctcccagagcaacctcctaccacacaggtagatttcaccctggaggggtgtggccagtgtgtggttctggaaggagttgtgctgaatcactctggcgaccactagctggcagctccctggccccaggaagtggcccagagcccaccatggtaccatcctacaacctaacattggagtttggggcagcaggggcgtgttgcaaacaggaccaagttccggccgctgcgtccttagaagtttggttcatttgaaaccccttagcctttaaacatccgtgttcctcatgggagatttctcattacagcctggagactccagggtaaggcaccctggccaactggataagagtaagcattgttttttttttttgtttttttgtttttttgttttttaattttttttttattatactctaagttttagggaacatgtgcacattgtgcaggttagttacatatgtatacatgtgccatgctggtgcgctgcacccactaacgtgtcatctagcattaggtatatctcccaatgctatccctcccccctcccccgaccccgggctcatcatcactggccatcagagaaatgcaaatcaaaaccactatgagatatcatctcacaccagttagaatggcaatcattaaaaagtcaggaaacaacaggtgctggagaggatgtggagaaataggaacacttttacactgttggtgggactgtaaactagttcaaccattgtggaagtcagtgtggcgattcctcagggatctagaactagaaataccatttgacccagccatcccattactgggtatatacccaaaggactataaatcatgctgctataaagacacatgcacacgtatgtttattgcggcactattcacaatagcaaagacttggaaccaacccaaatgtccaacaatgatagactggattaagaaaatgtggcacatatacaccatggaatactatgcagccataaaaaatgatgagttcatgtcctttgtagggacatggatgaaattggaaaccatcattctcagtaaactatcgcaagaacaaaaaaccaaacaccgcatattctcactcataggtgggaattgaacaatgagatcacatggacacaggaaggggaatatcacactcaagagtaagcattgtaaacagggctctgctccatcttcctcccaccttccttgcaaaccctcaccaccactaccaaattaaagcagcagcagtttcagaggactgataaaaggaagcaaaagatcgtatctattggggctacccgtgagttagccacttttcttcattctccagggaagagaatgaacaaagtagatgacaggggctggagtatgcattcgggcctttgattccatagagaaatgcatctgtcctatccccgtgtttacatggctgatgaaatcatagcctgcctctcctgcaaatgccccttttctttgccatgtggcagtgagccctatcattgctgtgcctcagggacatcacttcctggccatatttcagtggtaaagtatgatatggcatccctcactccctcatgttttgggtgaaagctcaaatgaatgaaactcttagaaggtgaccgttattgccttcctggaggtagacagaaagttaacctttagaacctcgcatcgttcaagccactggatgaattaatggcagagtggagtcagttttactggccaaacttcactgagatttatttcttgaggaactgctccctcagaggtttccaagtcattctactccgaatttttcatttctttccctgaatcagtatagatgcaacaaaaagcatacaaatatctgctgcctgcctccattgtcccagttttaaagggaaatctcactaagcatgctcaggtgcagggggtaggccgtgacccaggtcagttcagcacctgagacatgagcatgaggcagctgtcgtcctcacctgtcaggagattttttggaaaaagatttggtgaagaagttgttgactccatgagcagctggattacaggagaatatgttggtggttccgaagaggaaaggatggcagggacaggagtctatagtcaagtagggggtttccaagaggaaggcagcacaggatcatggctggatcatgggttttggctttaaacccatgagacaaacccaactttgccatttacattgtgatcttcggcaagttgctaaaacgctgagtctaagtgaaaatctctgaaatggggagaatgtagaccttacagggtggctataaggatcaaagatgataccgcgtgctgtatccagcaccatactttaattacaagtggcctgctgatgatctaaaatgtatcgttcatttaaagtgtgtgtgtttgttaagagcaaggagagtaatgacaggaaaatgatctttgttctagggttgagtggcataaagagaagtcagactcaagggtctttgcccagggttgcctgctgcctctttcaatgtggcactgggtgctgactcagggggagtctggaagcccaggccaggagggttcccagaaccagctgggatttgggggccgtggggaaccacactcattgaaaggagtaaggggatgggtgcagggaagttgaaatccttgtgctggatgatagttctgatttatatgcaaaggatgtgcaaaaactattagggtttcagatgagattctcttctttccttctcatttcctgaggcatctggttagcccacagtctccactagttgcccttaatgtgtaaggccctggagaccatgaagtgtgagggagatggatgtaaagcccctactgacgtgatcatgaatcgttacaggtgtggtaagtgatgcgagcaggggctggtacaaggaactctcttctccccacacacacccccagccctaaagtccagaagccacaccttccccacagtccaaggtggtcttcattatcacttgggtttcctaggggtctgccacatgccaggagctctacacactgatgcacctccacagcacctttgagtcaggtccttgtccccattttacagatgaggggacagaacctcgagagcttgtacaacaaggccttttggacattgaatgccagatcagcccgagttccaagcctttgttcttccaactctgaagcatggttactgagtagatcagtcagacaggagggggcaatctaaaaaggctgaagactgataggcattaggtatttttcttagaccccatacatgcccagctataaaacaaggcttccccctgaaagtagccagcaaaaagaatcgctaaccactgacctgtcactctctcagccacaccttttggatgtcgcagagcaggtgggaaggcgctttggcgctcatcatcctgcatccacgcaggttcatcaaggctgcctgacaaaatcaggtttaaaaaaaggcaggtgcatctatcacatgcttaaatattattcttcggctgtgacttcatcccattttggttattctggtaaaagagcttttaagggttcactttcataagcaatagagtgggtggttcagttgtggaggttatgaatatacacccactgggctaatagagaaagtgctcactttctctattaaaaagtgttggaagagtgggtacttgaacctagaaacaagatttccagtgataacataacagaagaaaaaatgtcagcatcttgagaaagccggaagtgcagggaatgtgccatggaaagcaagaagactgagaccaggccaggtacggtggctcacgcctgtaatcccagcattttgggaggctgaggtgggtgaatcacctgaggtcaggagttcgagaccaccctggccaacatggtgaaaccccatctctactaaaaatacaaaatattagccagtcgtggtggtgggcacctgtaattccagctaaatgagaggctgaggcaggagaatagcttgaacccgggaggcagaggttgcagtgagccgagatcacaccattgcactcgagcctgggcaacaagagcgaaactctctctcaaaaaaaataaaaagactgagaccaaaggaaacgtcatctcagtaaaattgttccacggtgtgggagaggttttttttttaagacaatctaaattaaaatgtgattcttttaactgtttctcattaagttaattgacagcatattataagatgatgcttgactgtgtcatctgtgttggtaaaaattcacatattcgaattggccacaagcctttctgagggtttgtctttgggagaatggcggtgctcctgaaatgccaggtggccttctgctggggcgtgtaccatgcttctgcgttattggtaaacaaggcattgcatcttacacacacctggttttctgagctgtgctgctccaccagcatttggggcattacaatcataagcacaccctgtattagtctgttctcacactgctataaataaataaatacctgagactgggtaatttataaagaaaaaaggtttaattggttcttggttctgcaggctttacaggaagcagagtagcttctgcttctggggaggcctcagaaagcttccaatcatggcagaaggtgaaggagaagcaggcacatcacgcggccggagcaggagcaagagagagaaggaaaagggaggtgccacacacttttaaacgaccagatctcaactcactatcccaagaatagcaccaaggtgatggtgctaaaccattcaagagaaactgcccccatgatccaatcgcctcctaccaggtcctacctccaacattgggaattataattctacatgagacttggtggggacacagatccaaaccacgtcacactctgacccagaaggctcagtgtgtttcagctttggattcccaagtagagatccagtgttttcacttccagaatgcttttatacttgattacacactgtttccatgcctttgcttgacttcctatcataacgatagccctttatctggtattcacgtatcaagcttcccctttgctttgccagtacatttgcagcgtcttcaatccctgttgaggttggtctctttctcgtcctctctctctcccccttcctctctttgtttttatccttctgtactccccagtccaaccttgtccaactctcctcccaggctgctgttgagctgtttgtaagctcacgtgtctgaaactgcccaaagtctctttagagctccctataaggaaaacaaatgtatcaactgacatacttgaattgtgtcatggtatatgtattttttaagtggtcacaattcccaagaaagaaattactttataataaaggtagcagaatctaggacatcagaatagcattgcgtgcaatggcacagtgatgtcaactccacccacccatttcctaggagctaagcagtcactaggagctgcttgtatttccgagtcctagccttatgaagtagggaaagaagcaacaaagccatttcctgccccattttcttagcccttccacaggcagctgcagcagcacaccccacatccactgaacctgttgttgcttgggctgcagggccaggtcttaatctgctctctacacctgagacccagtgcagggtccagcacctgtgaggatggagcacaggagggaacagcccagaagcctggcttcacccttagatgatcctgccttcgttacctatgtgaatctgagaaatatatttaacctctgatgtgctaattttcttgtccataaaatggaataatgagacctaccttgtaggattaaatggtaggattcagctcatgatgtcttctctaagaggtcttccttgaccagcctgcctttaaaagcaacagtcccctgaaccctcctactctgtttctaccttcatagcattccctaacactgggctttagaggaacataatcatttgggtcttttttctgtgtctccttgcaattttcaagcaagcaggaggtttgtccagtttggtccctcttatactcccaatgtctggaagatagtaggtgctgaataaatacatgtgtctgattgaagcctgcaacatgatggctggctggctggctggctggatggatgggtggccggctggctggctggatggatggacgggtggctggctggatggatggacaggtggctggctggctggatggatggatggatggatggatggatggatggatggatggatggatggatgggtggctggctggctggatggatggatggatggacgggtggatggacgggtggctggctggacggatggatggacgggtggctgggtggctggctggatggacgagtggatggatggatgaatggatagatgggtatataaatggatgatggaaggaagtaggaagggaaggagggaggaaaaagagggaaagaaggatggttgggagggagatagagttaggcaagcaacaaatacatagggtgtgtgcaaaaacacaaacaattgttgaattgttactattctagatgccagtttttccaaactgctttgatcaatcagatcccagtactttgatcaaaagtgctgccaaacaggattaaattaagcacaaagtgcaggttccacactgaggctctccctccccatccttccctgctctgacagatagacgaaagagaaaaagaaggcagaatgcggacaaatcaggtccctaataggagctgagtgtgtcggtggtgtcatcctactgtgagcaaggcagatgtggaacagatggaaggaaagggcatgtgatgtgaggagctagggacctcatctttctccatgacagagaattgtgtccagtctgggctaatgcccctgaaaaaagagattgcagaggcttctctaacatggcttataaaagaaatgagaaaaggagaggtgcaaggctggctcattgcagagattggagcgctgagcacactgttcacatcaaatgatggcaaggtggtgtggcacgtgtgtgttgaatgagatgatcatgtctgctagtagctgatgagaagggatcaggtgcaggctaacgaagggggatgtttttagtaagaagaacatcttctgttccctgggacgaggtatcttaaataaatccgttgtcaccttggaaagcaaagcctccccagggtggagagcagagaagggcaggagtcagagtgaggctctggagtgtcggcatcctggccatcagaagcgatgtgagataaagtgccaaacaggacaccaatcagggagagaaaagggaccacgccgcagggcatggtttgttctaaagaatgtggcatgttttcttgacttgctcaatagtcttcaacagacatcactatgtccaggattcaggagtcctccagaactttggctgcaaatgctgattatatgtgctctctccgtggctggaagatgtgctaaaaatggccatttctgagctctctggctgccatgaccctctttgctgggaaccgtcatgttgtacatagggattaccagggtttatgactccatggcctctgagagaaatctctgccttgcaaataaaatagaaggtattaaaagaaggtagtactttctcttatagggagctttatgggactaaaaatatcatagaagatatcttcattgctcctttggagcctgccctggcttgcatttcctcaccggaattgtgtgggatgttgttaaagagagcaaacttccccttctctgcagccagccagccagccagccagccagccagccagccagccagccacctcctttctgccctggatcagatctcattccacagccaggcctcatttcctgagaggccacacatgccacaagcccagagagcagacctaaggaagagtaagcattggaacatgtgctctgccagaggccgagtcaagagaggatgcgagctgctgacaccctaggcttcccctggccagctcccaccatgagtcgggacagacactgggtgtgattgctttgagcacgtctccccgtaaccatttgagaggcctacagccatgaaaaaaaaaaaatcacctgcaggagatgaaaatgcagttctgcttctgtttcaggtgctaaacctgcccctgggatctgctttgagagagtcaattctgcaggtgatccttatggcaactgtggcaaagtctcgaagagttcctttgccaaatgcgagatgaggtatggaatccagacatcctggcaaagtctttgctctgaccttcccacattgcatagggttggttccaaatggtttctccttgggaattgtttgttcttacccttccagagatgctaaatgtggaaaaatccagtgtcaaggaggtgccagccggccagtcattggtaccaatgccgtttccatagaaacaaacatccccctgcagcaaggaggccggattctgtgccgggggacccacgtgtacttgggcgatgacatgccggacccagggcttgtgcttgcaggcacaaagtgtgcagatggaaaagtaagacccaaatgtttgcttggatcataaatgtaagtctggaacagggcccattgaaaaacagcaagaactgggttacaaggtttgttggttttcctaaatctacttcttctcagatgcacctagaagaaaaagtcaataaatcctagatcctggtctgactattaaaatgcagattggggaaaaatcaagcctgtcttcttaggccttgagtgttaataagtcatttctacactccaggtggcatgaggacttctagccaggaaattactttggaaagaaatacaatcgcatattctattggttttggatatgtggcttggtttttagcacagagttcttgggggcttgtcctcacctgaacagaatgggaaatcagatgtatttttagaaccctgtagagagaagaataggagagggaaaggagtggaagaaactcaaaaccagaggggagtcctttcagagaacagggagaaagatacatggagatattttgaggtttagaaataaagtcaaactttttttttttttggaagaaaaaaagaatttgagattttcatgctctgccatactgattttttttttttcaccaaactttctcatcagactaaatgacagcaagcgaatacaatgttttaagaaaaggatgaaacaacccccaaatgcttcttaggactccattttcaacatggtcttgaaatcactcactaacatgaggtcacacaggcaagaaaagacagaggcagagacagaatcctgaggacaggtgttgcctccactctcctgtctttggccccacacaccctgagccacaaatcctttttccttgagaaataggatcgtacatgaatcttcttatacattctgaatgtctccttacccacatttgctcatattcaggccttgacattaaaatgacatctgatatttttaggctcaaatcatattttgtcttttaacttttaggttcaggggtacatgtgcaggtttgttatacaggtaaacttgtgtcatgggggcttgtggtacagattattttgtcactcagatactaagcctagtacccattagttattcttcctgatcctctccctcattcaccctctactctctgataggcccagtgtgttttgttcccctgtatgtgcctatgtgttctcatcatttagctcctacttataagtgagaacatgtggtagttggttttctgttcctgaattaatttgcttatgaaaacagcctccagttccatccatgttcctgcaaaggacatgatctcattcttttttatggctgcatagtattccatggtgtatatgtaccacattttctttatccagtctatcattgatggacgtttagtttgagtccatgtctttgctattgtgagtagtgctgcaatgaacatatgagtgcatgtgtctttatgatagaatgatttatatttctttgggtattacccagtagtgggttggctgggtcaaatggtaatttctgttttaggcctttgaggaacgactgcactgttttccacaatggttgaactaatttacactccaccagcagtatataagtgttcctttttctccacaaccttgccagcatctgttgttttttgactttttaataacagccattctgactgacaccttttttttaaactgtagcctgaacagccagggccaggtgcatctggacattccaattccaagggctcaatttatcatcaaatttgttttccacgttcaagatgaaatgtgctttgatctcagaaccttggttctctgagggctcagggatccgcagtgattcccatgagggtcctgctgtgttcactgtaatccaggacaggttcttttatcagctggaatgtgaccatccccttggccaggattcgcacccaccgagtgggaatccctcagtgctgcttgggccagcgcttctcccaaaggctatgcctcttgcccttatatgagctgttggggtcggatggtgacctcctcaataggaaggttctacttgattaaaaattcttctgccatttgaacgttagactctttttcctttgactccacggatttgtaaaatcttataggagataaagggctgcatcccttgagtctggagtatattatgcacatttgaaatgaggctgagttctttcagccagcccagtatcacttaggaaatgcctaccactacaacagcttgataaattcaaggagccgtctgttttcctctgctgagcctcgttgctgatggtttatgtcattgatgatactacttgtcagtcagtatctggaaaaagttcccatatttcaacctctcccttaaaagactcttcaaccctggattcttggagtctccatctatgtctatccaggccctgggataaggagtaatctgtctcgccctcccctatatcttttttttttttttttttttttttttgagacggaatctctctctgtcgccagactggagtgcagtagcatgatctcggctcactgcaacctccaactccctggttcaagcgattctcctgcctcggcctcccaagaagctggaattacaggcacgtgccaccacacccagctaatttttgtattttcagtagagacagggtttcaccatgttttccaggagagtctcgatctcctgacctcgtgttctgcctgcctcggcctcccaaagtgctggtattacaggagtgagcaaccgtgcccaacctcgccctctcctgtatcttttaatggaagaaaaaaatactgcagtacatagatttctttacaagctccaaacaaaactcataagaaaatcagttataattttaggatcaactgaaagttatattaaaagccataaaatgcaaaataatttaatagtgttgacattgaacttagtctcaaaatgtgctgagtttggaggagtcaggcaataagatccatgcctgagtccagtataaaatgtattgttatgctccatccgtattaactgagacaaggttgggtcttctccaagctttcttttgcttgctttttgtttgaatacaggtatgtatgcatgctggaggggttggagaaatactaagagatttgctgtgttttcctcctcctacagatctgcctgaatcgtcaatgtcaaaatattagtgtctttggggttcacgagtgtgcaatgcagtgccacggcagaggggtgagtaggctgagctgcccttttacagccagcccataacaagttaagtaataatacattcatttgtaaaaggttttgcaatccatagcattttttaaatagagcagttattgtgtttgaaatattttcttctaaaggtattcatttcttttgaccttttcatgtgacttttatttaacaaagaaaatcagactgagctgtaattaccttttaaattaacattctatgattttaaaaaagacttttgttgttcaaagtaatttgaaaagcaaccttccttcatgaagagtttcaaaataacatttcaaactgtgctgttcctcttactaccaacattcagaaccagtgtctgaactgaaatatttccaaaaggaattaaaacaaggacaacagatcatattaaacacatgttcttgaaatcacacacaatgggtttcaactaaagaaggctgttattttagttcagagaacctttagggtagaagaggactctaattgctgaaaacataatttatttttcttgatgggcttatttccaatggaatcatattagtcttgattaaccacaccagaggttcatttgttttcctgaaacctttcctacagaaatcctgctccaaattctttattttaaaacttgtagacacttgccaatgattcttacacagaattaccgggtgcatggggggagggggttgtaaattaccatcatgctggaaccataaaggatcacagtgtcacctcagatgggggtgttgacggtaaggttagctaactcccaatatacaatggaatcttcttatgtcttcattggatcatagattattttctgatggctgttaagagatgatcaagtccagtcctattattttactgaagaagccaggccctgagctgtggggatggtgtgcccaaggtaatatggccggcaagctgcaagctggttgaggaccctggaccactccctttccaataccccttggccttatccacacatgggagcggagaggcccgcatttgctgggtaggtggagcctacccagccttgctgaagggtagcttggccacagtcccaccctaacaagggcaggctcccggcagcaccttcctgtgggttttaaaacaaggcgcatgaccacaagttgcagagagaagccatgaggggcaggcatgaatctggggctagtacgtccacagcagcatctttgaggggacaggcaagacacttacatttgacgtaggctctgccacttgctgacaagttctactcaatttctgctttatagcagtctactttctaacttattaaagcctatcttgacagtcggccttcttatctgaagcaatgagggtaggtggttgattcatcaaaacaagtcggttgaagcaggaaagcattacatgggagacatatactctacgcattttattttgccttaaaatatgaaactgtatatctggcagccatattttgatggcgggctgaggcctttaggattgatttactgaatgtcattgtgcatcgacttcctgatataaaccacccaaaaatgcatcatcaacaacttctagttcgtttctttttgtggaagggaaccttagacactcaacagcatccaagaacagcctcctccttgtcctctgcagctcttcccaatcattgtgcagtagtcccactcattcctaatttttcagaaattcttttagtgatttctcttttttaatccagtgttcccaaaggattcaacctaattttttttaactttttttttttttatctttataaagacagggtttcaccacgttggctaggctggtcttgaactcctggcctcaagtgatctgcccaccttggcctcccacttgctgggattacaggcatgagccaccgtgcctggacttgacaacctaattttcatagaaaaaaatatattaaatatatatcatcttcatggtcatcttccattggatcatgtactttcagttagttacatctggcataatagcgagtccaaccagcatggacaggcttgggagtggccgccatcagtagcccttggtaaccaggtgggcaggggctgctggcccctgcatggaatgctctggtctatgagctgggcccaacaagggtgaagcacagcctcctcgggctttcttggtctccctttcccgccgtgccagaaccattctcttatttcacaatgaaaagaatccactgttggattcgcaccctggtgcgtgactgggagccagggaacagccactgggaacctctgcaagaaggaggcaggcgttgcaggaaggacacacggggacaggcttcaggaagtattagtggaaatcccatgcaccctgctaggattgcaggaaacaggattcctttgctcaggaaacggggggcctgcctcggaccccagcctggcgtgggacccggcagtcaccagcctctctgagccttctgtctgaaggagacagggatgcgccaagcatctgtcaggtcccgcggtgccccagggctctgggtctgtagccccaaagcacggtccctcctcactgctgagggggcttctcctcatggtcagacagttttccagattgaaaaaggaagatggggagatggagaaggaagtgaggtgggtgggggaggcaagctgatgaacccaaataatcttcatcactctctttacagccactaataggcagatgatgcatcttcacagcctcaggtttggtcgcccctgtgtggtgtgtagtgccggctttgggcttattcgcaccatggcgtgtgctgagtctggctgtgtcagtgttgggggggggctctgaccatggccccccttgcttctgctgtggtgatgcacagagcatatgccctaaccccacgtccctcccctctgccctgaaaggtgtgcaacaacaggaagaactgccactgcgaggcccactgggcacctcccttctgtgacaagtttggctttggaggaagcacagacagcggccccatccggcaagcaggtcagtgaagcccctgcatcccggtgggaggaggctgagcacctgggggcgggtgggctcgccagctgtcagcatgggtgcaggtagagccaacaagaaacccagtggggaccccacatgggtctacacagcctagggtctcccgcagtttccagatgcccctctcatccctgcccgatcttctctgaggctccttgctctctgctttgactgagtggctgagtttgccagttccttagcctgcgacacttttcttaactaaggtcatttctatagtgaactgctgaatgggtatgaatgtcatcactgtatcaaagtactttgtaaaggccgacatctgtgtggtagggtgacaaggtgtgaagtttaatgccttttaaaaatcttactggaaagacacccacctcttagtaaaggtgacagtcacggcagcagtgggagtcattgcaacagcttttgcatatggaatgatgtgtgcaggtgctgtgtggtgcattttatgcccatgatgtcatcccctccttatacaactctgaagaaggtggtatgattcttttctcacatacctaggacctgaggctcagggaagttaagtaatttgcctaatgtgatctcgctaagatttacacacacacaggtctgcctgtcccccaagaagctcttagtagcagctgtgcttgaactcgtggccatttctcctcggatgacctttagaaatggtttactggtgcggtgctgttttctctgagttcttattgggcaattcaggggcaagtctaaatgatgcctcttttcgagggaaagaagcaaggcaggaagctgcagagtccaacagggagcgcggccagggccaggagcccgtgggatcgcaggagcatgcgtctactgcctcactgacactcatctgagccctcccatgacatggagaccgtgaccagtgctgctgcagaggaggtcacgcgtccccaaggcctcctgtgactggcagcattgactctgtggctttgccatcgtttccatgacaacagacacaacacagttctcggggctcaggaggggaagtccagcctaccaggcacgtctgcagaaacagtgcaaggaagggcagcgacttcctggttgagcttctgctaaaacatggacatgcttcagtgctgctcctgagagagtagcaggttaccactctggcaggccccagccctgcagcaaggaggaagaggactcaaaagtctggcctttcactgagcctccacagcagtgggggagaagcaagggttgggcccagtgtcccctttccccagtgacacctcagccttggcagccctgatgactggtctctggctgcaacttaatgctctgatatggcttttagcatttattatatgaaaatagcagggttttagtttttaatttatcagagaccctgccacccattccatctccatccaagcaaactgaatggcaatgaaacaaactggagaagaaggtaggagaaagggcggtgaactctggctctttgctgtggacatgcgtgaccagcagtactcaggtttgagggtttgcagaaagccagggaacccacagagtcaccaacccttcatttaacaagtaagaatgttaaaaagtgaaaacaatgtaagagcctaactccatcccccgtggccattactgcataaaatagagtgcatttgaaataccgctgcctccaccctgttcatacatatataaaatcaaggcaggccatgagcaagcatggctcactgctccctggcctggccatggctcaggggctcattaaacaagtacttgtgtgtctgccacacaccagccactctcctgggtcctggagagacattaagcaagaatgacatggcataagtgaggggtacgactgcagggagagagggcatcatgggaggggagcaacccccacagagcggcagggggttgtcaggaaggctcctggggaccctgcatctgttgaggtctgaagggggcgagggaaacatgcattctgaagccgagatagctggctgtgcgaagatctagaggagtgtggactggcctgggctcagattctagagtgcggactgggccaacaggaggggacacaggacacggtgctcgtgctggtcctggggaagagggaaatggagtcagtcactgcccgggcctctggcttgagcaaccctggggagttcagcaggttcagtgtgggggccctgtaaatgttcagtttcatagattgatgtattgaagatttatggattcactttatggaactagaaattatagttcaagatttttgctgttcactttttaaattaactttaattaactttgttatgagacaccagaactctagctagagccccctgtgatcactactaagggtctgaaaagagtgacattttgcccaggaaaccagaagcaatgcttttccagtaacaccaacaagtaagtcaagactgtcatctgttggctgtcttgcttaggctaagacacatccctgataggccttgttagtgggggatggggtccagaaaccaagaaggtgtgaaagacattctttccctggagtaggagctgctgctgcagtgatccacagccagctgagggtccaggtgggaggcagggccgaggagagcccaggtaactgcatcacggcgatcaccagcagccggaaaggactgttgcacacttacctgatgtgaagtacaccctgatccttgctgatgggaagacaaatgaatcaagatccctgtcctctaaaaattcactgtccagttgaaatcacaggtagacctcctctaagtctgagcatttagagtccttcccagacagccgctgaccatagctactgtaagaaaccaacctgatggtttgatttttttccttcctttccctacccttgaggaggctcttaactgtattaaacaaaatggcagcaggtcatagaaaagaagatgttttcatagagaaaatagcttcctcccaggaaaagggtttcccccacaaaggctgtgtttttaagtccccaacataacaaagcaaaacccatgggtgtttcatttaaatgagttttctttctcttttttcactatctactttgagatgtccagcaagaaagcaattcattttttaaaaacacgaaaagagataaagcagaacccaactacagaatgagtaaagaaaagcactttggaatggcaaatctgtgctggggactggaaacatttgagcctggggatggctgtgattccagtgaggcttcagtgatggctccctgctaccttctgtggctaccatggtccactgtgccgttgtcacgcctcagggaacctgcgtggtccagaccatcaccccacctacccgactatatattcctgtttagcaagttctagagttgtcagaaatgaatgatggtaacatagattgaacctcaaacatggcatctgaagtaagacagtttattagtacatcactcacgggtgtactctcttcatttctgttgcttcagagttcactttgccataaacgtcacaacttgatacctcccatatttcattgtaactgcctccttctgtgagccccatgtgttttgtttcagataaccaaggtttaaccataggaattctggtgaccatcctgtgtcttcttgctgccggatttgtggtttatctcaaaaggaagaccttgatacgactgctgtttacaaataagaagaccaccattgaaaaactaaggtaccctgggtttagcttgtcatctgttctagaaatggtggctcagaggctgggtgcggtggctcaagcctgtaatcccagcactttgggaggctgaggcgggcggatcacgaggtcaggagatcgagaccacggtgaaaccccgtctctactaaaaatacaaaatatcagccgggcgcggtggtgggtgcctgtagtcccatctactcgggaggctgaggcatgagaatggcgtgaacccgggaggcggagcttgcagtgagttgcgatcactccactgcactccagcctgggcgagagagcaagactccatctcaaaaaaaaaaaaaaaaaaaaaaaaagaaatggtgtctcagaaaatgtacagcaaactgcttctcacttcatttttttagcaaaggtcagattttctggatcataaacctgggacttggttcttttttggggggtttcttgttttaaatttctgccagatcagctgcctcctttacttcccttcaaacaacaatgtgctgcttattacataagctagcagggtgtcaggaaattccactgatgtgttttctcccacccttatattagtaatttttatacaacatggagacattgaaatattttcatcagatggggtagcttttgatccaaatatattcaaagacattatcgctgaaatgccagcttcatacaaatcatcttccaggtgtcactacactgcatttctatggagcgtgagaactaatttgacaaaatagaggttttgagggaaaaaccagtatttattttttaatctcctaagagtgttattaggtaatttttcctttgcatgtttagcacactgagttaagtaaactgtcttttgagtgccactatgagcaaagtgtaaaaagtcaagtcagtgagaaggggaaacacgcttggtcagcaggtatgggattctgttgcaggtgtgtgcgcccttcccggccaccccgtggcttccaaccctgtcaggctcacctcggccaccttggaaaaggcctgatgaggaagccgccagattcctacccaccgaaggtgagtcttgagtagatgtgagtgctcagggcacacatgcagacatgaggttttcaatacgagactgaataagaatgggatcctagaggcgctgcctgtgaaatgctgagtcagcctcactaggtcagcaggctctgagggagggtctctgtgatctggggccagagggaggccccacggtgcccccatggaagcccacctagatcctgttggcgcactcagtgccccctgcatgatatggtgcagcatagtgtgagctgtgatcccttcagtcacccagaccagccacatttctggggccccactgggtctgcagcccgagctggctcctgacaccagcccccaatgccagccccaccatggtttccaaatgccaccacctggctttaggtgagctgctttagcccactgttactcttaaaatatttttcaaaagttacatggagctctcagaattgaccattttgctccagccctgagctgaggaagccctgtccaccctgtggtttcagagaactggatccttaacccagagtacctcacggctccctgctgtctcttaaccctcttgctaccctggtgaattacagctagagttcattctaatagttcttccccaccgagtttttctgatgtacccacaagaattcttgaatattgaacttagtcaacaagagtccaaattataacagtgaacaagattggtgtcaaaaaaaataagtgattgaaaaatcattgctgcatatgcagtaggcaataaactgttttaactcccttgatccaaaaaacgcaaagggtggggctccaaggaggaggctgccattcccaataagctttacccctgctcgtccccaaaggtggaaccataagcgagaacggctttgtgtggtagccaaaagcacatcttcattttcgtaaaaaagaaaaatgcagctctattaaaaaaaaaaaaaaagcacagccttatttttgagagccccaaactagaaacaatccaaatatccatcaaccagtaaaaggataaacaatggtatatttgcacaatggaatgaaccattgatgtatacaacattgaggatgaatctctagataattattctgagtaaaagaagaaaagccagagtatatactctgtgatcccacttatatacaattctgacaaatgcaaactgatagtgacagaaagcagactgatgattggagggagagggaagggagaagcatgacaagaaaactctttggggtgatggatgcattcatttgtccacttgtttgttgtgagggtttcatgggtgtaaacacgtcaaaaaatgaccaagttgtatactttatgtcaactatacctcaattaagctgtttttagaaagagaggaaggaaggggtagaagcctgaggtataagggtccctgcagcacctgttctaagaacaagggttaccatatgggagaacgtctccaactccaagccccaacctcagccctggcttcctgaagccgcaactctcctttccccagtggttttctcagttctcattgagccttgaacacattaagctgtatcttattttcacatctcttttgtaacttccctaagatctcggtccgtgtctttctttatacttggtactttttcaagtgctttgcacctatttgttaaacagttttttaaaatctaaacaaaaatcgatccttctattccagatttggtggggtggaggcaggtgatgcttctgtttgaattttgaagtttaaataaatacaaaaataattcccctcttgtgtacatccttgatttctttcctttaccccaccttggccttcagctataacagatgagttagcactgctttttccttaaggagttactgatatttttgaaacccgctatagcatggctttttactttgactgtacaggacaatcccaggagattgctgcagtgtcagaatgttgacatcagcagacccctcaacggcctgaatgtccctcagccccagtcaactcagcgagtgcttcctcccctccaccgggctccacgtgcacctagcgtccctgccagacccctgccagccaagcctgcacttaggcaggcccaggtatgctttcagtactaatatgataggatgtagttcaaatccagattctgctacttgttaatgtgtgagcttagataagttgcttaacttctcggtgcctctgtaaaatggagataattcagctactcagatggttaaatgagataatccacataaagcagttagtttggtgcctggagtataataataagagtgtcatatattttaatttactagttataattttttaagtatttgaatagttagaccactcatgcaactaaacgatgacactattgagaatagcagagggactagtaataattaggcctgtacagtaaaatagagacaggcaatctaagacagatggtcaccctaagaagcatcagttatactctctcatcattttatttcaaaattatttacaagaactataccacctatatacagagtgtctccgtaccaaacttagcactgtattgtttatgtatatcatctcatttttatgctgtttttggaagtaaccatttctgtttgctgcaataacgaatgatatttcacaatagaaaacttgaagggaggagaaaacaagcaaataagtaggagataatcactggtaatttttcactgctattaatattttttgtttataattgtgtattttaacataatttatttgtacacagttttatatgctgctttgttttgccttaaaaattagtcccatttacaatggcattaaaaatcctatttaataataacactatacttgaatataaatgtttaagtacttgcaaattattgggcatgtattgatgtatcattttttgctgttagaaagttctagagaggtaaatcttgggacctctttattcccctaggagagattcttaaaagtaaaatattgggttgaaagattgtatgaccattttaagcctcataatataaaaatattttttcagaactcatatacatttgcgttcccacattgttattgtctttctcaccatgactttgctaacactaaattttaacttttaccagtttgataaatacaacaaaatatctcaatttgttgctgtctagtagttctgtcagttaccaagaggagatgttggacttttccactataattgtgtctcctttgagttcatcagtttttgcttcatgtattttgaagctctgttgtttgcgatacacacaattaggattgttgtgtcatcttagtaaagtgacccttttatcattatgtcatgtctctgtttagctctggtaatctttgttctaaaatctactttatctgatattattatatccactccagttttattttgattagtattagtgttgtctttttgcaatcatgaatgatatttcacaataggaaacatcattcatgattgcagcaaacagaaatggttacttctaaaaacaggataaaaagcaaagtatgaatttttccatccttttaacatacctatggaattacatttgaaaagcgtttcttgtagacagcatatagattttttcatccatttagccagtcactatattttaataggtgtgtttagaacattcatatttaatgcaattgttgatatgtttggatttaagtctaccatgttaatattattctgtttgttctctctggtttttgtttcattgtgctttttctgtgttcctgtagattagtattccatattgatttatctgcatttatgtttttgagtatatatctttgtattttttttgtatgattacactagggcagtttctcaacctcagcattttgacatattgtactgaatactctgttatgtggggttttcctatgcattgtagaatgtttagcagcatccatggcctctatcaactagatggaagtaacatgtgtaattatgtttccaaacattgccaaaatgtcctctgaaaggcataacctcccttgattgaaaaccactgctctaaagattacagtatgtatgtacttactttatcacagtctactagtcaatatttcttcactttaagtagaatacagaaactatcaccttttaggtcgcttttcctcttccttttataatacagatgtcttaaatactacctttatgtgtactaagagtcactgcagatgttgtaattttgctttcagccaaacataatctttaaaacttaactttgcttattattttctgtctgaaaaactttctttagccattttttaaagcaaatctgtaggtgacaaattctcttcattttcctttatctgagaatgtatttattcctagaggatagttttgctggatatagaattctgcgttgactgttttctccattcagtactttaaaaatgttgttccccttccttctggactccatggtgatgagaaatccactaaaagttctacccatagtctctgttccagggaagggatgtggcatgttattgcaagaagtgatagaaagtagagatctgccagtctctaggctatgatgcctggtgaggagcaggagggaggcatggcttttttcaagtgttgagctggagtaaggtcaggtatggtcaaaacacttctgtgtttctggactgctctttctctagtcttttggctcaagatagcaggcttttccagttgtgggcctatccagagcccaggccaagatatataaaagaacacacacacacaaacacaccactgggtagttccttgagttctgagatccctagccagcatactttatgtccagacatttttgttgcacttagcaggagaaatagggtgaaatgtacttattccaccttgtccagacctcatttctccttgtatttttttgattactggtacacttgaactactttttatgtatccattagccaatggtatgctggcaaactggcccttttaaaaaaaaattctgatttacagctgatttctctggtataaaacttcccattgtggccagtttcaagctactagtgtgacattactgaatgaggagtagggaactggcagttatgagccagtaccagccagctcaagcataccactgctgttcactgtatttgttctgtgacttgtcttttcctatcctttgcctatttatttctgtttgagaggtagaggttttcttcttggtttataagtttcttttaaaaatattttaatgtaattttagttatgattttttggcataagaataattctggttttgaatattgaatttttcttttgtgaattttcccattcctttcatgcttgcaaagtccactcccatttcattattagtgaaagtccatatataatttcttctgtttattgacagttcttttacatttgtttttctaatttgttttagatttgcagtcatggaaggtggtgagcatgccctaaacttttctggtccgtggacttgagaatctgacaaaagctatgaactcataaaatgcaccaatattagcattttgtgtgcacatttcaggtagccaaagagcagagaagctcctttcccatgtacccctcatcctgaacttttttatttattttaagcaactcacctgtgtaccatgtcaaactggggctaacagaccatgttatcagaggaaggtattcctactgctggtgtttttttctccaccagcagggactcttgcaagatttcctttaaagcaggcccgaaaaagtccttcattctgttttatgaaactaaggaaatgttaccctttaaacatcagtcactgaaaaatccacatttctcactccaggctggtgtctgtctggaacttttctaagacatatgatatagattaagtgggtgatttctctcccatcacacatagggaacggaaattaattccatgcaggtgtggagaatatttggaggtgactcttgtttggcagcacaaattgaatccactgacattttgtactttggggttcctcatgccctgcccaggacaacgtgacacacagctaatcctgcttcatttgtcccaatgtactaagcattccagaagaaaacactaccacaaacaccatcttggtccacctcacatttaaactgtaagctaggtctttatagaaaccatttcattttctataaatgttctgtttgacttataaatgaaggagagctgaatgaatgtaccctcttgtccacaaacatacctttgcaatgtaccacttccttcatggtaaaaggacccttggaattcaagcttctcatcctaactccccagtcttgatcaaggaaacaaacttttttcatcccatcagctatattagaggaaaaataattcagtgtattcatctagctgttcactgcatcttaaagaaggctctatgcattttctgcagaggtggagatcttcagttcagtgatgctgtcaaaacacaacatttctcctaatcaacaacttttatctgtctgtattatatgcaacatataatattttataacacaagactcaccagtctggcacagtctcatctaagaaaaggctactttgtttaagttgccatgggaagacggtggcagctattacaaggaagtccaaattcctcttcctcctcaaacctttataaaaggtgatgaatgatgagctggggctgttactggtaaacagcagctactccttcaaatgcctggtcaggatgcagatgtgagcaaagccaattaatttaagccacgattgtagatcagtcaggtgctggccagttcagaggttaagtccaaactttcaaactgttcaacaaaatgaatttggctccgaatggataagggcatgtgcccttctggacctgtgtgggtgtctgatattgaaacctgcacttgcagagcctagaaatctggggattaggtccttgctcatcagaaatgccaatttgtaatgagaaaaagaagacccatttgttagtatgttctcctgaagaagatgaaatacaagaaaactgagttttatgagagcttctgttgctacacacaaagcacaggctaataactggtaaaggtgctggtgagtgtccttctgtgccctttccctgcattccagatctcaccctcccctaagacctctccacagtcctccctccaggacctctgatcacctgctgccgtagcctggagttaccagtatgccagctctgccctacttctgaaggcatagactgatcccaggcacagctaagtccagcccctcgaacataatagatgtgtaggaaatatgctgaattgatgtggacttaaaatagtaaaaaatcagttgtcacagtgtcattctccatggcgccatcacactcagttacggattaatgacaatgagtccattccccctgtaaatctaaaacacagctaccaaggtcttggactctccctgccacctacccaatacttccagaaactttagctgaactttctttggcatcatatactaattattcatcagacacaaacatcaaatgtctttaagggtatcagttatccacggaagcatgatctctccctgaagggaacttctcagaacatgttttcaagggaagttgttcacgtgattacagggttcaaaggggtatttgtttcccacttatttgttactataaacatgaaaattacataaaaagcagatgcctgatattttagcctttacatttgctaataggtaatataggcctataattaaaaatctcaacagtataaagggtcattcggaaaacagtctccttcacacctgtcaccagtctcccttcccagaagcaatcgtcactgttactaggcttttataaaacgcaatttgggatacaatgaaaagtctcagctctaccccccacccacctctctgctaggagagattatggaaattttcaaacactcaaaattggagagaagagtacagtgaaaccctatctacccatcactcaacttcagcaaccgtcaacttgctgtcactcatcttacatccttgttttgaattcaaatggcaacacattatgtactttcttctactttggttattccttattagttttatacatctgcttcattcttttcactggctacatcattatttgtgaagctataccatgacttctttaacctgtcccttccagattcccagatgggttgttttcaatcatttgctacgtcacacaggcataatcttgcccaagatggataaattcctgaaagcacaattgctgtgcaaaagtcatatgcatttagaaatttgatagactgagtgaagctgcctttaaaggagctgtttcagctattctattatccagctcctcaccaacacagtgtgttcggaggtttttcatctctttgccaatcgataggttaaaaacagtggtctccatgtttttcttcataggaaatacttcatagtgagatgaaataccttttcacaggtttaagattttctttttcatgaactgccttttcatctttgccatttttaaaatttaagatcggggtacatgtgcaggatgtgcaggtttgttacatcggtaaacatgtgccacagtggtttgcagcacagatctcatcacccaggtattaagctgggcatccattagctattcgtcctgatgctttcctcctccccctgccccattgtgtccatgtgttctcatcattcagctcccacttaataagtgaaaacatggggtatttggttttctgttcctgcattagtttgctgaggataatggcctccagctccatccatgtctctgcaaaagacatgatctcattcctttttatggctgcatagtattccatggtgtatatttaccacattttcttacccagtatatcactgatgggcacttaggttgattccatgtctttgctattgtgaatagtgctgcagtgaacatatgcatgcgtgtataatagaatgatttctattcctttgggtatatacccaataatgggattcctgggtcaaatggcatctctgctgctaggtctttgaggaatcatcacactgtcttccacaatggttgaactaatttacactcccaccaacagtgtaaaagcattccttttgctctgcaacctttctagcatctgttaactttttaataattgccattctgactggcatgagatggtagctcattgtggttttgatttgcatttctctaatgatcagtgatgttgagctttttttcatgtttgttggctccatgaatgtcttcttttgagaagtgtctgttcatgtcttttgcccactttttactgttttcttgtaattttaaattccttatagatgctagctattagacctttgtcagatggatagattgaaaaactttctcccattctgtaggttgttcattctgtgtttcttttgctgcagacactctttaattagatcccgtttgtcaatttttgctcttgatgttgtcatgaaatcttttcgcatgcctatgtcctcgatggtgttgcctagattttctcctaaggtttttatagttttgggttttatatgtaagtctttaatcgatcctgagtttatttttgtatatggtgtaaggaaggggtccagcttcaattttctgcatatggctatccagttcttccagactatttattaaatagggaatcctttccccattgctttttctcaggtttgttgaagatcagatggttgtaggcgtgcagtcttattcctgggttctctattttgttccattggtctatgtgtctgtatcagtaccatgccattttggttactatagctttgtagtatagtttgaagtcaggtagcgtgatgcctccagctttgttctttttgcttaggattgtcttggctatttgggctcttttggggttccatatgaatttttagttttttctaatttggtgaagaatgtcaatagtagtttgatggggatagcattgattctatttgggcagtatggccattttcatattgcttctttctatccataagcatggaatgcttttccatttgtttatgtcctctgatttctttgagcagtggtgtagttctccttgaagaggtccttcatgtcccttgtagctgcattcctaggtattttattatttttgtggcaattctgaatgggagttcatgatttggctgttggcttgcctgttggtgtataggaatgctagcaatttttgcacattgattttatatactgagactttgttgaaattgctcaagaagcttttgggctaagacaatggggttttcaagatataggatcacgtcatctgcaaacaaagttagtttgacttcctctcttcctatttgaatacacttcctttctcttgcctgattgcccttcccagaacttccaatactatgttgactaggagtggtgagagagggcatcttgtgctggttttcaaggggaaagcttccagcttttactcattcaggatattagctgtgggtttgtcatagatggctattattttgaggtatgttcctttaatacctagtttattgggagttttttatattatggggtgaattttattgaagactttttctgcatctattgagataatcatatggtttttgtctctagttctgtttatgtgatgaatcacatttattgatttgcatatcccgaaccaaccttgcatcttgggacgaagcctacttgattgtggtggataagctttttgatgtgctgccagattctgtttgcctgtattttgttgaggatttttgcatcaatgttcatcaaggatattggcctgaggtttttttttatctctcccaggtgttggtaccaggatgctgttggcctcacagaatgagttagagaggagtctcttctttccaatttttttggaatagtttcagtagaaatggtaccagctctattttctacctcttgtagagttcagctgtgaatctgcctggtcctgggttttgtttggttggtaggctatttactactgcctcaatttcaggactcattattggcctattcagggattcaatttcttcctggttcagtctcagagactgtatgtgctctagattttctagtttatgtgcatagaggtgtttatagtattctctgatagttgtatttctgtgggatcaatggtgatatcccccttatcatttctgattgtgtctatttgattctttatagtctagctagtgatctattttagtaattttttcaaaaaaactagctcctggattcactgatttgttgaagagtttttcatgtctatctccttcagttccactctgatcttggttatttcttgtcttttgctagctttggggtttgctcttgtttctctagttcttttagctgtgatgttaggttgttaactttgttaactttatctttctagctttttgatgtgggcatttagtgttatacctttccctcttctgctttagctgcttctcagagattctggtatgttggctctttgttctcattagtttcaaagaactttttgatttctgccttaatttcattatttacccaagagtcattcaggagcaggttgttcaggttccatggagttgtgtggttttgagtgaatttcttaatcttaagctttaatttgattacgctgtggtttgacagactgttatgatttcagttcttttgcattagctgaggagtgttttacttctgattacgtgatcaattttagagtaagtgctgtgtagtaataagaatgtagattgttggttttgggtggacagttctgtagttgtataacagatccacttgctccagagctgagttcaagtcctgaatgtctttgttgattttctaatattgtcaggtgggtgttaaagtctgcaggtctctaagaatttgctctctgaatctgggtggtataagatgcacacatatttaggatagttagctcttcttattgaactctttaccattatgcaatgcccttttctttttttgatctttgttggtttaaagtctgttttgtcagaaactaggattgcaacccctacttttttctgttttccatttgcctggtaaattttcctccatccctttgttttgagcctgtgtgtgtctttgcacatgagtttcttgaagacagcacaccaatgggtctttcttcattatctagatgatattgggccagatatgaaattctgggttggaaaatctttaaagaatgttgaatattggtccccaagctcttctagcttattgggtttccactgggaggtctgctgttagtctgataggctttcctttgtaggggacctggtttttctctctggctgcccttaacattttttctttcattttgaccttggaaaatctgatgattatgtgtcttggggttgatcttctcatggagtatcttaccttctctggatttcctgaatttgaatgttggcctgtcttgccaggtaggggaagttatcctggattatatcctgaagtatgttttccatctttgtgggcttatctacctttgatcttcgaggttgctgacacctttggatgagatttttgtgggtcattttctgtttaacagtctggccactcttccgtaaggctgctgcaatttgctgggggggctctgttctgcccgtctcttttgggtaccccaatcacttgtagatttggtctctctacataatccggtatttctcaagaccttctgttcattccttttcattcttttttctctattcttgtctgcccatcttatttcaggatagtcttcaagctccgagattttttcctctgcttcatctattctgctgttaatacttgtgattgtgaagttcgtatagtgtgttttttagctctaacaggccagttatgttcctctctaaactattttggctgtcagctcctgtattgttttatcatgattcctagcttctttgaattgggttaccacatgctccttcagctcagcaaagttctttattacccaccttctcaagcctacttctgtcatgtcagccatctcagccccagcccagttctttgcacttgctggagaggtgttgccatgatttggagaaaaagtggcactctggctttttgagttttcagtgtttttgtgttgattctttctcatctttgtgggcttatctacctttgatctttaaggttgctgacctttggatggggttattgttgttttctgtttaacagtctggccactcttctgtaaggctgctgcaatttgctgggggtctgctccagaccccagtagcctcagtttttcttgtaccacttcccatggtgagggttcccttggctccgtgtcactcccaggtgggccattgcctcaccctgctttttttttttgttctccatgtgtctatttgtttcctgaatcaatcccatttagtgtataatcaaattttatttttttctagatgaccacctagtaatccttaataccatttattttatttgtccttgattggcctatgttttattagatttgtctggtttctcattctcccctaccttcaaccagctcaaagtcttatatgatcttcctcttgctaccattagatcttggaaacatcactttaatgtcccctctacaaatgtgaaataatagtacttgcttttgggactttgtgacagttacatgaaaatattattaagaactttcctctaaacattgctttacaccttgctcactggttccaatttgtagtgtatattttttaaatagtctatatattctcttctgttttcctccttagcccaaagattgaagttattttttaaaatatttaaaatatagaaaagtaaaaactaaaatttactcacatttattctacatagaaataactagttttacatctttctagatgtacatgcctatttaagtttcagatatatatcctttttcaaaagaagtgaaacattaaagtcactacattagcctccctccagatacaagcactgtcataagtttgcttaatgttttcaatatttttgtataaatatgtatccattaatatagtgtttcgtgttttaaactttacgtaagtggtatcaaactgtacttaccttcatgcaatttgcactcatctatgttgtactttttttgcttctagaagttctctttggttctaattcaactatgctagcttgtcttgtacttctttaaacatagtaagaaaactttttccaataatacccaaatctgaagtctttggatatgttactgctgaagtttctatcacttctcactcctggttccttgtttccctgtatgcttttttttttttttccatgagttcacttttttaaattatagttcttcaaggcctaggatgcaggtgtgttcttccataaagggctattttgcctctgccaggtgcctggaggcagtaccagtttgagaccactttaaaatggcttggagcttattgaaatacccaggtgatgtgatttcagcttcaagtcctcaaggacaatttgtggtgacaggtttatttttctccctcggtctgtccagcaccagaagaatgctccttgtagtatcctggggatagattatagtatgtatttacttctagaagattcttaacctgaggtcttgtctgtagagcccaacttgaatggagaggagtcaggaagagaattctctctcattaaacttggacatttggtttctgcccatatgtcttgaccttggttggatttctctattcctcactgtgaaagagtatcaaaacccacatttaggtttccctaacttggcagatgcctccatcttcagttactactccctctccaagctgctgctttcacttagacttaaaacatttgctgtcttgtaactcttggtggtcatcagagaaggggtagggcacaacaacagagcctgccatgttactggaaatggaagacccgcctgtcaactttggcgagttccatgatacctacattagggtttacgacatttatattctgatctatagccataattcccacaattgtttttagctagaggtagaccgaatttgcacagtgaaacatattgatgccgccccagccctgcatgagctcgtcagggatctctggggcatctctggcattttcctgtgatgaattccagtcttcctgcagagatttctctggataagcagggcatgtttactctcgtttaccatgtgaagttgataacagctgagacttcatgatgctggtcaaggcaaagtggttatatctggatttaaaattgttttgaaacctctaaaaaatctgaaatatgtggctattgccagaacatgagcagaatatagaagaatggaacagccctatttaatagcatattaatagcatacctggatttttcttcaatatctggaagaagttaagagggcataaaaatgaggtttgaattcatttccttgtttaaaatgaaaatagatttaaagaaatgtttatcgtgtgtgagcaatctgcttagagtcatttctcagctcccttcagatgatgcttggtgatcacactggacttctctgggagaggttcaggtttaggttttgcaaaggcagaatgaaaagcaacacctagaagacagcatggcaatttcatcccttcctccagggtcaaaatgtgcagctggtgcttcttgcatcatgggttccacacctccatgcctaatgtctaaggagtgaaggcacatcttcttggactaacccccactgttccatggccattctgtcccagttaagccctggcaggaagccagcatcttacctaggcaacatctttgcttgcaacctgtctcatgcttccatccaaaccatgtcctggccatggctggaggaagcagatggtgcctgcgctgatccccaggttggaggtcagacccttcaatcagcgtctcagtcatttgggttttcatcactatggtgaccatataatttatcttctaaagtaggagacatgcctgagagagtgtgattaataattaaacaggacgataaacataaattgggaacgtcccaggcaaactagaatgaatggctaacctaactatctcctatgtttccatgataaatccaaatatattgtgatacatacctcactttttctccagcattgcaataaaaacctgacgttattctttattgccaagacagcttagtcatacttagcagcaaaactagtattgctaattatttcaatttgatgagtgcatacatccatttttacatgacacactaatgtcttgctcacagttttctgttatctataggaaggggagcttgatttgttaccttagttaattatccaaagtttgttggtagggttatggtgctttttggtggtaaattcactccattaataatagttgtaatccagcagcagctaacactcatgggttatattgcatgccaggccctgtgctaggagcctcaatatctcatttaaccctcacatccacccgggaggaagggactatgatcatccctgctccaccagtgaggatactgtgtgtgtatgtggaactggttgaatatataaacaatccgtgctcttgggcacattatatggcctttattcctagctagggaattttttctatttaatgtttcttttaatgaaaactaatgtagaaatatcacttctaagtctgtcccttgttcaggggctttttcctagcccaatgtgtccgttgttccaactcagcttatcttccacacacctgtggacacttgtgatttacaaacttctgtggtagcttcctttgctttacaaagatatgttaaatggtgattatattgttgcattctttcagctgagccccaactgctaaagaaatgtaattttcatatgataggcactgtgagagaaattcaactcaagtgtttgaaatcattgttgagtgttgctagatatatactgggtcctatgatggtgaattgaagcacttggttattaggggtgttctgtctccctggaggttctagcaccatttccaacagacattctgtgcattcatgagtgtttccgggcttcaaagacaagacatggcacccacattcacctggggccaagagcagagatgtgtccaacacttactgacttctggacacagctccaatgaacccctctctcatgggtatccacaggaggggccccacgaaaaaaaggggcatgtgttcttacatttttttttttttttttttttgagacagagtctcactctgtcacctaggctggagtgcagtggcacgatctcagctcactgcaacctctgcctcccgggttcaagcgattctcctgcctcagcctcctgcgtagcctgggattacaggcatgtgccaccatgctaggctaatttttggtatttttagtagagacggagtttcaccatgttggccaggctggtctcaaactcctgacctcaggtgatccgcccgcctcggcctcccaaagtgctggagttacaggcatgagctaccacgccccgccgtttttcttctatttctactaaacatttttaaattgcggcatgaaggaatgctgatattaataactattatctgtgtgctgggaacttcctatgcattattttctttaatcctcataacaatgctgagataggtctttttccccacattttccagagaaagaggtcaagtgacttgcacaagtcccaaagcatcatttttggctaaaacctagcgtggaataaccccaccttccctggccagctccctcacactggcttctggtcaacacagccctgccccttagtgtgtttacaaagcttgacttgcccctcagaccactgcatcaattctctgagcttatgagaaagtatctagtggaagaacttcagtgtatttcgcggagccttcagagcaacatgtggaacagcgcctgcacgtggcagactgagcacaaccatcctcaccgtctcatccacccacagatgaacgagtcctgctatgtgatgttggcaaaactgaagaaacgaatgtgatgtttgaaaagattttcaccaacttcttattttagggtgaacagagaagccgcctaactaaaagcacaggaaagtgtgtatcctcagggtgacactgacagagaaaccccaacatcaacgctaccccagggcccaggggcagtccagaagccccatagttgagtgtttataactacgatccatggataagtcttaaatgttacagaaaattttggcaagaagattaacagaggtcagcctccacccaccttgtatggtgacaggatgatattcaggaagcagggcctgtgccaagcggcaggccctgcttctcaggggcctctgctggctcctggtaagtgaccctgcctaaccctatgtttattgcaggggacctgtaagccaaacccccctcagaagcctctgcctgcagatcctctggccagaacaactcggctcactcatgccttggccaggaccccaggacaatgggagactgggctccgcctggcacccctcaggtttgtgtgacatgccatgcccatctctttctctctcaaactcttgtgggaccaaccacgactaatccaagccaggacaggggtgcagtggtctaggccgtgcttcctgctccccctacaactgggaataccgtaaaatagacatgacaattaccaggaaggaagcagtccctgtgagcttataatcacaggcattggcacacagtgcctatcaacagccacagtggacctaagagagcaaatcaagatgtcataaaactacagtacctcagaaagccaggcctgtaagacacaaagaaaaagaggagctaccaagtagcatgacagtatgaagactggacacctgtgttagtctgttctcacattgctataaagaaatatcgaagactgggtaattcctaaagaaaagaggttcaattggctcacagttctgtaggttgtacaggaagtatggcagcatatgcttccggggaggcctcaggaaacttacaatcatggcggaagggggagccagcacttcacatggctggagcaggagaaagagaaaaaggggaggtgccacacacttttaaacaaccagatttaatgagaactcctatcacttagaaccaaggagatggtgctaaaccattcatgaaggatctagtcacctcccacaaggctccaccttcaactttggggattacaatttgatatgagactggggcaggaacacagattcagaccatctcaatgcccacctccacaactctcagcagaatctgcccagttcctgaggtcctgagacattagtcgggttggaggcatacggctggagcaagggacatatggggagtaagggaaagcagctgcctggcagcaggacactgggaaaacagggacaatgggcaaaaggaatcacctttcacagcttatcctgcttggtccactaggaaggcagagacctcaatcccaacttatgctgggaggctaaccccatggtgtaggggagccagcttaccctggttggtgagagataaccaatttccaggaattttgcaagctaggtgttaaacctagccaatattaaggattaaattatacaaatttatgatattttatattagaaacaaaggtaataagtgctcaaaactcacttcacatttttctccattttgctataattgtctgtgctcttgagattgcactcatccattatttctgtatggcagaaaacctaggtcatggtagctgcctgcatctcttccatgtttagtgatgtcaggtggtagcttgaaaccagccacaggaggagtatttacaccatggacattggcaaatactgcaaatcaggctttcctgcccccaaccccatgggctgttcaacatttaccagcacacagatgagttaaacccacagccaaagtactcttctgacacacatgccctcttggcaggaagcctgctttgtgagctcaaaagaaccaaaggtactgtgttggccaggccctgggttcagtaatcctgtatctctgaaggagaagacacactggagtgattttattacagctcttgggaagaatgtttggcccgtgaaagaaagagctgcttaataaatgtcagagataaaggcggtcaaagggtcaggacaattgtttaattcccaacttcataaatagagaaaaattgcatagcatcctaattatttcattgtggtttgcatgttgatcttgaagttatttttcttgttctatttgaggaagaaacactactttacatgaaaacaatgaggggaagccctttttcttaaatgccctcaagctgtggccaatcttacctctggtcagttgctgattttggtcctgtcctgcacatttcattttttagggatactgggtgcccacctttgctccctgttctctggagctgtgctgtgggatgcagggactgctaggcatgttgcgcctggtaaaagtcttactgtattttgaagacttagtaccctaaaatgtcaactatccatttttttctattgatgatgacctgttgaaataatcctctaggtatactgagttaaatgtattactaaaattaattgcacctttctctttacttttttcatgtggctactagaaaatttaaaatttcttgtgtagctcacattttttctgtgggacagtgctggtctagagttgacttgtgggtgggaagtgcggctttggagacaggtttcccacccccgttatgaggggcagtggtatctgacacagaaaacccttcagactatcagaatacatctccaaccccagacctctctatcctcagaatcacttctcaaggtctctgatcatttttttttctcctctcttcattcagacctgctccacaatatccacaccaagtgcccagatccacccacaccgcctatattaagtgagaagccgacaccttttttcaacagtgaagacagaagtttgcactatctttcagctccagttggagttttttgtaccaacttttaggattttttttaatgtttaaaacatcattactataagaactttgagctactgccgtcagtgctgtgctgtgctatggtgctctgtctacttgctcaggtacttgtaaattattaatttatgcagaatgttgattacagtgcagtgcgctgtagtaggcatttttaccatcactgagttttccatggcaggaaggcttgttgtgcttttagtattttagtgaacttgaaatatcctgcttgatgggattctggacaggatgtgtttgctttctgatcaaggccttattggaaagcagtcccccaactacccccagctgtgcttatggtaccagatgcagctcaagagatcccaagtagaatctcagttgattttctggattccccatctcaggccagagccaaggggcttcaggtccaggctgtgtttggctttcagggaggccctgtgccccttgacaactggcaggcaggctcccagggacacctgggagaaatctggcttctggccaggaagctttggtgagaacctgggttgcagacaggaatcttaaggtgtagccacaccaggatagagactggaacactagacaagccagaacttgaccctgagctgaccagccgtgagcatgtttggaaggggtctgtagtgtcactcaaggcggtgcttgatagaaatgccaagcacttctttttctcgctgtcctttctagagcactgccaccagtaggttatttagcttgggaaaggtggtgtttctgtaagaaacctactgcccaggcactgcaaaccgccacctccctatactgcttggagctgagcaaatcaccacaaactgtaatacaatgatcctgtattcagacagatgaggctttccatgggaccacaactattttcagatgtgaaccattaaccagatctagtcaatcaagtctgtttactgcaaggttcaacttattaacaattaggcagactctttatgcttgcaaaaactacaaccaatggaatgtgatgttcatgggtatagttcatgtctgctatcattattcgtagatattggacaaagaaccttctctatggggcatcctctttttccaacttggctgcaggaatctttaaaagatgcttttaacagagtctgaacctatttcttaaacacttgcaacctacctgttgagcatcacagaatgtgataaggaaatcaacttgcttatcaacttcctaaatattatgagatgctggcttgggcagcatccccttgaactcttcactcttcaaatgcctgactagggagccatgtttcacaaggtctttaaagtgactaatggcatgagaaatacaaaaatactcagataaggtaaaatgccatgatgcctctgtcttctggactggttttcacattagaagacaattgacaacagttacataattcactctgagtgttttatgagaaagccttcttttgggggtcaacagttttcctatgctttgaaacagaaaaatatgtaccaagaatcttggtttgccttccagaaaacaaaactgcatttcactttcccggtgttccccactgtatctaggcaacatagtattcatgactatggataaactaaacacgtgacacaaacacacacaaaagggaacccagctctaatacattccaactcgtatagcatgcatctgtttattctatagttattaagttctttaaaatgtaaagccatgctggaaaataatactgctgagatacatacagaattactgtaactgattacacttggtaattgtactaaagccaaacatatatatactattaaaaaggtttacagaattttatggtgcattacgtgggcattgtctttttagatgcccaaatccttagatctggcatgttagcccttcctccaattataagaggatatgaactgagtttttcttttgttgtttgttcttagctgtaattcctatgcttctatttcagagagccaggagagtttgatattaaaggaggttaaaactgtgatcttatgccatgtcatcaatggccacttaggggccatggctgatgacacattcttatctctacagtactaatgtgttattatagagccatgcattttatttctgaataagaacatatttaaactaatattcccttacaatatggacagtattaatccttccaagatgcagtatttatcaagtgaagcatatttagcagcaaattccattttaacataacttaggaaccaataaccagggtgttttgtggttgggggaggcacggggtggagtattcttttttatatcctcaaaacaaaaaaaatcaatacttatatttcaatggcaatctagtatttttttaaaagactgtataggcatgaataatagaggtggtttgagttttgtagggccatcacctggaaagtcaatgtgactagacacaaagtagcccagaggctacttttcttcctacagcttattatagttgtaggttctatgacctcacttcatgggttccaggcaattccgctgaaaggtttgtctcctgaaattttttaagtttgttttcctgacacatgtaatcagatgtgtagcaaccgagggaaacgaagcctaacattctccattgtggaaatacacacaggaggttacatttcacagcgtggatttttccagcttacacatgtgggatgacatcacagaaaccacaaaagcagcaaattaaactgtaggagagtcaatactcctgacgagtctcggggggggggcatttttatgccttcttaactttatgagaattctcaggctgaactataggccattgttcccaggcaaatcaatacatcaatgcatcctcaaaaaaaaaaaaaaaaaaaaaaaaccggctaaaactgtgtcaaaatgttcttaaggagcctatggtctccacggtgctaaaaagagcctggtgctgggccgactggcagggctgagcatcctcctgccccctcgccactgatgtttactaagcactctgagccaatgagacccccagcagcagaaagggcacaaggtggcgccagggcagcagggccagatctttctcatgcacctcgacctcttgcagactttcttcgtgagatgtactactcatttcaaaactgctttgcagggctcccctatgtattcggggggcccacggcacactcaggctggagatccttcctcactgcgctcaagatggcctcagccagacaccagttacccagctgaaagtcacaatccctcccagaagtctcccaacactagtgctgaccagaggtggggctctcaggctaggagtttcacacacaatgacaggctgctgggggacattgcaggaccccttttcctctcctctccatgctagaagccagccctaggcagctgcagttactccctgtgactcagcagcaggctgattcaacacagctgcccacacaaagccagtggctaatacatctgtttacctttccctatcacccagacacaagcccctttcccaggtcaaaccacaggccgatgcatctccagtttgacagtcaaatcactacttccattgctactttagatcagccaaagtggtgactgctgcagtgtgtggctatccctacaaggcccacccaagggatgcccaaagcccaaccttctccagggctgcagcccagagcaaccccaccagcctaagtccagcagaggacctcccacccaatgtcttgttctaattagaaggggaagttagccacagaaaatcaacttatctataattacaaaattctcttgactcaccttaaagttcctattgacatctactgcttttaaacctatttgaaaactctgatactaaaacaaatgacactctaagaaagtttgggagccccatgctgagaaccatttctgtgcagtgaggatgtttccagaagctacttacctacatgtgaatgtgccattttctttccttttgtagagaaaatcccctttactttttggaacagtaatggcagcttctagtacagccattacagtttcatatgagaaaaattaagaataactataaaattgttaaaatatccaataatggataatgatggccagaagatttaacatacaaagtaattctcaatgtaaagctattcagctcttccaggttgaatgccctgtaacccaccctgaccttccacatcatcttcaaaaagcagtttctctgttccccatgattctcctataaggtaactctttagtcctccatttagcacattttaaatcctccaaagaataagtatcatgtgattattttagctttacaaaaaaaaagttgaatggcgttttattttcatggcctataagcaggtaccttagtagggcagatataggaaaaacaaattagagcaaaacaaatcctctacaaatccaaggcaggaaaagtggtggcagagtgactcattctcctgtccctcccatcaggtcaaatcaggaggctgcagtgaatgcctgttctttgaatgtgtagcagttgttcctgtaactctttaaaacttggctataggctgtttagcacagtacagattaaagatacagttacgtaaacagcaaagtaattttatagtgcttcatccatttatcatgctttggtttgctaattttttcacatacctttttctatcacagtctgttgcttttgtacacatttctcatattggggttcgacaggtaaacacaaactgctatttcagtagaaaaagttattgttatgaatattaaacccaataaattgtataaaggtaaatatcaatgtg

SEQ ID NO: 38 - DNA, 36672 bp, Homo sapiens
gtgtcccatagtgtttccaaacttggaaagggcgggggagggcgggaggatgcggagggcggaggtatgcagacaacgagtcagagtttccccttgaaagcctcaaaagtgtccacgtcctcaaaaagaatggaaccaatttaagaagccagccccgtggccacgtcccttcccccattcgctccctcctctgcgcccccgcaggctcctcccagctgtggctgcccgggcccccagccccagccctcccattggtggaggcccttttggaggcaccctagggccagggaaacttttgccgtataaatagggcagatccgggctttattattttagcaccacggcagcaggaggtttcggctaagttggaggtactggccacgactgcatgcccgcgcccgccaggtgatacctccgccggtgacccaggggctctgcgacacaaggagtctgcatgtctaagtgctagacatgctcagctttgtggatacgcggactttgttgctgcttgcagtaaccttatgcctagcaacatgccaatgtaagtgccttcagcttgtttgggggagactgggtagagaggttagatgggagggcaccctgccctgaaaaggaaaacctgtaacctgaattccaggtacacttggagggcagactctcaggcatgtgggaaaacgccggaattgataagaaacatggaaattactttaaaaaatgaaaacataaaagccttgccaaaagttagggaacttttcctctaagttcagagtgagacagttaactcggtctggctcctcagcttagtaacccccaaagggagcggaaggtctttttccctaaggatgagatattaacgaccaatgtggtggaggaagtcaagggcctgcaccccacaggccccataaccgcactgatgtccaccttgtaaaacttgaggcctgcgttagaaagcccttcaactgagtaatgtaaaactcacctcctaagagcttttatcttctgggcattgtaaggcttgtccggaggaggaggatgacgatgctgatatgatgatggttataaggcgccctctggaggaaggaaaatgaaagtacaggggacagggccttaagcagatggaatcccaattaaagcttctacggatttatacagattaatgatcagcatttctggttggagcctttcccagtggctagtcagtgaaccctggaaagaagaatggatgctacttggagtgggtacattctgaaaagtaatataagtgtctcaattcactttctagtcatggaaatggtaacattttttaactcaaatctgctctaaattttgtttgagcctgagaattacccctttgacatgttcccagtgataagcaaacattatgaacgcagcaagttgagaaatatcaacattgagatgagactcaagagaccggggtttttcccatgagtctgacaccaatttgctgcgtgactttgggcaagtcaaacggccttttctaaaatgtgagacagagattaaagggaccccaaggccactttccagctctaggttccatggccagactttcatgtcaacagagaatgaagaagatcagtccgttttcatcttgaaaatggctgccaaagtgctagacaaagatattgactagatgggggatggtattgtctgaccacacccagtactccaaaaagttgttccacccacacagcacggtgtctaccactgcataatttctaatgcatttgtgtgcttgtgtgtgtgtgtgtgtgtgtgtgtgtgtctgtgtgtctgtgtgtctcttcccccttcattcacttttagtatacatactgtggatactaaggagtaattgcagtgaacaaattcacattaccgagttcatatttttaatgagatcttgagagtgggaggaaagagtcggctcctagagaataaaatgaaggcagacttagggaaatttgaaggtacaaaggcaacttaccttctgatcaacagccaaccacagtctggaataaatgttatcaaacacacattcttcaaaatggtccatgtctgagtaattaaaaggcaaatttccaaaatcataaggacttccgttaatcaagtcaggcataattattcttcctactgatggacacaatgaagtaaacatatcattcttgtaatttaacagtaattctcgtaaattgcccttaaatgtcagtgctggatgtggtccaccctcctaaattgtgactgttgcaacagatgttctcacttcaaataacgcacttcttggccacctaattaaagcaatttttggggtgattcatcctactgcaagcttggccacacttgtatcctgtattaacctataatttttgtaccgtaggagaagaattcactctttaaggacttataacaattatggcaaaaggggggatagtacttttgtttattttttctattatttttcaagatctttaatccggtttttccatttatacaaaactctttctccgagacaaaaatgatacatattggtaaaatgatcttacctaatttaagtgaactaatttaaagcaaaattcagatgtctgaattaatccattttcatagttaataatgtgcaaattagaccttttgaaaaaggatattaagaatggtacaaactcaatgaagtactaggtaacttcaatgttttataaaaaagtaagtcagcttcaatgtttcataaaaaacaaattcaatatagaattttaaggtaacatactttcctaaattttaccttttttcgatatttaggtattaaaaatgatcaaaatcataaattatttcctcatcaatctactagtcttacattcagcgattcatctgtgcactttaccagcttaattgctaagcattcaaaatatccttcagacacattaatatttcacaacagttataaaatagtaaataattaataatttaattcaaaatacatttacatattaatattgcaaacaaatcaccctgctgatccctgccatacttttgacctgcataatttctaggtcattaaaatattcttaaaaaaatataattggtccttaattaggtaattcaattctataaacttgtttctctatttgttaattattgctattgatccatgaagtgatactaataattgtttcctactttttcttttttttttctacagctttacaagaggtgagtaaaactttttttagaatttttaaaaatactttgattcccttggctacagtgatgtcttctcttggaagggaagaagttacattaatattgaccatcctagattcccaagaaaattgtgaagaattatgatagtcaaaacctttctggctgccttagaaagtacccacccaattttccaaaataggcggggctactgaataagactaggtttataaaatattcataagaaatatagagtaaataatccaatagaagtttgagttttaggatcagcttctatgaagcagaagatttcactgagctagagaatcttttcactcctttggaattatttgcaaaagcacttattgttaacacattcttagctcatgagttgaatttgaggcataagtacaggtacgtattgctatgtattttttgttctgtaggtacatatttttatttgacatgttggtaaaattttaaattgtagtttgaaatattaaactgagataatagtaaatgcataatgtaatgaattgtgaaggtatatttgtatactacaccaaaatggaagctgtttttaaatatatatatacaattttcttcataataatctttgatttattcttttctaggaaactgtaagaaaggtaagagtacactacttctccataaatatctaaaattatcagggataacataatttaactaaatttatagtagactatagaaggaaaatactttatcaaaattttgttcatatgaatatacattagctaaagcataaaataaagtagctttgatgtttaagataacaaagtttaattatcttctggaatcatctgtaattacatttatgtgatacaaactggtgatttacatacaaaaggaaaaaaaaagacttgtttttattctggagatggaaggcatattatgttaattatagggagtaaaaaaagtttattttaaagggctttgactatataaatgtgctgttaaaaatgtaacaaaatgatcatttaatctacagttatcatcttattcaaaatgctatgcatagtattgacctaatagctgaagactatagcagcttccaatcctccagctgaaaaaaaattacgtataattacaattaaaatatatacttttatctattgcattgtgtcaattttttatatgctatctaataacattgtagttacatcagtcttaccaactaattattatcaagaatgatttgtttgttcactggaaattacttcttaggcatttattattgtcctgtttgtatctttcctgtagggcccagccggagatagaggaccacgtggagaaagggtgtgtaatttttgaactataaagggcttcgtcccgtatttgaataactatatgttagaaactacaggaactggcaatttataagaatattatgtatccagataattgtacacccctttaaacaggtaatgcactgcagaagaagcgaatgagcattattatatatgatcaatatttgttttaggtcaaaattaccgttaaaaaagaaaaactgttacagtcatattctttgcatggtctactttctttatttgtaattgacccatccaacacatgcataatggaaatatatctacctaccaccacagtcctctttttaacacatttcatttgcttttgaactaagatcccttaggtagcttggaaataatagtgaattagtagtcagtaacatgtttctctgctcaaattcatgcatgtacaagtcaggcttacattttatttgtggcattcttaaatctccctgctatgcttatttgacatttataactatgtggttttgcattgtataacacttttgccaatatatgaatacctatatcttatatctattaggaagaggagacttacatgtatttcactcaatttattagaaatagaattaaatcagttaattattttaacaatacaagtagttaatgatagtaaatctgcaggattttctctcctatgataaagtgaccttattaactgtcacatcagttaattcattcacatgtaacataccaaaacaattgaatcagtttgtcacagtcagagatcggcaataaaaatacgatgtaagtccttgtgcactgttaaacatatgaagcacgtggaaccatacattttggctataatttttatatttgaatactggagcttcagtatgaattaatattcaatggccgagatagttctttaggaaaactaccctgtgatatcttaagagttattaaccctctttctaaaatagactcataagtgaatttcaatcaatgacaaatatagtatattaaatttccaccctacttgcacatagaaaggtctgaacaactgatcttaccacatataattcttaggtttctacagggcctgtctaacctgaccttactcactttttacataacagggtccaccaggccccccaggcagagatggtgaagatggtcccacaggccctcctggtccacctggtcctcctggcccccctggtctcggtggggtaaggtgtcttacgtattgctaacttttagctaacttcagttgaaagaaggtttattgtggaatttatttttagcagttaagggataattcttccatttgaaaattagtatattttatttcatttatttggttttttcactcaagattctgctttacccattctctttgtgagcccttgtcaattacaggactggtctttgtgtgcactgaagttagctgtggccatcattaccattatttaatttggagatttaatatcttttattagtaaggcacaaataagaggtgttgcattattaaggattttgattagattgaactgtgtaagtgaaatccctgatcttaagcaattttacaaacatcctacgctttttattctccttgacttgaagtctgctgaaccaacattcaaagcggttttaggtttaatttgcttgaaactaatttgagaaaagtacatttccctttttcattaatatcttcttttagcttcatgtctttaacaatggtatgagtgccaaatgacctcactgcaggaaggaaaacatatttgcttaattggttagcactatgaatcagaagcctgattctaatacccaactgtatgtcagtaaaataagacctttctcccccaaagatcttattatgattgcttatctatgaattgcattaaaaagcagcttctttaatagagctaccactataagagagatctttaacagtaaagttattactgtgaactagtttttagaagttttatcttccaaggggtattttaatttaattttcctctaaacttgaaaactctttatgcccttcctgaaactccagcaagaaaaagatctcttagtcattttgtgtagctccggtggggaagggcaacaggtgaaaatgtgaagatgtcctcttgagctctgtctaatttgtcaggagcccttagtaacattaaaagtttagaaagcttcccttcctcagagtagaggtaaaaggtgggagtggagacaccgagttaaggcagaggaagggctcaaaaagtaaagtagggaagttctccatttcaaagaggtgtcggccaagtttttgacgtacagctctcataactttttaggaatttagttcaatatagaattttaaactaataattatatcaaaaacattgccctcttttaaataacaacagaaaaatatttacaagtagaatgagaaaatgaactacatgactagtaactaaaaatattttatatatatatataattttttttttttacttctctagaactttgctgctcagtatgatggaaaaggagttggacttggccctggaccaatggtatgcttatctgtttatcttagccaaaaaaattgctaaataaatcattcattttatgtcacattttaccacgccatttatttagctacctaagttaacactcaatacttagattatataaaaacaactctttttgttttcaaatttatgaaaacataagttaaggagttcacttttctttacaaaagaaagattaattgatcttttatgattatatgatctttttgattatatgatcctcattaagatagatcatatacttatgtccaagaaataatctttggacatagtaaccataacttgggcaaatcaatttaatttaaaacagtaatcactctgattaattttttaatattctttaacattgcttagaattttaagcaacacttagaggcatagaactatttattaagttctctgaacttgttggaaaggatcaacaagttctatctagtccagctaactcattttaaaatgggagagtttaagcccttttctcaaagtcatccaggtaactaatgacataactagaactagatgccaggcaagatgtctaatatttgcttacatcatggtttatgtacctagtccttgaataaaccactcatttagtcaacagatattaatcagatgccttcaatgggccctaaactgtattaggaactggggaaattacaaggaatatgacagattctgatccttcctcaaggagttaacaatataggaaatgtttctttttctgaattttgaccaaaaaaatccttttttagtctattgattgtaaatctatatagaagagagtatgagtaaaaatctagcatttatgtcactcagtacaaatattcagcaccataccctatcagtggagcaccgcttagaaacattccctatatgatgatgatgatgatgatgactattaacaaatgaagcttctaacaagcattagagagaagtttgaagggaaaaatgctaatacgagcatgcaaaatgtatactagcatatatgaaatagaggggaaaactgccagaagtcaaagtgttaggttgattaagcactacagaatttaatgtatacacacacacgcaatttagtgattttaattaattgtttcaaaacaaaggtatttatctgcccaaagtcaacaaggtctttaaaatgtaaattttacctgggcagtgcacttagtgctctatcttcaaaagaagatgttctgctggagctaatggcccacagtaagctaatatactctaagggtgagataatattttctgtaaattaaaactcccacttgagaaataatgtacctttaattgacgacttctaattccctaattttttctggtagtttaaaatgttcatatctgaaatgaaaaagtagagtgtttcttttggctttgtttatattggatttttgaaattagctgtttcagctaatgctggacattagtcagttttaaagcagtacctacatctcaagaagaagcaagggggcggaaagtaaagagctactaaatgtcatttttaaaaagcccactaagctgggaaaattaatatggatttcagatacccctgttttcggaacatctgtcttggcataaagcagagtattttactttgaaatatcagtgaaatataatttaagcttgcacatccacacacatgcacagacatatgtaatcaacagatatctgtttcacaaatagggaagataggcagcaataaagtattaaaataatttccatgttggaaaatcaataactataaaaccccacagggttcttctctgaattaatgagtaatcacagcctccatgaaatacactacattttatgtaaatgaaattgttgcaaatacatgaaaaaataaatataattagaaattcatgatgtcaaagaaaattattttttaatgtatgcctaaaaagctattgtgatggaaaagtgacagtttcttttaatgtcagagcaatttctaaaaccaaatgaataattcttataattaaaatgacatacattttagataaaatccatgttatttcactctaggcattaatacagtaaggtaggtttgactgcagagtccccacagctgatgtcatgaacaaattacttgagactggtacatgaaatattttcagcattatgaggaacagaccctacggatgagcttacacaggcactgattactgcaaagaggagtcaagaaagtgtatttagcttacaaactattaacagcctgttttaccctacttttgtgctatggaaacaacaaaggggaaaacaatcttccatcatttgggccatattttcaacaataatatcatataatagactcttccagaaggctgtttcaataatgttttatttttccttcacccctcattacatccacttttgtttgacattttcatcagtcaccaataacccttagaggagcgataaggttataacaaacttctctctaatcattaagaaggacttttgattcttttcaatttatgtcctttgtggcaataaaaataccaatttcttagctaaatatgacataggaagatgacatatgatcaaagatatccaaatggacatgcttcatctgctgtatagaagacaattgtatattctgcacttctgcaaagactgattcacttcattgcatcagaacaatctcaatatgcccaattgtgcacaactttaaggaacctatctgccccgtctaattctcattgatttctgttgataaggattgggagaaaaggaaaagcaaagggagagaactagtgcaggaagtttgagtccttaaattcttccttgggaggaataaaaactatggaatcaaaccacaacaatggcactgctaagttggtcatatctgaccccagccaacaccatgacaacttatcagtgctaactgttgatatatctgctttctttacagggcttaatgggacctagaggcccacctggtgcagctggagccccagtaagtactgaaagcttgtaatgcctcttatgtaaaaagacagagaattaagaaataaaggcttggagtatgacattctttttttcttttagggccctcaaggtttccaaggacctgctggtgagcctggtgaacctggtcaaactgtgagtacatttttccacctttgtgataagtttttttccaggaagtttatgaatataaccttagtgaaatgatgggtctcccattttcttagggtcctgcaggtgctcgtggtccagctggccctcctggcaaggctggtgaagatgtaagtatttactcttaagcactttcaaaatgctatttaaatactcttgcctcaacaagattttctagattcaaattaagtattctgccaaaagctgaatatgcctgacagaactcttaatgtatgggaaatattattttaatgaaatattaactaacctacttgtattaagggaaagattaaatatatatctggatccatatttttatgtgataactttctccccttttgtaaaaaccaagattcccccattttgtctgatagtttaccaagaagaagttgactctacaatgttttcatgtttagggtcaccctggaaaacccggacgacctggtgagagaggagttgttggaccacaggtgagactttttacattggtagatagcacaaacatcataggcctataagatagttgctaaaactagcatcaatctaaatgacaacatagatgtcacccaaactcataacatgaatcgaaggcatctaataaagaaaaaagcctagttaaaaaaaaatgcatatacattttattcatgcaaataatggaatataaatgacagcaagcataccataagcaactaaattgtgttttctacaaataccgtattattagttactcacattagagcaagttaatttgtcactctgtgcttagaggtatactagactttggttcaaagcttgaactttgatgagaataaatactttggagggaagaagtcactgtctttttatttatggtaaaacattattcaccatcttctgtatttctttctaagggtgctcgtggtttccctggaactcctggacttcctggcttcaaaggcattagggtgagcacattctttactcagaagagagaaaatgcctattaatttttggaaaaaactcaagtatgtttaaaatcttgggtgacatatactcactttcaaatccctggagtttgccaaagggaagaaagagttaaagagtcagatttcttgaaagtaaagtggggtgcaattttttcagtctgttcatagctaccaaaaaacaggctcactacagagaaaattatatagaacatgtattacttattgagtatttacaaccgtctgaaaatcataaaattattaaggatggaaaagatgtgagagaacacctagtcctccatccttctctctcaatggcaagaaagttaagtgacctatctagggcaatagactgagtttgctgggacctggaacactggacttctttctactgcagcagacaagacttacccaagagagattaatggcaaagatatacaatacaatttttatttgaccaaacactatcatggaacagcattttataataaggctttcctttcagggacacaatggtctggatggattgaagggacagcccggtgctcctggtgtgaaggtaaatattaaattagaagcactgtttttaagcacttgattgaaattccccatgacctccaaaaaagtatattatactgaagactacccatattacaaaaagtatttttattttttttctttcctgtacttcaaatccctcaaggatggggactatgagagtctgtgaaaaaaggtcaattattaatatttattaaaattcaatatctattaaacaattgagataaaaataatattaatagtttcttgttccatttcctttcctccctctataattccagtgtatctctgcagccaaaataaaagtaaataaacatataatcagagattacgacactctgtattattttaaactgtaaattctcctttgccacacactaattagataggtacattcatgtcgctatacacttttcaacctctttcctgtgatttatctgtgcacactcaaaaaaattttaattaggtaattaaagtctcagaagtgtgttatctcttggctaggctcttctctgacagcgttttcaactataaaatgttctctttcctattaaggagataatgtgatattaaagtgaataccaacgtaattacaaattaatgagtaacgaatactagcgggaccagaaatgaacatgaatatggagaatctattctaactttccagctgccacacaaatggataaggtcaaactcattctcccaagagcccgatataacagctcagactactaatcactgtatcataaaatgttagagctgcaaggagctttggagaccccctcattttgcagaggtgggaaactgaggcttcgtgagagcaattgacttgcccaaagtcacacatctagaggttagaaagtcataggctagaaatgatccccccttgccacttcaatgcttattcccaaagaatagacttcacatagaatcctggaaattaagggtccttatgaggtctcttaaaccatatttcccctatatctaaatcagattatctttaaaaaaagttcttttacatgtgccatagtattaaatcccactactactactactactaccctggtttttactcaggataagaatatagattggaaataaatatgatggctctaaaaaataccatgaagcttcaatttttcatgcacattttatgaaagtgataacactgagtgttcaaaataactttaaaaaggataaatatggttacattgaaagcaaatttatcctttgccatctctttttatgatattgtttctagtatataattgatatcctgaatctaagggagaaattggggaggaggtacactcaaataaccacatctccttagaacctggatatgtggtactatctgaataaaaactcatgttagcacattttaaaatctgtgtgtctggcataattgaaaaacaatctatatgtgtaagaaatattatgaagtatatgaatggttcaaagtaaaaaaaatagagtaaaattgcactatcaggaaaaataattgttatatttaatgaacaaaaactcaatccttctccatgtagggtgaacctggtgcccctggtgaaaatggaactccaggtcaaacagtaagtattgactacttcattgtaaatttaaatgtgtacactctttatgagatggaacttctttaatgtttttgctaatcactgtatccttcagcattgtattctttgatgtttttctaatagccttctgatacttaattgaaatccactactgtttagttggaattagaaggcaacttatttatttttagtgtattcttgtacaggttggaaactgaacaaagcaaatgatgcctgtgactttttttaaattagcattctggattttattgaaaatatttctgcttctagggagcccgtgggcttcctggtgagagaggacgtgttggtgcccctggcccagctgtaagtgcttccatttttgttcagtttcatccttttaaaaaatcttctaatggctgtcatttaagtttccacctgatcttccctttattttcttcttagggtgcccgtggcagtgatggaagtgtgggtcccgtgggtcctgctgtaagttttgacactggggagtttgaaaggagttgagaatgtggggtgggtgctgtcttcttcattaatctcttacgaaatagcatcatttcagacactttaccaaatgttctgtgaggtcttttgaaggctccatttataagtagtgtaagccatttataagtacctgaacttttgattgatgtataaagcaaaatatccccaccctggataccatgaatgtcttgcctttgatgagatcctaacgacaacagactggttgtcagtttttttctttactaatataaacagtgtcatgccactgtaagcaacttcaatcttctgccattgttattgttttcttaatttacttggaggaaatttcttaccaccttctgctttgatttcagggtcccattgggtctgctggccctccaggcttcccaggtgcccctggccccaaggtaaaaacactggtgaccattgtcactactttgataaactttttactgtgatgtgaaagattggaactgtgtttgcagataaagagataattacgaaacagttaccttaattattccttcccttcaaaatggacatagaatgaccagttttctcactctacatttgaaatagatcatttctctgcactgtgcactgtgcccatcgatatagatgacaacatggaaattgtctctaggactagttagttaggactgactgagaaccagagtcaaccacagagagacagaaggagagggaaggtagtaacagtagccaagatggcagaatcaagcaaggaaaataggaaaccaaactcaaatcttgtaataaaacggataagaaaaataattgcaattttgaagttttatgaagacatttcataaaacttggcatcttaaaaacagatatgctgtttcattatttgctggttaattccttggtttaatttcctcttttagggtgaaattggagctgttggtaacgctggtcctgctggtcccgccggtccccgtggtgaagtgggtcttccaggcctctccggccccgttggacctcctgtaagtagccactgtctttaaactttattgagtaaaagaaaacaaaggtggagtatggggaagaagaagaatgaagatggggtcaaagaagaaccgaaatattccaattaactgatatccttctcctttccttttcctcatagggtaatcctggagcaaacggccttactggtgccaagggtgctgctgtgagtatacctgcgtagctaaaatgtgctgctatgattttaaaggcatttaatgtgtgctgcctctacagcccatcacctccctaatggaccacactgcattttccttcacagggccttcccggcgttgctggggctcccggcctccctggaccccgcggtattcctggccctgttggtgctgccggtgctactggtgccagaggacttgttgtaagtggtcatgactgtggttctcatcatcctgaaataccacctctgccatcatttcatcactatctagacttccacttgtagttttattattcctatttttctcttccttagcatttttagtttatatttcttatatatatatgtacactcccgtctgctatatgcacacagacatgcccttcctgttatcttaaatcattacctcaaggtaaatgaggcaaagttctacaatatcagttttgtcccttcgaccaataataccattcccctgtactcaatttaaatatgaacagggtacatttcctagagaacttgagcttctctttaccttgacccacaaatattctaagagatttgtctgcaagagagtttcaacaaatgtttgtcctttgaccactgttctgtattgaaccctagggtgagcctggtccagctggctccaaaggagagagcggtaacaagggtgagcccgtaagtagctctatcatcacacttttataaagttaattgtttttctcattccagtttctccagctggacatagtattaaaattatttttttactccctcttcttttgttcttttcattaaacagggctctgctgggccccaaggtcctcctggtcccagtggtgaagaaggaaagagaggccctaatggggaagctggatctgccggccctccaggacctcctgggctgagagtaggtttcaaatgctcccaacaccctaacacaccagaggcagattatgataccccttcactgggaattggtcaaaattactgactgtgttttcttaggcaaaaaaagcatctgctttccatctgccttattaaatcagtgactctcaatttaatatgttataaaattggcctggaaacaatgttgacctacttttgcaggatgctcatctatgaattcctctaggggttgggtgaagtgttttggcttggtttgtgtctgtatctcccctgtaaggagatcatgctattttttacaaactctaccttatcaaagccaagagatttctttaattctctctatttcatgtactttcttgcagggtagtcctggttctcgtggtcttcctggagctgatggcagagctggcgtcatggtaagctgtctatcacttacttcctagaaaggggcttgctgcttctggtggtgggtgtgtcattagctttagcatcctcctcctctatctgttttttttttttttttgaatagggccctcctggtagtcgtggtgcaagtggccctgctggagtccgaggacctaatggagatgctggtcgccctggggagcctggtctcatgggacccagagtaagtttcaaactgattctgagcaaatcacacctggcattacttccttctttaaagggttggttaatattgaagataacaataaaaacatcaaaagtaaatttgttagtagtcttgctgacagttgcatttttgactttatcaaagctcagtagatattttcatgcatttaattagttcataaattttctatttattacttgatacaatggctatgaggtttttggaagaatagatctattttaatatatccaaattagattggtcctcctatcagcatgaatcttttatcttaatttgtgagttttatataaggtgttcatgaaatatattaggactatacatttttggtttattagattcataagtgaagtctttttcctagcaatcacaaagtgctgtaatgtattcagcatcacactagctatggagaaataacctctaggtccatagacacactaatccatagcaatagagtaatttttttgcctccattgcctcttatgggtgaatatcaactgtaattgtaccataaacaagtaatagggacaccaaatatagcaataagaaatccactttggaaattgtttactaaaagtattagtttttctattatgaggtaaataacgtgatacattttgcccatatacatgttgcttaacagtttcttgagatatctataaaaggatgagttgcactaaatttcaataaaaggaaagccacaaaaaaatagaagaaaaatttcagaactcttttcacacttcccagctagtggctaatattcctaatgatttaccctaggcaacaaacaaaaagtcgggggaaaaggtgcctttgttagacttcagttaatctaaggcttgagtatgtaagttaaagtgccaatataaaaacatcctcatttattttatagggtcttcctggttcccctggaaatatcggccccgctggaaaagaaggtcctgtcgtaagtattgctcattttccattatattttcaaggacacttattgcacccttatcaagtctattttgtggcttatttatacatgaacacattgaaaataaatatcagacacatacatcatctgggaatgcagagtaatagattgtaattatggagtccaaatgaatacaggactgaaagcagagcaggggagagaaaaacatggcagggaaaattgaagcaggtgacaaggggatgcaagagaagggaatgagggaaattgcatacatacgagattgaattggctatgtgtgtactgacatcctagttagaaaaggaaaatggattcataatttattaacgctttatacaagaagctctatgcattcagaaaactattctgtttcatccgtggcagcatcataagcttgaggttgtgagaatatgttgacactgagtaaacttgaaataactctgctttcagggcctccctggcatcgacggcaggcctggcccaattggcccagctggagcaagaggagagcctggcaacattggattccctggacccaaaggccccactgtaagaatcaccacaactttcttaccctcagcactttctgtagccaaattttaccaaactctagtatttatctcctgcgaatcagtccagtctcagggagtttcctttcaacacaggaaaactgcaggccacttatcacattaaaagtttacctctagtgtatccttatatccctgctaaaaatccatctcctgagccccatgcttccacagacacagggacatcttactgtacatggagctgcatggtgatggatcatccttagataacagaaaccacagactagggatctcaaaagaacacaaaaacaagcaggattcaacattgcaaaatcaccgtggttaatttgacattaaatgtgcaaagctgttctttgttttgtttttcatttttactctagggtgatcctggcaaaaacggtgataaaggtcatgctggtcttgctggtgctcgggtaggtgctaacttgtgtacagatctattcacatagcattcatctaagaaccacacttttttttttacaccatctgatatcattttgtcactttcttttcaagatggcatccccaggggtccttttactatcataaaatgcctttttaaaaaccaaacttataaaacagtgagcaaaaacaaatcagaatatacattaggtcaaaaatacagaagcacttggcttttattttattcattttgtaattaaaagggtatgaatatgtagtagcattctctggcctttataaattgccttgtgtcgcatacttcgcttgagtcatatcaaaagttagtaggcaaacccataaatatatatacctactatgtacccacacaaattaaaaatttaaaaagttagtaggcagtatttgggctttcgtgggaacccacaatgagtttaattcatgctaaaatgacaaacttgttttaaggaagtaatacctgaggctttgagacatcttaaactacctggcttgcagctaaccatcagcctttctgttaaatatttttagggtgctccaggtcctgatggaaacaatggtgctcagggacctcctggaccacaggtgagtatttctcccactcttgtgctcttctgcactagaatgtatatagtcctcaaactggccatctccattttcagtccaaaagttatacagctagacaacagtggtgacatacgttgctatttatgctctctttcctgtcactttcagggtgttcaaggtggaaaaggtgaacagggtccccctggtcctccaggcttccaggtaagtcaactcaaacatatacaatactgcctttggtcagcctattgagctgtaaatcaccataccgtacctctcttctccaccacaataaacatgatttcaggactgaagcaaagaaaggtgcatttttttcaaacaaacttttgtgtaatgcttaataacatacaatcgtgctcatgttgatatttggtagccaccacccccaaactcaattattagcaaatctcctgaacgtagccatgggattgagatttgtatttcttttcatttttagggtctgcctggcccctcaggtcccgctggtgaagttggcaaaccaggagaaagggtgagtaaaacaagtaatagtaagtagtaactactaaacttgagaatttccccctgtttaataccccactgctatgcaattataatatgtaaaagaaaatttcgtatttcatatgttaatgatagtgttttacatactttggtgctgatggagagaatgagccaaattactttagttctgattactttgttttacagatttaatgaaacatcaccttatgaaagtaaaatctatcaatgaatattttatttaatagccttactttttgtattgttcttgataacgttaagatacaaattatttccttccccatagtgaaaaagtaaatgcacaattttcaatcaaactagatcccgaaaaattccttttgtgtttttcttggcattcagacatgacactactatacacaatcagggcatgagttctgagtcattttctctctaattgtgatgaatgtgcccctatttagttacattctgtggcctggtctcctttgtcaacagtaggacatattaaggagacagctggtcagtaataaaagagatacacttgggtatacaattaactaggcaatgtacagaatatgataatttctcttaagaagacgatctgttatacagctaaaaataggcaatgtctaatattcattattatttatcttattattgaaggaaatagtctgtcactttttaaaaagcaataaactaaataatgggaaacaaattttttgataccaagttctgggatggatacatttttgtcaccaataaaattctctctttctgtatctttccatactaaaagttgttcttattagcctgtgtacttatgcactcatgtagatactgccaggtttatttcactctttccaaatttttcaaatattttaatcataagtgaatttagagatcacacacagatttcatgctttattctcatgttttgtctagggtctccatggtgagtttggtctccctggtcctgctggtccaagagtaagtgttacttcattaactttcataaactctggcaatgtgtttttaaaagtagtagtgctttctccttaaagccactgatgaccctgcaacaagtctctgatgctcttctatagtcaaatgtaatctgtagaaagcattagatttctaagttgatagtagaattttttgtttcattgctcatatttcctattcaataattacatagttataagaaacacataaatcaatatatattatagtcagtgatttatatagacaactatgctacatttgtgacagtggctcaacttgagctaaggaaaaataatatgttactaagatataaagttaattttggccatgtgtgttgatgttcaaagcctaaagccgaacttatgagtagtcatataaagaaaaaaaaacttagtttctctatgggtattagcatcactgaaatgattaatttgccctgaaagtattccatcatgtcactagttaacacatatgtaggaagctcaaagaaccaacttataacaaggtcctttgaaacagttacaacgtggacctatgtgataaatattttgggctatagaatgctatgctctagtgatatttagatgtaaattgggagatatttagatagacagacatatatatatatacacaaatacatatatcaaatatacatatgaatattgtaactgttatatcattattacacagggttataaaaagggggcatagataggagaatatctaatgttatctacacctgccattgctattcaactaaaatgacacaatcttttctttgaatactacacataactggcatctgtttttacctatggatttatcacagaaaagactcctcaaagaaggggaatgaattgcaaaaattgaatattatactctagaagcaacgaattctggagtcgtagtcatggaacattagagctaagtgacactttagagaatatctcatcaatctcttcattttactagtggagagattaggaacaaaagaaattttaatttgctaataaatgcaaaccagggctcggaagctacacaaatgtaaactctcatatgtaaaacagtatcactgaaagtgatgaatggtgcaacacttcttctaatcacttttttcagggggaacgcggtcccccaggtgagagtggtgctgccggtcctactggtcctattggaagccgaggtccttctggacccccagggcctgatggaaacaaggtaaaatcttatgttttctatattgctggtttggcccagtctgcctggaataagtagaccctttacaatagaaagataattgtttttcagatttttatttatttccagttctgtgatgacttccctctcagtaaacagcaatccgattccagtggacctgaattattctaaacaaacaaacaatagcaacaaactgtgggggaaaattcagagttcccaaaacataaatgaattagtatgggttgtcactcttttctcctcacgctgtttatgcttttgttttaatctagaaacattgtattcattggacattattttcagagaaaataactttttatcttaacatctcatcccatagagtaaaatttcaacaagtagtctgacttttaataataagagtttatgatgatgaaaattcattgggcaatacattcacccccaaaaatttgtctggaaacttgtgttccaaaatagaatctgtggtttagattttaaaatagatttaatatacattcctgaaaaagagattaccttaaccacaataaaaagaagacaacacatattattttcattcttaactctaggggaaaaaatgtaaacattagttgcaaaaagctattttagtgtatggaaggatgttcttgggaaaaaaataaaaacataaaagggagagaggaaataaagaaaccacggttttgtgaggtagtactttcaaagggatctatgtatctcagaagctagtcaacaggttttaagtatgtggaattgtagggttttatataaaaatggaagatacagtctctactcttaaggagattaaaacacaaacatctcctcaattgacaaggtctctttccatgctttctatctgggctaagagacttatccttgaaaaatgtttgtgggtaaacattttttactctctgcttcccattgtcctatcctcttctccatgcctgccatccttaagaggactgaagcaggttatagaggaatcgcagctgtgcactcccactaccctcatctcttcagtcaccatgtcattaacagcatctctctctgctatattctccctcctttcaatagcccagccttctttgtgtttcaaagcaggcaagaagcctgtctagctagctgtttaaattggaattcttctagagtttgattcttcattttcttctttctccactaaaattgatttcacatgtgtttgactcaagggtgaacctggtgtggttggtgctgtgggcactgctggtccatctggtcctagtggactcccaggagagaggggtgctgctggcatacctggaggcaagggagaaaaggtacgtgttgacccctattacatattgttgatgaactctagtaaagaaggctgcacaaggatgcccaagttttcacaattcttggcaggtggtctggtagcattttcatatctatctatatacatttccctctgccacctagcacctacacatttctaaactcactaatctggcaaaattccttgctaccatggaatttcacacaaacagatggtgttgagtaatacatgaggctcattttaatgccactaacaataatgcctcatcctgtcctaattaatgggaagaagctacattgaacagctgtcaaccatgctgctgcattagttatgccgtaagagtgatcaggcgctgcagcccattgtgatgttgccttacaattctgtccacatgaatctgtaccttgcttgattatgcttcaggagagtgtacggaaattagaaaagattgtttaacaataatctggaaatggccttgaattattttttcctcattatttttctcgattaacattctacagaatggtaaggaatcgagacattgctaaaaatcttaaatgactgaaggtatcatagcatcttctgtaaaaaagaaaaaaacttcatattaatttcgattcaaaattttggtcagaaaacaaaaagttgctcttgctttatactttcagggtgaacctggtctcagaggtgaaattggtaaccctggcagagatggtgctcgtgtgagtagaattttgtttgtatgtttcttcgtacttggattttttttttatgtttgaattgagaagttttccaaattagaactacacacactttatttatcaagtttaataaaataatattcctttctctcctgggtctatgactaataatatcattttacatgttccaaaggaaaaattaaatgggatttaacctctttgaaaataatatcctgaattttctaacttccctagtgtcaatgataccaactacaaactatagaccaaaagctttaggtttaatagaatattaaatgattgcttcaagtgataacagagattaaaataaataaataaataagtctcctatgctttaggaagccgggacctctaacaagattctatagttattcaaacctactccctagaaatttatcacccaaagagcagccccaaagattagctgttaatgccatgaagatgccaaagataatcccatgacagtctaattaccttatctcgtatgtcagcctcatgggtcttctaggccacagtcggcctggattcctttattcacctctccttcagagctgaaaactgactgtagcacatctgtaatagtctttcttttgaatcacgtagttctaacagtttcaaacaaggctactcatttgctgctctccagggaattttacaatagcggaaagttcagatctcccaaatttctgacctgctattgacttacacatttccataacctttattactggagtaccctccttctgagagtggcttctaatagtcttgttaattagaaccaaaatacatcagaggccttctagatatccaaccagagtgcagtgaaagtgttcagtcactgtataagcacagaaaaaaagaatgacaaggttcacttttgatgatacggggtgttattaataagacatgtttcctttttggtactagggtgctcctggtgctgtaggtgcccctggtcctgctggagccacaggtgaccgggtaagcatgcattttcactaagccaacagcaatatctaaaatttcccgccttccctagtcccaaagagccccagcaattcatttttatggcttggtataaagcctacttatttaaaaacctagctattgtgatagagcagcaggaaacaaatgctgtgtgtttaaaattacttttcccttcctatagatttgccagctatctgatctatactctaatccctagcatttgttttaaagtctctccatgttgcgcattaacaatatcctaatgcactgaggcttctcaaagccttcaattattaccaaaaaatcaataaaatacatagtgtgcccatttcacattgaactctccacttaaaatagatcttatttattgtattgcaaagattgccacaaatagatcagccccgtgtccatctaaaaattaaaatgtcctcctcctggtattgtaggcactgatttatagtgttttctcaagtgtataacccatactacttaacccccaaaatgaatatagcattaagtaaaaatccacttcattttactctgtgagatgtgcgtcagttatctcttccaaggcaactacagactctgtctgtccaccactgttctctctccctcccagttctttgagcatctatgtcaggcacattaacagattcatctttggtcccattatagggcgaagctggggctgctggtcctgctggtcctgctggtcctcggggaagccctgtaagtaagaacctgggtcattttgtatactcacacctcacaatgtttagacattgatgaacctaggattgataacacatttttaaatcccttctcccacctagggtgaacgtggtgaggtcggtcctgctggccccaatggatttgctggtcctgctgtgagtatcacataatgaagattaatctgaaaacatcctaagttggggagtagagtgggtcggaataccagagctgtaactgtttatttccaacagggtgctgctggtcaacctggtgctaaaggagaaagaggagccaaagggcctaagggtgaaaacggtgttgttggtcccacaggccccgttggagctgctggcccagctgtaagttgaattcactggtggtccacacagcagctacccattagatcttccaattaaatatatatccgtcaagtgcctgctatgcaacagggaatataccagatagaagatggaaaataacggaaggattaacatttgcacactgctttacaaagtataaaagtttcatgaatattgttttattttaattctctgataacctcataagggtggtaatattgaagaacattctgacacagatagtcattttttatttctatattttcttctaagagatgcgggaatgatccacttgaagaaaagagtagcatttacaagggtttgtttgtgatttgactccatctttttgtttgcatttagggtccaaatggtccccccggtcctgctggaagtcgtggtgatggaggcccccctgtgagtatttacaatggactctcgccgcttttcttttttcagaatctattaaggacacttgaaagttttgaaatttttggtaaatttggactaccatgaggaaacttttgagattcaagttcattctattcagagcaattccgatattgatgttaacttgaactcagctggaactcagtgtatgttgctatcagctcacttgaggtaataaccaaggtgggccctaggcagtttaattgtaaagtcggaaaaaatattccttttggcgtttattaatatgccccttcttctgcctgaccatgtccttctcctttgcaggcaatgctatcacaacaattctctagagacccagagctccccaaaaatgaactttactgacttcttctctcactggacagtgctgaattatctaggtcatttgttattcttttgtccatgaacaccattacctattaagtgtccatttccttaccactcagccaggtggtaaagatagttattaatgtatacacattaatgtgtaataatgacatagtgtcttatcttcatacctttacaaccataagataatatgtcagcatttcagaaaggaccatccaaaccttaacgcaaaatatgggcattgcaactggtaatatgctggtaaggaagatgtgtggagaaggagggccttcagggtcctggctaaataatgccctatatgaagctgcctacctcctactccttggtctattcctggtcacatgtactgattttccaaaacaaagaaattcccatcttacccaaattcttggagttgatgttgactgtggaattctaatgtgcttggctcttagggtatgactggtttccctggtgctgctggacggactggtcccccaggaccctctgtaagtaaatcactgtaaacgtgtcttcatttactctagccaaaaggcctggcttctgataggaaactggtaagaaactcttcatgaaaacacatcactaatattcgctattactctcctggtctgaagtcagcttttctgaaccattaaggtatttcatcacaagttatattttataatatcagtttaagaggcttttattcatgtgaacaccagtcccctttcaggggcatggtctttttgaaaaaaaaaaaacaaaaaaacgaacagttttagccacatatcagatatttctatatctaattatcctttatggctaacattctgcctccattgttaaggtataattgttcctgaatttaaaggtggtttggcctctaatttaattctgattcagactctcctgtcaggactcaagaaaatttaattaattaccaaggattaagtcttctggttaaggtttctgggaaaaaaaaatagcaaagatgttgatttcttggaatccttttacaggttcataacagaaaaatcttcattccctgtaggcatttaattaaacctagttgagaagtgtgtgggattcctcaattatgaacaaaacacgtatattggctttctttaaaaaaaaaaaaaaagaagaaaaaagaaaaggcaaagtccttcgaaactcagagtcccattcatttatcattaactcctatcattctacatagttctgattccaatatgccagggtaccagtggcatgacattgtttttcctcatagaaatttgccatagtctctcctccattatttggttggttacagcctcataaaggaagacaggagttgcttctttctgcaagaaagaaggttaaaaactataaatatttcccccaaatggccagggtattattttattgcatcacattgtttgcatcttaagatctagaatctttgctgctctcttccaggcccttggtgattaacagaaaggaaatgaccttgtacatttgctcatagggtatttctggccctcctggtccccctggtcctgctgggaaagaagggcttcgtggtcctcgtggtgaccaaggtccagttggccgaactggagaagtaggtgcagttggtccccctggcttcgctggtgagaagggtccctctggagaggctggtactgctgtaagtgatttccaactcctctttcttaataccttatgctgaattaaaataaagcccctacacaaatcttcaagtggcatctatttgttgatgagtattgcaggctctcaagtagagctcagttgagccaggaaatctgtccagcacacactgaggggctgtggcttccaagatgctcagaaagcacaaaatcgggaagacaataaatgagggaactcagttttatcacaaagcccttaaagctattgaaggcaccttactggtaccaggattagaacagagtcccattgctgtggccatcctactacatattaatcaatctcagtaggctaccaatttcttaaacatacactgtccagtattagtgctactctgaaaggtgcccctattagaccttagaggccaaagtcaaaatttgcttccttttgatatactgattttactgatttcctttttgtttttgttttttgtttttgtttttgtttttttgttttgggatggagttcccctctgttgcccaggctggagtgcagtggcacgatctcagctcactgcgacttccgcctccccagtttaagtaattatcttgtctcagcctcccgagtagctgggactacaggcacacaccatcatgcctagctaatttttgtatttttagtaaagacggggtttcaccatattggtcaggctggtctcgatctcctgacctcaggtgatccacccaccttgacctcctaaagtgctgggattacacatgtgagccaccccacccagcctgatttcctttcctttgtgtatatacccagcagtgtgattgctggatcttatggtagttctatttttagttttttgaggaacccctcctactatgtacaactattatgtatccataacaatttaaatttttttatttgtttccctgcctagaggctataaaaactctatttcaccaccccaagtgtctttataaatctcaaccacatatttttaaatgttgtgccattggtctcaaggatgaatcagatacaaaagtattcatgccaagatgtaaactcaccgtcatcactagagaaaagatatccaaggatatgtcctagtaataggaggtcattagcctttttctaagctgaagacagtttattctcacaatcttcaagccaacctgtgttatcacctagggtcttacccataatactcagtattttttctctatttagggacctcctggcactccaggtcctcagggtcttcttggtgctcctggtattctgggtctccctggctcgagaggtgaacgtggtctaccaggtgttgctggtgctgtggtgagtgcttgacagtattctgactccattaacataagaaaagattttaaaagctgccacttcaaatgtgacagattgatcactgaataacttcacttaagatttttattcatggcattttctttatacagatcacatgtcacttatctaagaagctttaataccaccttacttagacacacactataaagacacagcttaaaattatgcagaatgatttttgttctttccacgcacttaggaatgatacaatctctaattgcgtttactcctctgcaatatgaaatgctggcatcatttatcctgtaggaagaatgaaactctggaagttctgaatcgttccattaaaccttatacgtgacaacaactagaaaccatctcatctccataaaatatatcaactttttgaattcatttcatttgggatactgaatgacacgaggctcactttttacagagcaacatcccgtgattacataaagctggccatctacatgtggagaaggagggcagagatgatactaatgatacttcttaccattgtgtgacccattcacattcaatttaccttcttccttcaaactagaatctcctgagtagggttgttttggaggggaaggttagcattccatcgaataaggggaatgtcattttatcttctctgcctgtttagggtgaacctggtcctcttggcattgccggccctcctggggcccgtggtcctcctggtgctgtgggtagtcctggagtcaacggtgctcctggtgaagctggtcgtgatgtgagtccaacacttggtttgtaaaataaaactgagcaggatttcattgtgtgaaactttatgtcctgagctgaggttctcttcttccaaatttctgaacaagatggtcagcttctccatagtatctacacctagtactgaaaatatgaaaattgcttaggccaaagaatgggcttttcaatagcacactgcaaaactgggcccaagtatttaaaacatctctaaaaaatatctaggttggcaggtttttatccctagttttaacagtctgaaagagggttcgttactgagcactggaagtgatgaagacagagtagctacaacataggggctggtaggcagcagagcctcaccaacagccttaatttgtgtggtgtcttcacagggcaaccctgggaacgatggtcccccaggtcgcgatggtcaacccggacacaaggtcagtacacttttcatctttctctaattcaaaagtgattaaaatgcaacccagattgatgctaagcttcattttgcctttggtagggagagcgcggttaccctggcaatattggtcccgttggtgctgcaggtgcacctggtcctcatggccccgtgggtcctgctggcaaacatggaaaccgtggtgaaactgtaagtttgtgaataccagtccctcagtgcagcattctcgtgggcttcacttctgacttccccacacttggggatggtggaggagtggggaggggtatcttgggcctagctaagttgtgtttttctttttcatttcacagggtccttctggtcctgttggtcctgctggtgctgttggcccaagaggtcctagtgtatgtacatgctgaagatttctttgcaacactaacatttagagagaatcagtccaaaacatctgttaagaaaataaacaatatatcagctagacttaatattttttaaaaatttcagtccatgctgagaattgatacaaataacttgagctattttaaatctcttatgcttgtttgtattaaacaattacaaggatctagccactttacagatagcacaactaaagcagattaccagcagaggtgagagcctagctaaaccattacatgtcctgagttacctttgtaaacgaattaagcagtatttgtggtgaagtgagtgccatttttttaaaacggtaagtcttatccatccttctgtttctttatagggcccacaaggcattcgtggcgataagggagagcccggtgaaaaggggcccagaggtcttcctggcttaaagggacacaatggattgcaaggtctgcctggtatcgctgtaagtaaactgtagccatctcgcacataaactgatcctgaaggccttcagctcagaaggattttcatattttcactgctattgttccagtatagcctatataatatccatttcccattctctggctaactccatctcactcttggaggtaatgctatttcataccaacatgaaaggtgaggattaagggagatagaaatagacatacaataaaatctcctggtaacaatgtccttcaaccccacttaaaataaacataattagaggaatgactaatattgcactgctgaaataggttgtgaaaaaaaaattgaatataatagacataatgggagaaaagagccccactttacattttcaattttctcaatccggagtccatttaactaaagtttcccattcaatttggaaaaaaaaaaaaaatatgtctcttgacatgtgctctgaaagtgtgattttcctcttctgtctttaaagggtcaccatggtgatcaaggtgctcctggctccgtgggtcctgctggtcctagggtaggtggactcaagagaagacagttcatctctgaaatagaggctaaagcgagcagtgagccccaggctgctgctcccttggtgggattcaccagctcacatgtacctggtgtctgtcttccttagggccctgctggtccttctggccctgctggaaaagatggtcgcactggacatcctggtacagttggacctgctggcattcgaggccctcagggtcaccaaggccctgctgtaagtatgatttggggaaataataaagaagatcacggacctaaggaatgttttcttcagactaaaccaagacaactttgacaacccattaaagttagccccatttcaatatatcctctaaaatatctggaaattgtctatatgcaatgggcttgttaagtccatccctgcaagtgtgcctgggggctcgttatttatttatgtgaacttgattattttttactgatgagaacatgcttccgtgtgaagctcaactgaaaatctgctgccatggatgtctctcactgtaacaaaatataaagcctctcctatctcactttcacctttgcagggcccccctggtccccctggccctcctggacctccaggtgtaagcggtggtggttatgactttggttacgatggagacttctacagggctgaccagcctcgctcagcaccttctctcagacccaaggactatgaagttgatgctactctgaagtctctcaacaaccagattgagacccttcttactcctgaaggctctagaaagaacccagctcgcacatgccgtgacttgagactcagccacccagagtggagcagtggtaggtcaagatgtccagaccagactgacccttctcacaagttgagcttttcaaaattagtttccattgacatttagagtgaaaatgcatttgggtaaagattacattatgtgaaatcacacccaattaatggagcgtcatcttctcccaaccagcacccaacctcatttcccttaaaatgtatttttgcacttttcatagtaataagtaccctgatttgatttttcatggaggaggggagggaaggaactgtctaatcttaaaaatagccaccctcttcctcttaaatatggggtagacaatcaaaaatgttacttatgagagtcagtatctttcattagttattattagaatctgtgttctgctcaatgagaagtttcatgatctgaatgttattttcttaaaaggttactactggattgaccctaaccaaggatgcactatggatgctatcaaagtatactgtgatttctctactggcgaaacctgtatccgggcccaacctgaaaacatcccagccaagaactggtataggagctccaaggacaagaaacacgtctggctaggagaaactatcaatgctggcagccaggtgaggaatcccacaaacacctctccttctgctaaataatattttggtaggactgtttgttaattatctgcattttaatctctgacaaaaatgggcttattaaaaaaagacctgttcctttcctgggttccaattttgtcctaaattgcacattagaagatggattgattggacacatccatgtaattcaaagttattattcaaatttgacttaattggtaatcattgaaaaaactgactaatgtcatttagtgtgaaggagcactggccagctatatgccacactcatacatatgcattttcagaatgtgagcagcttttctgaatttttaatcaaaccttttcaccaactttactgaatgcctactggaattccataaattacaaaatgacagaaaaagaaaaatgtcagaatttctacctcctcattctcttattctaaagaagaagcatatgcaaaaaggattaattgaaacagataacttttttagatgaccttgcctcagtctagtaggtcttatgttcatctaggtaactgatacttcaaagacaagtgaattaagttttctttaaaagtacccttttcctaagcttggatctgagtctactcttcctgagatctttttttttcttttttttttttttcatgtttgactcttagtatctgagtccttctccacttaactggaatttcatcctattttctgtagtttgaatataatgtagaaggagtgacttccaaggaaatggctacccaacttgccttcatgcgcctgctggccaactatgcctctcagaacatcacctaccactgcaagaacagcattgcatacatggatgaggagactggcaacctgaaaaaggctgtcattctacagggctctaatgatgttgaacttgttgctgagggcaacagcaggttcacttacactgttcttgtagatggctgctctgtaagtaatagtgaaatatgggaatagctttgggaagtgggatggagggggttctaacttagactgcccccaagggggggtctaaaggggggttaaaagaacagaagaatgagagaactaacttatttcataagtaaattcagtttttgtatgtattttatatttatttatttatacgtattaatttcgtacttaaattcagatgataaattcagagtattcttatcagatagtgccttctgaaatgctgaaatgtatactatgtccatgcattgttttttctttagcatgttttttaaatggtaatgtgtgcccagaacttaaaatttcttgagacttcagtggcctaaactataatttatagttatgtgtattttattttacttattagtatggcctacatttaacttttaatgctttttctacaatatgctataaatataagaaaaattaaaattcactaacagcaagactacatacccacccaggtcccgctcccaaagacacacatagagggacatacacacaacaatcctaaaaatgactttgtagagataggtcacttggaatgtgtgttgaaatgttgttggtttttttggtttgtttgtttgtttgttttttgttagactgatagggagcccctcccactaaagacacccttgatactgttatttcaaggatgaacttatttatctgggacagacatcttcagaatgacacatgccaaacagtggttcttattaaatcaaaggttcagatattatcagattcagaaatagtgatgctttgtgtatctattttcttctctttaaacagaaaaagacaaatgaatggggaaagacaatcattgaatacaaaacaaataagccatcacgcctgcccttccttgatattgcacctttggacatcggtggtgctgaccaggaattctttgtggacattggcccagtctgtttcaaataaatgaactcaatctaaattaaaaaagaaagaaatttgaaaaaactttctctttgccatttcttcttcttcttttttaactgaaagctgaatccttccatttcttctgcacatctacttgcttaaattgtgggcaaaagagaaaaagaaggattgatcagagcattgtgcaatacagtttcattaactccttcccccgctcccccaaaaatttgaatttttttttcaacactcttacacctgttatggaaaatgtcaacctttgtaagaaaaccaaaataaaaattgaaaaataaaaaccataaacatttgcaccacttgtggcttttgaatatcttccacagagggaagtttaaaacccaaacttccaaaggtttaaactacctcaaaacactttcccatgagtgtgatccacattgttaggtgctgacctagacagagatgaactgaggtccttgttttgttttgttcataatacaaaggtgctaattaatagtatttcagatacttgaagaatgttgatggtgctagaagaatttgagaagaaatactcctgtattgagttgtatcgtgtggtgtattttttaaaaaatttgatttagcattcatattttccatcttattcccaattaaaagtatgcagattatttgcccaaatcttcttcagattcagcatttgttctttgccagtctcattttcatcttcttccatggttccacagaagctttgtttcttgggcaagcagaaaaattaaattgtacctattttgtatatgtgagatgtttaaataaattgtgaaaaaaatgaaataaagcatgtttggttttccaaaagaacatat

SEQ ID NO: 39 - DNA, 72410 bp, Homo sapiens
cgcagcaaacacatccgtagaaggcagcgcggccgccgagaaccgcagcgccgctcgcccgccgccccccaccccgccgccccgcccggcgaattgcgccccgcgcccctcccctcgcgcccccgagacaaagaggagagaaagtttgcgcggccgagcggggcaggtgaggagggtgagccgcgcgggaggggcccgcctcggccccggctcagcccccgcccgcgcccccagcccgccgccgcgagcagcgcccggaccccccagcggcggcccccgcccgcccagccccccggcccgccatgggcgccgcggcccgcaccctgcggctggcgctcggcctcctgctgctggcgacgctgcttcgcccggccgacgcctgcagctgctccccggtgcacccgcaacaggcgttttgcaatgcagatgtaggtaaggagcggcgaccccagcccccgcgcggggccccacctcccccgcgaccccgagggttcgcagacgccccgcccgcccgccgctggccgagggaccccagcgcccgcctcctggtccctcggcgccttctcgaatcctgcaagtggacgcccagagccgactttctttcccccctccctcctctccctttctttccctctctttgccgagatgcgtctcaacctcaaaattccaccgaaattccgccgcagctccagccccaggaaagggagccagtttggcttttggcaggcggcgcgccctgggatgccagcgctgggggcggggagcgtgggggacacggcgtgggggcggggggctggaggactggggaccccaggaagaaactttcgcagataaggtgggagttgggcttctctgggcttggggctgggtggggaagggcttctctgctggggcttctcccaccagccccatttgggggctccccgatcaagccagggtgggatggaagcccgccctacccgaggcaggttccacaggcccagaggggcaggtgaaaaagccggtggcgtctcctggcgtggctccttgcttgcgccctgcccaggaggccctgcaaactggctgggcagggaccgggacccccgaatgttccgctttttcgggacgtccacaaaagctggagactttggtgaccggacccggcacgtgggactgtgctgctgctcagattccccagcaaatacccatgacctccggactcctagcccccaaaagacaggcgccatggagggaggcaggaggggcccagttatttgttctgatccatggagggggaggaccagcagaaatgggaggaacccgctggctcgaagtttccaccctggtcctgcacctcaagcctctgcagccctggtgctggtcagcatggttttcctggggcaagtctggctacacggcaggtggtctcggagccccctgccctccttccttcttatgtctgagtctcagtcgagtgacctgtccagggcagatggagcaaggcgggggccccctcacctgcccagagtggaggtgggactttctgtttctcctgctgtcagccacgcccttcccataccccgcccacggcttcttgccccaccccggttagccctaggagctgcgtgcccagctggggaagttttcagttgcaccaatctattgagatcacaggtctcaggtggctcaggccacctgggcggaaggcttggtgtgtgcctgtgtcagtttccacaaaacccagtttgggggaaatgaggtcttttctccagtttagccttggtgctcagcaagatttgtgggtgaaggagaggttcctttgatgagggagccataatgggcctttctctgggggtccacgaggagtgcaggcctgtccaggctccttggctcaccagcacgtgctggggcaggatgtagccaaggcccagaaggaggctgtggataaaaggacctgggagttggatttgtaggagttgggccttgggacccctccccctcccgcccccccccccaccccgccccacacacacactcctcagctgtgtgggagaatgtccaggcagccactctgtccttgcttggcataagttaaggcggccactgagctgggagctgtttctgcgtggggtgtggatccaggatggcagagggtggagggctgcagtgcgtgcctcccgcctccttcatgctcagcgcagcactctcctcttctgggttgcctggcatttgtgtctaaatctttgcatcaaaatcatcctgtagctaaaacttttcaccccatcccggctcagaggcccagtcagatgccagagttgcactgcagagctcagggcattcgcttcctgtggccgctgtgacaaactaccacaaatgggagggcttaaaagaacaggaatcgattctctgtagctcaggaggccagaagtctgaaaaggtgtccacagagccagttccttctgggggctgtgagggagaatctcttccaggcctctctccttgatgttgcttggttccattttcaaggaacacatcacttccatttccgcctgtcttcacatggccttctctcgtgtgtctctgtgtccaaatttccctgttctttttttttggagagcaggctggagtgcaatggcgcaatctcggctcgctgcagcctccgcctcctgggttcgagcaattctcctgcctcagcctcccaagtagctggggttacaggcacctgccaccacacccggctaattttttgtatttttagtagagacaggaattcgccatgttggccaggctggtctcgaactcctggcctcaggtgatccgcctgcctcagcctcccaaagtgctgggattataggcgtgagccaccgcgcccggccaaattgccctgttcttctaaggacagcagccattggatttagggcccaccctaatccagtatgacttcatcttgatagatcaacaaatactctatttccaaataaggtcatattcataggatctgactagatgtgcatttgaggggggacgtaattcagcccatacaccaggctgccttctcttattcccagtcaccctttccgtgctcaaccaacttgggataaacaacccaggacatcccagggtagggtcccggaacaaatcccacagggacgacagcggcctgtctattctccagtgttcgattctcctcgaagcgatgcaggtttgtgactttctcagcaatggttccccattctggctcagagcagaattgcctggaagattcttaaagattgctcaggtctaggtccctttgcagatacagagggtcttgctcagacttcggcttttgcagttttaaaaggcccacaggtgatttaaccagggctgtgacccaggggtctcagaaagggggtacagtggaggttaataaaggctggcttgttatgtggcaagctggctccttttactcttggctgcatgcagccttgttaaatggcttggtgtctacaagaggcaattggcttaagaaacagtcagatttctgtctgcccggctgaggatttctgggaggtatctccctagcagctcttgcagttggtaggaccggaactgtggtcggcaaagataattcatgatgaggtggtgatgtttaggataagggatggtaagaggtgacctgatttcttcctggaaggccccaggtccttgtcctttccagcaaggccagcacaaacgggaagcattttgtgtctcagttacagtactgttcaaatgcgctgctggcccggctccctctcacccagtgaaatccttcacatctactgccagcctgcacagctacagggatctggctggaaattagctttgggctcaccattcaggcagtcccatgcctggagccacttagccagctgagctacttggcagactcgggctgcttgggcccgtttctggactcaagggtaaagccaggagctctctggatgcagagaataaaacctctcctctggcttgggtggcagtacctaaggccacacattatcctagaagacctctgcgatgacatcttcctcacatgttcccacctccagaaactgtcctctgcaaatcccccgaggagctccagctccagctagagaggggtccacaaccaagagggggaacaactgctattttctggggtgaacagccaagggtgacctggttcctgggggacacagtgacagggaccagacagatagtaggggccaccccagaaaacacacagcacgcagtcaaaaatggctctgtcttcaggacacgtgctcaggaaaagcaacacagcatcagattcatgtgagctgggtcaggccttccatgcgagggggcggcgtggcgctttttaaagaaactgttggcaactcgttgtgcgaagtatgtgatcgatctgtattgtcagttttgttcatcttgattttcatattgggcttgtctgtgtttcaacaagcaattatggagtggctgcctctgcccccggggatgtaagggagaagcaagacattgtccctgtggtgggggatgcagggggtggtacatcttggcaccaggcggtgtggaagggggttcctgctgcccggcgtggtgagcaggcctcccctcctcaactgcccaggtgtggtataaagtcagtccactcagtgtggtttcggtaaataattaacaacagataaactttcgaaataaccaaaattcaggagtaatcatgtgacaatgtgaaatgcatttgcaagatgtgaggatagaaggccccatggtaggttgaggagggagctgtggggagaactgaggctcttcggcttggttttgaacagcgtccttggagggacaggatctgtcaggggagtcactgacccctgaattactggcagctcccaaggcagggggactggaagagcagggagagctgtgcacagcctggaggtatggcaggtgctggaaggagctctctggacaacacacgtttctccctatctgggatctgaggacagtgccagcctcagagcctctcgggcctcccctatttgcacccttctgggggtgcagagccacgtacgcagtcctggcctgtcgtttgtgagctgcaggtgggcttgggtactgcctccctcctccctgctgtcgcagccaggttgctaggtagatgccactggtgtgggctgagaggttcagactctgtggcgacatctgagcacatggagaacagggcatagatgactcctgggagactgagaggcgcgggcagccgtctccagtcctgatgcagaaccactgactcgatgcagtgggggtcgtgtgtaggggtgaacgtcttgggttcggaaacaacaaagaggtctgcccgaggcttcccaggcagctgcgaggagggatgcaacagcagggaggaggagataagaaggaagcaaagacaggcagacgtggcagtggcaggggcaggaggggtgcatgccctggacactctctctgtcccccggtgcacgcacaggctcacaaaccagggacggagggcaagtggctgcatggctaggatggtcttcttttctttttcttttttttcgagatggagtctcactctgtctccaggctggagtgcagtggcgctatcttggctcactgcaagctccgcctcccgggttcacgccattctcctgcctcagcctcccgagtagctgggactacaggtgcccgccaccatgcccggctaatttttttgaatttttattagagacggggtttcaccgtgttagccgggatggtctcgatctcctgacctcgtgatccgcccacctcggcctcccaaagtgttgagattacaggcttgagccaccgcacccagcagatggtctttttcaagaggggagggcagagtgaagaaatcaaggtaagggagggtgaagaagccgcatctggaggacggcactggggaccgtaacccctggtcatttagcggcagcagggtggggtgtgcacaggtgttctaagccaagggaccaactgccccaggaaaggtgagagttctgggtacagagtaggccaaagaggagcctggggattcagggggacccacaaggagattggggccaaatgtcacggctctggcttgtcatgtgacatctgcattccatcccgggacccacgcagccaccaaagatgttctggctgtggaatgacagcgggcgttgcccagggagcctggtagaaggcagccgcctaactccgcgtgctggagcgggcctgggggtggcactggagtttcaggactctccaggtgctgctgccgcccgccaaagttggcatagaccagtcgtctccggaggggtgcccagtacagcctcggtgctaagaatgttatgaatagttagcatatggattcagagttgtactccaaatataatttttttttttttttttgagacggagtcttgctgtgtcacccaggctggagtgcagtggtgcaatcacagatcactgcagcttcaatttcctggcccaagcgattctcccacctcagtctcccaagcagccaccacgcccagctaatttttttaattttttgtagagatggggtttcgccatgttgcccaggctggtctcgaactcctgagctcaagtgatctgcccaccttggcctcccaaagtgctgggattacagatgtgagccacggtgcccggcctatatatacttttttaatgaatatctgatattgtgagtgcttggccaaggttttgtttttgttgcccgtgggtctgaacagaaagtgtggaggctgaccacctcagtgtcggggggtggagtaagcaggcagatgagctgccctgagattgctgggaggagggaaggcgggcagacccagacttcccaatggagagatggtcaggagcatggatgtctcagagtggcaggcaggatgaagctggtgtccccaggacctcccagggcccacctgcctggacccctgcagcctgtgccctgacgccctggtgccctcgtgcatttgctgggacgtggctgtgcagcggcagagggaagggcacagagaccccgccccgatgattcccaccttacaactgagggctgagctactccccagtcagccaggtcagactggagcccagggaaagcttccggagccccagcaagtcaggttgagagtgtgtttacgctaagaagcaaattgaggaacagtctttataaaagaggggtcctaacccagagtgtgtgaacacccagccagagataggcctggcgggtttgggggtggtcacaagcccggaaactgtaagtgaagttgtgtgtgtgtgtgtgtgtgtgtgtgtgtgtgtgtttgtgtgtgcacgcgtacgtgttttttttgtggacagtggcagccgccaacttctcaaaggtgcctgtggccctccaaacgtcaagtcactgccatttaaaaggagtctttttataggtttcgagtcttctgtttcttgtgagtatctgcctagtctcggagctgagcgatggtaacgatcttgcctttctctcctcttccaccctcattctgcactcggccgccctgggcagccaggatccgctcagacactaccaccacgaggggagtccgaggcagacctgtaaccagctctggggaaaggatgccatcagtgtcctttggcctcctagctggtctcagggatggctccaaagacctgggaggttctgtggttgtcttccatggggaagacgtccttggtagacggcagctgctctttgatctcaaactctgatcacagctggaccacacatggcctgagggaactccagacctcaccagttaggaagggcctggtgtctatgtcttagatacctgcttcttacagaatttattcacttaagtgtttttatattttgttttacaatagaatttgggtgcctaccgtacacagaaatactatggcaagtgtgtcaaggaattatttagttttctgagacggagttttgctctgtcgcccaggctggaatgcagtggtgcgatcttggctcactgcaacctccgcctcccgggttcaagcaattctcctgcctcagcctcccgagtagctgggattacaggtgtgtgctgccatgcccagctaatttttgtatttttttttttttttttttttgagacggagtctcgctctgtcgcccaggctggagtgcagtggcgggatctcggctcactgcaagctccgcctcctgggttcacgccattctcctgcctcagcctcccaagtagctgggactacaggcgcccgccactacgcccggctaattttttgtatttttagtagagacggggtttcaccctgtcggccaggctggtctcaaactccaaagccatggtgcccatcttcaaggaagtgagcgcaggaatgcgaagatcatcttgcaggctgcacctcttgctagagactcttaccgaggttaggacactgttgagattgtgggccctgaggggtggatcttatcagagctaagataagccccgaggaaaggtcctggggtgggtatggggagcccagggtggctgtggtagagagtgtaccacagggggacagagtcattagaacaaagtatggccaggcttgagcccaggtggagcagcaaagcctggaggcccggcagtgggacctggcagtgggactccggggaaggctttatggcccctgcactgggggagagggggcagacaggagggggatgacactgaggaggaaggtggtgttgagaggctcgcagttaccaggggagcagagctcccacctgcactggggaagacccaggagatggaaggcaggccctgagcggggccatgggtcgcgggcagacacaggagatgcctctggagcttgacccagtgcctgggagccagatgccctctaacctggtcaggagctcaggcgggtagaggtctctgttgagttctgctggaatctggtgaccagaaagtctcggcgagagggatttgagctagaacttcagcagacagtggaaattgtgtaacggggccttggagggaacaggaaacggagcattgagggggaagggagccagcagtagcgaggggaactgacattcatagcaaacagggtgagcgggggtcaaatgctggccccagattgagtccagcagagcgatccgggacaggtggcctctctctgcccccacttccacacctccaaaaaggagaggcgaatttcctgcctcccaggaagctctcggagctagtgggggacaccagctctttctgcatcaaaccctggctctccctgtctttgtgttcttgttcctccccaccccgccctgagggaggcctgggagcagccagggaggtgaatcatgacatggtgataatgactatggcaacaataacagctggcagaggtgccaagggcttggaggtatgttcttgctcttcactagtgtcaacccatttccttccctatcctcatccccattgtacagacgatccaacggaggcacaggcccactaaggaacctgctcagggttagctggctaggaaatagcagagtaaaagaagagatggtttttaggccgggcacggtggaatcatgcctggaatcccagcacttggggaggccgaggcatgtggatcgcctgaggtcgggagttcaagaccagccttgccaacatggtgaaactccatgtctactaaaaataaaaaaattagctgggcgtggtggtgcacgcctgtaatcccagctactcgggaggctgaggcatgagaatcgcttgaacctgggaagcagaggttgcagtgagccgacatcgcaccactgcactcctgcctgggtgacagagtgagactctgtctcaaaaaaaaaaagaagaaaaaaagagagagagacggcttttaaaaggaggtacatcaacagaatggtgctgattcagactgatactggcttggggatgaatggtctaggctgtggagctgggctgaagctctacaggtgacggatggagccactgaggagggagaggagctcctgaggctggccttgttcatgaggtttgcctgtctgctggagataagctaaatcaattaatctttctccctgccgcaacagagtgagcagacatttcaaatgatattacagatttgtgtttatgacctagaaaaatgttcagagcacagtactttcaaaagcccagactgggccggttgcagtgactcacgcctgtaatcccagcactttgggaggctgaggtgggtggatcacctgaggtcaggagtttgagaccagcctggccaacatcatgaaaccccatctctactaaaaatacaaaaattagctgggcgtggtggcgggcacctgtaatcccagctactcagtaggctgaggcaggagaatcacttgaacccgggaggcggaggttgcagtgagccgagatcgtgccactgcatgccagcctgggcaacagagcaagactccgtctcaaaaaaaaaaaaagaaaaagcccagactggccaggcgcggtggcttacacctgtaatcccagcactttgggaggctgaggcgggaggatcacttgagcccaggagttccagatcagcctaggcaacatagcaagacctcatctctacataaaataaattaaaattttaaaaattagccaggggtggtggcacgtgcctgtagtcccacctactcgggaggctgaagtgagaggatcactggagcccaggagtttgaggctgcagtgagctatggttgtaccagcctgggggacagagcaagactctgtctataaagaaaaaaaaaacagcttggctgggtgcagtagctcatccctgtaatcccagtgctttgggaggccaaggtgggtggatcacctgaggtcaggagttcgagaccagcctggccaacatcatgaaaccccatctctactaaaaatacaaaaattagccgggcatggtggcgggtgcctgtaatcccagctattcaagaggctgaggcaggagaatcacttgaacccaggaggtggaggttgcagtgagccgagatcgggccaccgtactccatccagcctgggagacagagcgagactccatctcaaataaataaataaataaataaataaataaataaatgaatagccaaaatttcgaaggcagatgaatgccaataatgttctcaagaagcaataaaacattgggttataacctgtgcctctgaggactcaaggggaagtcaggcaggccccagccagcgttagtcgcagctgcctgctctcccaggtcagcccttgcaccctcgcagaggaagccgtcccttccgcctctctccatcataaagaaaacttctctgtctctccattcacgtcccaaatgccttctaactttaaaataattacacaactatatgtgttaatcatggaaaagacacttaagcaaaaagcaagaaaaatcatcctgattgtatccattgcctagaatttttttttttttttttttttccccgagacagagtttcgctccgtggcccaggctggagtgcagtggtgcaatcttggttcgctgcaacctccgcctcctgggtttaagcaattctcctgcctcagcctccagagtagctgggattacaggtgtgagccactgtgcccggcctatgttttttgtttttttttgttgttgtttttctgagacaggttcttgctctgtcacccaggctggagtaaagtggcatgatcatggctcactgcagcctcagcctcctgggcttaagcagtcctcctacctcagcttctcaagtagctggaactatgggaccataccagcacacccagctaatttttacattttttgtcgagacgaggttttgccacgttgcccagtctggtcttgaacgcctgggctcaagccgtcttcccacctcggcctcccaaagcactgggattacaagcgtgaaccactgcacccagcctgcttttgagctgctttattgagatgtaattcacataccatgaggtcactcctctaaagtgcacagttcagcggtttgagtacattcacagagccgcacagccatcatctctaattttgcagcttccagagtagggcctcaacgtgggttcacgtgatgtttccccagatagactcaggtcaaacgctgttgttagagccctgcagagccgcgggtctcagcccttgttggtatggcgaggtcctgtagccggcagtcggcctcccaaaatgttgttggctttttccagcggttggcaaactagacccactgctgggctgatggcctgttgttgtaaatatttttttttctttttgccaccacacccggctaatttttgtatttttagtagagacagggtttcactatgttggccaggctggtctggaactcccaacctcaggtgatctgcccgcctcggcctcccaaagtactgggattacaggcttgtgccacggtgcctggcctagtgcaaataaagttttattggaacacagccacgcccactggtaaggccaaacccacgtggcttttgtgctataacaacagagttgaatggcggtgatcaaggactgtatgggcctcaaagtctaaattacttaccagctggctgttcatagaaaccttttcggatccccagcctaagtcatcgcaggctgatggcacaggtctgggcttcccagtccttgtgtggctggctcctctctccccggattgcctgttccctgctttccagaagcaagcaggtggcctgggaagaagtggaacctgcagggtgtcattctccaagccgatgctgaagatgcaatgccttcacccgcctcttctgtgctcttcatcgcacgggtgggctagagcagggaagatggactttcaggctggagcctggctttctgtggtgggatgttctgtgggtaccgagacccccttactgcatcttcagggacagaatctggcttgggttgagagtttatttggccctttctgatctgtaatcgggagagattgattgagctttcctgacacagacgtggcaaagcaaactggcagtggggcaggctttgccaaggctcgtcatggtagcggaggcctggacagagcacccgccaacagctgctgcttaaccaaggacagaatgaggaaatggacatttcagagaaaagaggcgacatgaaaagtattggagaaaagagcctgggctttggagtcaagtgggactggttctgaatcccgactgtgtgcctctctgagccttggtttcctcttctgtaaaagcaagatcagactcttcagtgtggtgccatgggagattcatattttttttttgagacagagtctcactctgttgtccaggctggagtgcagtggcacaatcttggctcactgcatcctctgtctcccggcttcaagcaattctcctgcctcagcctccccagtagctgggatttcaggcgtgtgccaccatgcccagttcaatttttttttttttttttttggtgtgtttttagtagagatagggtttcaccatgttggcctggctggtcttgaactcctgacctcaagtgatccacccgccatggcctcccaaagtattgggattataggcgtgagccaccacaccctgccaagattaaatttttgatgagtgagtcaaatggaggccaggtggggtggctcatgcctgtaatctcagcacttttggaggccaaggtgggcggatcacttgaggtcaggaatttgaaacaagcctggccaacatggcgaaaccccatctctactaaaaatatttttaaaattagctgggcatggtggcgggtacctgtaatcccagctactcgggaggctgaggcaggagaatcacttgaacccaggcggaggttgcagtgagctgagatcacgccactgcactccagcgtgggtgacagagtgagactctgtctcaaaaaacaaaaaacaaaaaacaaaaacaacaaaagcactggaggggctcaatagttagttagtttgtcctagacccttctagaatgttgagatcctggacagtgcttctgagaaacctgcagtctctgtccaaggagcccttaaggaagaaaggcaggagtgtggggcaggaagaccagcttcccctttccattccacacggctggctcgcaatattctgtttctcctgcgacagcctggttcctccctgctccccagctcgcctctgccaccattcttccctcagtccagatcaagagttcaagggacggggacagatgatcagaaaggcccagctcaggcaaggaaggggagaaaagggaactcgtatatgcggtgggtgggaatggaaagtagtacagtcactatggtggaggttcctcaaaaaactacaaatagaacggccatatgatccagcagtcccacgactgggcatttatccaaaggaaagggaatcagtgcatcagagagacacctgcacccccatggtcctggcagcactgttcacaatagccaagatatggaatcaacctcagtgtccaacaacagatgaatggctaaagaatgaaatagtatttcattgtggatgttggtacatctacacaatgaaatactactcagccataaaacagaatgaaatcttgtcatttgcagcaacatgaatggaactggaagacgttaagtgaaataagccaggaacagaaagttaaacatggcatgttctcactcatatgggaaagctaaaaaaaagaaaagttgatctcatcgaagtcaaaagtagaacagagaatactagagtctgggaagggttgggggaggagagagggagagatttgttaaaggatacaaaattacagctagataggaggaatgagttatagtgttccatgtcactgttggattaatgtaattaacaataggccaggcggtggcccacacctttaatcccaacactttgggaggccaaggtgggcggatcacctgaggccaggagtttgagaccagcctggccaaaatggtgaaaccttgtctctactaaaaatataaaaattagccaggcctggtggtgtgtacctgtgatcccagttactcaggaggctgaggcaggagaatcgcttgaacccgggaggtggaggttgcagcgagccgagatcacgccaccacactctagcctgggctacagagcgagactccgtgtctcaaaaaaaaaaaaaagaaaaagaaattaacaaaagtatattgtatagtttcagatagctcggaggacattgaatgttcctaccacaaagaaagaaatgcttgagatgatggctgtgctaattaccctgatctgatcactatacattgtatgtatctaaacatcactatatatgccataaatattacaattatgtgtccattaaaaataaaggcccagcccagctcacataaggacggcaggtgtgttccttaaagcatcacaccgggtcccagtactagacggacactccgcctccggttgtgtgactctgccttttctgtgccctagttccctgtttgctccagctagttgagaatccacactgcctgggtcacagtgcccggcctgggtcccgtaatgttgtggggggcggggggtggaataagggagaaagccaggagtgccagcaaggccggctacttggagtgtcggtagcatgacgctgcacgtctagagcatgtacagaaacccgatgagacccgagccttacggtgaccctaggtacagaggacgtttgtcaccactgggtctctctaacactgggaaggtgacataatccgtttgcccacggtcacacgggcagctgggggtccagctgcaccatggccaggcctctggcaccaggtgatggggtacggggtgcttcagtgacacagcacttgacgtgacatgagggagaaaggactgggtgggggggtcattcgtgggcttcaggtccggggggattattatgctcagaaggcatgtgctgacactgtggcaggagagctctggggacaggtgggctccttgatttatcttttttttttttaaagagatgagggtcttgctctgtcgcccaggctggagtgcagtggcgtgatcctagctcactgtagctttaaccacctgggctcaagcagtcctcccacttcagcctcccgagtagctgggattgcaggtgtgtgccaccacgcttggctaatttttaaaattacttttgtgtttagaaaccagatcttgctatgttgcccagtctggtctcgaactcctgggttcaagtgatcctctcatctcagcctcccaaagtgctaagatttcaggcatgagccactgcacctgacctacctactgttttggggcaaaggcttagatggacacgcacacacatgactctcctgggcttctggttcagcactttctcttctgggggtgctcctctcatttcatcctcaatcctgagctgaccccagaagccaaggaccagcctgcccagcccaggcagaaactgagtatgccaagaggaatggggtcagggtggagctgggatgagcattgctggcctgactctcccttgtgaggtcttgtccacttggcccagttggctccagggcagggaataaaggaacagtctgtggtggtcttcccttctgtgcactagttctggaaagcagggataaaacaaccaggcaaatgcataaaaatactgtcgagggcttttcagcacaaaggacttcacatcttccttatttacaaaggctctgcgggggaggtgaggcaggtgtttggatggggagcagccgatgacttgcccaaggtcacccacagagtggcagtgccaggaatccaaggggaatgatcctggctcgagtctctgggaagaagattagatttcacagctttggatttaacatcactttgctccttttggccaagaggcatgttgtcctcagaaggccttggtgacaggtatattttgccttaatttgagtagtttagaggcatggaagggcattttggcagcagtgatcaaggactttaaaaataagtcttccctttgatcaggcagccctatatcttggagtttttctgagagaaataatttaggacacatggaagtatttagctgaaggatattcatctccgtcttgcttatcttacggaaacgttagaaacacctatatatacagtagcaggggcgtggttaaataaatcacagcatcagatgctctgcagacatcacatggtatagctttttcttttcttttttgtttttgagacagtgtctcgctttgtcacccaggctggagtgcagtggtgcgatctccactcgctgcaacctctgctccctgggctgaagcaatcctcccacctcagcctcccaagtagctgggaccacagacacacaccactatgcccagctaagtttttgtatttttagtacagatggggtttcgccatgttgttcaggccggtctcaaactcctgagctcaagtgatcctcccacctcggcctcccagagtgccgggactacagacgtgagccaccacacctggccagaacgtttggacacatgaggggacattagactttctttggcaagggtgtattttccagttgctctagaatgaacatgaattccatgggtgcacctgttttactggacttcgctatattgtgctctgcagatactgcgttttcatgaattgaatatcacggctggctcaactctgagtctatcggtgccatttttttctcacatcacgtgttcacttcatgtgtttgtgtcccattttaataattcttgcaatatttcaaactttttcattattatcatacctgttatggtgatctgtgatcagtggtctttggcgttactgttgtaattgttttggggcaccatgaactgtgcccacatgagatggcaaagttaattgatccatgttgtctgtgttcagacgactccaccaactggccgactggcggcttctggtctctctctctctgcctaggcctccctctttcctgagacacaacaatattgaaattaggccaattaattaccctataatgggactgggcgtggggactcatgcctgtaattccagcactttgggaggctgaggcgggaggatcaccttgaggccaggagttcgagaccagcctgggcaacacgacaagaccccatctccacaaaaaattaaagaacttagctgggtgtggtggcacatgcctgtagtcctagctactcaggaggctgaggcgggaggatcacttgagcctgagagttctaggctgcagtgagccgagatcacaccattgcattcaagcttgacagacagagcgagacgtctcttactttaaatcaaaagctaggagtgattaagcttagtgaggaaggcgtgttgaaagccaaggtaggctgacagctaggccttttgtgccaaacagccaagttgtgaatgtgaaggaaattaaaaaatgctactccaggtgatcacacaaataataagaaagtgggcctgccggccagacacggtggctcacgcctgtaatcccagcactttgggaggctgaggcggggggatcacctgaggtcaggagttcaagaccagcctggccaacatggtaaaaccccgtctctaccaaaaatacaaaaattagccaggtgtggtggcgcaggcctgtaatcccagctactcgggaggctgaggcacaagaatcgcgtgaacccgggagatggaggttgcagtgagccgagatcgcaccactgtactccagcctgggcaacagagcgagactctgtctcaaaaaaaataataaaaataaaaaagaaaaggaaaaaaaagaaattgccacagccaaccccaatcttcagcaaccaccaccctgatcagtcagcagccatcaacatggaggcaagaccctccaccagcaaaaagactggactcactaggtcgagatgattgttagcattttcaagcaataaaatatttttatttttatttttatttcttcaagttttgggtttttcttttttttgaggcaggaccttgctctgtcactcaggctggagtgcagtggcatgatcttagctcactgcagcctcgaacttctgggcttaagccatcctcctgcctcagcctcctgagtagctgggactgcaggtacgcaccactatgcctggctatttttagttttttatagaggtaggatctcactgtgttgcctggctggtctgaaactcctggggtcaagccatctacctgccttggcttcctaaagtgctgggatgacaggcgtgagccactgccccggccaataaagtatttgtaaattaaggtatgtgcattgataagacataatgttattgcacacttactgggctactgtacaatgtaaacataacatttatatttgggaatatatattggtttgggaaaccaaaagagtcatgtgactcactttatttcaatattcactttattatgattctgtgggaactcaacccgcagtatgtctgaggtctgcctgtacctgtaatttttaaaagctagcatttgctaatatgtggttctaattgcagtcaacaatagtatggacccagactctcaaggctgagttggccttaggccagtagtgaatcccatgccagagagaacatttagcagggcggattaatccagaggatggggctgccttctagagcttgccaaggcagcgtcaggagagcccaggcttgagagagatgtcctcagtccagaaaagacctgacgagcacttggcagtcgtgctggacattctgcaagggccatcgaaggcctagcgtgccatcctgttggtccccatgctatttcctcctcactagaacctctccccttgctttagaatgggcgtcaaggccacgctgagaggataaaagatgtagggatcttctccgaggaagaagcatatagaagattttgtatctatgggtccgtattagggtttcccagagaaacagaaccaataggctccatccagctgcgtaagatgggatttatgtgggaattgactcatgcaagtatgaaggctgggaggtcctggaatctgctgtctgtgagctggagcagcagggtcactggtgcagtaatgcagcctgagtctcaaagcctgagaagcggggtggccactggggtaagtcctggagcccaaaggcctgaggcccaggagctctgaggtccaaggcagaaagaaggtggatgtcccagctctctctctttttttttttgagatggagtctcactttgttgctcaggttggagttcagtggtgcgatttcggctcactgcaaccttcacttccctggttcaagcgattctcctgccttagcctcctgagtagctgggactgtaggtgtgcgccaccacgcccgggtcatttttgtatttttagtagagatggggtttcaccatgttggcctggtctcaaactcttgagctcaggtgatccacctgcctcggcctcccaaagtgctgggattacaggcgtgagccaccgcgcccagcctggatgtcccagctcttgcagagggagggtttgcctgcctctgcctctgtctctttgttctgtccgggctttcaacagattgagtgatggtgccccacctggcgaggagggatcttcttactcagtcccccggttcagatgccagtctcttcccagagccacccagaaatcacgttttcccagctatctgagcatcccttagcccgtcaagctgacataaaatgaatcatcaagggctgcgaagatggactccaaaagtgggcgggggtaggggggtggtggtggactgtgatcgagaacattcctgcagggagaatgcctcccttccctgagtcagggaccagataacctttccagggtccttccagcccaggacaaagggctttgtctcaggttcagctctcctgagaattcatcctccccgagatttggacacctcagccgaattcctgctgtttaccttcttctctcaagaaacaacaacctgaggattgttgctttcacttcttcggacccaaatcatgatttcccagccacatttctcagttgtcaaatttgtggaggatgctggaagcttctagtgagttgcttacagatgatccaactggcggcttactaaaacatatcttgggctgggggcggtggctcgtgcctataatcctagcactttgggaggtcgaggcaggggaatcgcttgaggtcaggagttcaagacccgcctagccaacatggtaaaaccccgtctctgctaaaacacacacacacacacataaattagctgggcatggtggcatgcacctgtagtcccagctactcagaaagctgaggcactagaatccctgaacccgggaggcagaggttgcagtgagccgagattgcgccaccgtactccagcctgggcaacagagcaagactgtctaaaaaacaaacaaaaaacatatcttgacaatgccagtcatcactttaccacagaccttaagatgccaaccacccagactaggtcaggggcccccatttccagcagctactcctgcttcctggaaaccccctgcaccggccagactcccccagtgtcccatgttcatccccagcctcgccctgccagcttccctcgcccatccttctgatcaaactgtctgtggggaactagccctcaaacgaggccaagtacgtgtggcttctcctcctgtgtgggcaggtggttgacgggattctttcttcccccgcctccagtgggtttcagtttaacgatggctttctggagctgtttagaagcgtgaacagatgctgtccctacaggagaagggatggcaggcgttgtcaggaaccctgaccttgaagtgtacctccttaatggcctgacagctcagagagaatgacaccctgggaggtctccatgcagccagctggggacaaaaagatgtcctctgcctggtatggccacgagcatttgtacattgcactgtccttgttcacccacacctccttaaacagtgccttcaggtgcccccatggctcccggctgcttgagccaaatctttatgattgatcccctaacctacacgcttgccccctggctggctcacagctgtccctgacctcacccctgccatgatgtcacagctcaacagctctgctgttcccatggcaacagcctgctatgagtagccagccagggcagaggccgggctgcaggtggaggcggggaagcgattccggccacctttggtcagtgggcccctgagaccactgcggggctgaggctctctgtgtctgttcccatctgtggtgagggtggggttctttccatgcccagctgtttagcgaggctcccaagagggccccggagagtgggccaaggaggggctccaagccgtgggttcgcaaggccagcggcaaagtccctgcaccacggggctccccacaggcagtgtgatgggaaggagagtgagggaagctggtgggactgggttggagatgaatatggttgttggaggagttgggctggggggtcttcaggaagcaggaacacctgctgggattggggacccctgacctaggctgggtgcttaggatcttgaggtttgcagggaagcggtaatggacgctgtcgaggtatgtttagtgagccaccggttgcatcagctgtaagccccccacgtggggagctggcgtctcagctgggagtttggaggtcagtctgcctcagtgtctgtctctgtgaagctggtcaaggggaggcctgagcccgagcttgcccccagaggctgcctgcccaaccatctccaccctggagagctgacccagcccaggatatggatacacacagattcatgagctgtggccccagtattcgggtggaaaagcctgctgtgggcctagccaggactcattctaacgtgacccacccctgccccaggtgatgctaacacagccagtccaaaacccagtgcaggctgggcatggtggctcatgcctggaatcccagcactttgggaggccgaggcgagtggatcacctgaggtcaggagtttgtaaccagtctgaccaatatggtgaatccccgtctctactaaaaatacaaaaattagctgggtgtggtggcgtgcgcctgtagtcccagctacttgggaaggctgagacaggagaattgcttgaacccggaaggtggaggttgcagtaagctgagatcgcaccactgcactccagcctgggcaacatagtgaaaccaaaacccagtgcagtggcttgggacccccgtccccccgccaccactgggacgtggctaagagttggggagaagagggcgaaaaccaagcctctggcagcacacagcgtgtcatggagggtatttttagaggctagaactcagagaaacggagttaaaaatgtttctgatgtttgttttatctgggcttggttcggatgcctccagtgatgggcgtctcactacctacaaagtcagcccagtgatttcaagacagccctggagacagtgcttcctgccctcctgtcagcttctgcctccctgtaatgtgttctgggtggtctagctcagtcatctggagacacacacagtaagtaccacccctcttccccaagcatttcaggtgcttctcgtggtgacaagcactggcatctctgtagatgggtgctgctgttgttatcatccccatcctaaagagcaaactgaggcacccagagtgaagtcgcttggcctaggtcacatagtactcttaagcaccatactctgccattctagacttttctatcctttgcaaacacccttgccccacctcacctcctttggcttttcttcctaggacctttggtcagtgggcccctcctgaccaaaggagttcattctcctcctggactccaagcctgcggcctcttctccccgtccttaccgccctcctcctctcccgagaactgtccaggaagacacacctctccctcgttcagatttgctccttgttcttcagcccgtgcatctcctttaggtcttgaacagttctggacaggtttattcctgatcatttcatcacggttttattgattttgaaactttatcccgtgacatgatcaaattggccatttctagagcacaggcacttcgtagctgttgaccatcatttagctccacgtctgcccgtcggttcctcgtgcgtggaatccagcaccacgtgggtgtctctgccgagctctcggcatttcctgagccctcccggaagccagactctgttctcggcgcttcacacgggccgtctcgtctgatgctgtggcgtcctgcagggtgggaacgggcggtgcccgtggacgtggcgctgtgcctgccggcgtcctgggcaccacagcgttgccgcttgcccactgcctcctagcatggccaggtgaggtcgggctggctgggctgcaccattcgctcgcatgttagaggcgtttctgttcactcaggggacagtcacgttggcccttctggtggcccagcgtcttttgtcccctgtgctgctccacacacccacctctgtacttgcatagttggatttagggacccacatataagttttagatgtgttcccattacctttttttatcttgtaagatttggccagttgtgcaagctgttaaaaacctctaggctagagtctagcaacaattttccacctcccccaagggttatctgtatccggggatgcccacagctttgaattgataaggtcaggtgtgaaagctcaggcagtggtcctgtggaagagcccaccaccacctcggactctacttactttattaaaaaacacatttttttttttttttgaaatggagtcttgctctgttgcctaggctagagtacagtggtgcgatcttggctcactgcaacctccgcctcctgggttcaagtgattctcctgcctcagcctcctgagtagctgggattacaggcatataccaccacacctggctaattttttgtatttagtagagacgaggtttcaccacgttggtcaggctggtctcgaactcctgtcgtgaggtgatccagccacctcagcctcccaaagtgctgggattacaggcgtgagccaccgcgcccggccaaaaaaaccacaattttaataagcttgtttgtgtggctgctgtcagacagttatgaccagggaagggaggacacaggaagctctaaaaaggcgacttaaaaaacccaaattgcattctggggtcacttagtttatgggacctctgttctttacattttaaaagccctcgagggatttcctatattatcatcccaaagacaatccaaaatttcccccaaagaaggtcaaattacatattctacgtaggcgccttagacagagaaatgtctaactttccatatgaaagggtaagctctaattatatggaaatgttctctctctggccgatgccagctaacggagcccttctatagctatttttatgtttcaaagacaaagcgcttgactatgtggcccgggtgctgggcttctggagaaagggaagagcattctctttgttcccttggagggttggggcatcctgggggagtgggaacgaggcctgggctggggacatgcgggtaggatggggaagggggtgtgtccatgtcacgaggaacctgcatgagcacattccaggcgctgctgggtgtggggcatttgggaatggccaggagctctaccacccctgtctggtgtgcagcgttccaggctagggtggctcccaggggagccagggcgagctgcttgaccgttctcaagcctctaggcccagagattgccaggctttggcagggcagctggtgaactggctgcattcctgggcccctcccgcaggggctgggataggatctgtcaggggtgaggcccaggaatctaccccttcaccagcagctcagctgattatgatgcacgtggctgcgggttgcactcagagacttgctggtgtggacagcagggaatcacatgggggatgctgaaatgtaacccaggtctctcagttagacagcgctgggctgcagtgcgggagaggacggggtgcaggcctgggggtcgggggcagagaggctgattgggaggcttttaagggcctcaggtgagagatgatcagggctgagctgctggcaggggaggaaggcagagcaagatgcagcttcctggaagagatggtttgccagggccgcagtactccaagcgtggtcccccagatggcagcatcagcatccctgggagcgctttagagatgcagagtctggcgggcgtgggggctcacacccggaatcccagcactttagagatgcagagtctggcgggtgcgggggctcatgcctggaatcccagcactttgggaggccaaggcgggcagatcacttgaggtcaggagtttgagaccagcctggccggcatggtgaaaccctatctctactaaaaatacaaaaattagccaggcatggtggcgcgtgcctatagtcccagctacttgggaggctgaggcaagagaattgcatgaacccaggagggggaggttgcagtgagctgagattgcaccactgcactccagcctgggcaacagagcaagactccgtctcaaaaaagaaaaaagaaaagaaaaagaaatgcagagtcttgggccccacccagactattgaatcagagcctaactgttaacaagattcaagcagcaccatggccaggtctcacccttctgtgcatgttgacaaatcaagtacttgagcagaaagaagatggggatgatcgacgtgatgaactcagaggcaccaaccgtggtgtcctgggtcgatgcacacagaatgcacgcaggccccttgcaggccttcccacccttcagaagctcagcacacctgtcagggtcacaggagggccagggaggtcagaggtcacgtgaggccaagcacagtccaagcagagtctccttgtgctgtggaagtggtttccagctctgacctccctgggcagcaggctaggagcctggatcaggggcctgcctgctcggcccggaatccctgctgccctgattacgagctatgtggccttaggcaagttacttaacctctctgagtctcaatttccctgtcagattgtgcggataggaataggcctcacctcctatggtgaggcggtgagatggagagaggtgtacgtgaaatgccggaagagtatgaaaccctgcgggtctgcgtgctgatcagtgtgatgtctggattcaaacccagctcctccgtgtaagctgggaaagttattcagcctctctgagcttttgtttctttttgtgagctcagaggggaaatcaaggagagctggaggcggcagggacaaggttgcatccgatggtgtcatgggggaaatcaattcctgaatgatggagccagctgtgattttctggactttatcccaaagacctctgcccagatgttttaagtttgtacccatttccgtgtctccaggaaaaccgacacagcagccccgctggctcctttcacagtcaccctctggatcatgttgcagtgactctagccaagggtatggcctgtgtcgtgtctgttacaggccgaggtgggaagaaaaggttgtccctgtatctggaggggccagttcatgccttgaggaggagagaggcactctgggtcctgccattgtcctcagggatggccatgcttgccattgtcccacgtgtctgttcgggggggtccttctcctggggatacaacgtctgccgcgttgatttttgggtgtctaagtgtaccgggctagtatcacattgagagtcacccactgtgggtggattcacccattcccgtcatggtgcctggggctccagcagcctcgtcacaacacagcctggtagttggagggtctgagcctttgttacaaccgccctgacttagccgcaggactatgcacctggtggggactggggtgggcggccactctctcacaggcccaccccaaggctctagatgggcacgtgcattgttcaaatgccgtcataccttgggggtgcgagggggcagcgtgaggcagacgagagaggcggaggtctcacagtgaaccacaggatctggtatcctgcagccggggtgcaggcctgactgtggagcccccattctgggcgcctcacactccctatgactgtgatgcttgccccccgccccccgatgccacaggagtgcacagcaggcctggagtctccttcggagggggtgaggaggccggcggggggcgggggggtgctgtctgtgggccctggcacttccacgctgcctgggtggagggtccctgggtgaggtctgccttggctgaaaagctgtctgagcggccgcccagggaaaggcgagctgcttggacgtcattctcaagctgtaggccagaggttgcctgactttggtgagaatcgctgggaatctggtggccaagcacattcctgggcccaggtgctgggatcggatcggtctggggtggagctgccatgggctggctcctgcgctggggccacggggctgtagagagcaagagaggagaatgggcccagtgtccactccgctctgtgggaggccctggtgccgtccggaggccagattggtgtccactcgccttccttctgctgctccgagcgcggcttctgcggaggggggagctgtggtttctctgagtggttgaaggcagccagcagaaggcaggcttgtcagctcggggtggcaggaccagagggcagcaggggagtagaaaacaccaaagcagcccaggatgctcagaacactcagaggatgtggaggacagaggagcgccaggacccctgccccttctagaatattctaagcaaccagagagggcaggtgcctctgggaggggagctgtagcgagggccctgattggaaccatggctgtcttcattggcaagtgtcctgccaagggcacccgacgtcctgtctggcagggctggagagacactgggctgcctggagatcagcctgggcatcacaggcagaggcaggcatcccagcaggctgtgcaacaggtgaacggctgtttctccttggtcatcttgggctcagctaaggctctgttgctttccctgccagtgcctgcacaagtccacgtgagaccctgccctctgcctcaagttagtaagtggggagggtctcagaggggagagcaaggagagctggggtagcggggacgaggttgcatctgatggtgtcagagcggggatcgattcctgaaggatggagctggctgcaattttctagacttatcccaaagatctctgcccaaatgtgttaagtttttacccgtttgcgtgtctccaggaaaactgacgctgcttcattgggatgcccacgccagtggggctggcacggggtgcactgaggtcattgaacgggctgggggcacttccagagcagggaagacttgtccaggttttactaattgttggttgacaaggggtgtgagccaacggctcttggcacagaaatagactgtgaaccttggggcctccaggcaccttccgagacacacagaggggcattcacagcagccccgacctcaccacacctaattggacatccctgtggccgttcctggtggtctttggtgtctgaggccaactcctccatgtgagctgggaaagttattcaacctctctgagctttggtttctttttgtggactcaggccttctcttggttatagacctaggagtggaatctctgggtcatagggtaagtctgtgtttccctttttaagaaactgccagactgttttccaaagtggctgcaccattttccattcccaccagcagcgtgcacagggttccaattcctccccctccttcctcactgacagttgctattgtctgtctttttgacgacagccgttggagtggatgtgaggtggcaggacactgcagggtcagtgtgcatttctctaaagaccgctgccgttgaacatgtttttatgtgctgtattagccacacatctatgttctttggtgaaatatctatttaaatctgttgctgatttttatttttatttatttatttttgagacagaatctcactctgtcatccaggctggagtgcaatggtgcaatctcagctcattgcaacctctgcctcccagatacaagcaattctcctgccttagcttcccgagtagctgggattataggtgcgtaccaccacacccggctaatttttgtatttttagtagagacggggtttcaccatgttggttaggctgctttcgaactcctgacctcaagtgatccgcccgcctcagcctcccagtgtgctgggattacaggtgtgagctgccacacctgtccttcttttgctgattttcaaatgggattatttgccatcttactgggtagtaagaggtgttcatatgttctggattcaagtcttctgttggatatatgatttgcaaatatttccttccagtccgtaccttgtattttcactttacttatggtaccttttgaagcacaaaggttttttttttcttttaattttgatgatgttcagcttatccgtttctttgtttattggttgtgcttttggtgttgtatctaagaaatctttgcctgactcaaggtcatgaatatacacctacgttttcttctaagcgtttatagttgtagatgaaggtctatgatccattgtgagttaatttttgtatatagggtgagataaggctgtgaattcccattttttgcctgtggatatccaactgtgccagcatcatttgttgaaaaacaaaaaaactattctttccccacattaaattgccgtggcacctttgtcaaaaatctcaatcattgcattgaagggcccagctttctctctccctttctctcttgatcatcatggtggttggcagatctggctaaatataatattaaccactattctaattgtgtgatctgatttaccaagaggtgcaaggacctcccactagaagacttaagtcaaagccagctgcagtgtgaccacctgaggttggtcaaaggtgctggggttcgtccaagcagcagagggcctgtctctgccacttaccagctgtgtgatctgggttaagcatcttcatctctgcctgcctcagtttccctgtctgtgaaccggggggggtaggagcttcgtatctcaaaggattactgtaaaaaagatgaacggatacatgcccagtgctcagaggggagcctgcacggttaatgttagctgtaatgtagatgcagtattttctgactcctgcaactacatgtgacttcagctgcaactacgtttgactccaaaggcttagcctggttccacatagactaagatgaaagaagggaaggagcagtggagggggactccatatcgactgtggctgtcccttagcctttcctgcagctcacagatctggctgtttctggcatcagctacccgtggcaacagacacaatcccgtactgttttggtgtaaatgcccctcctttcctaggaaggcctgccaaagcatgggtcccttcctgatgccaaagagacctggaagagtccttctctgatcattataaaaggaaagagctgggagtcatgaagagagagctaacaccagcttctcctcctctctggtttctactggattcaagtatcagacttgcatgcacacatacatacctgcatgccccacacggacacatacacatacacacaccgacatgcacacagaggcacacacagacatgcatacatacacacacctgtacacccccctgtacacacagatgtgcaggcatgtgcacagaaacataaacagatgtgcacacgcacacacccctgcgcgcacacacccctgcacacacaccgctatgcacacacacccctgcacacacagccccacgcacacacccctgcacacacacccctatgcacacacacccctgcatacacacccctgcacacacactcctacacacccctgcacacacacccctgcacacacatgcatggagacacacacacccttgcacatacacccctgcacacacacccttgcccgcacacccctacacacacacccctgcacacacactcctacacacacatgcacacacacccctgcacacacatgcacacacatccttgcacacacccctgcacacacatgtatgcacacacacccctgcacacacatgtacgcacacacacccctgcacacacatgtgcatgtgcacacacccacacacacccctgcacacgcgtgcacacactcctgcacacacacatgcttggcaggctcctccctgccccgtctcttcctcctttcctttacgatcaattctccctccagaggcccagacttcctcttttacttccacctgctcttctcaatatttgtttccaagggctgccctttgtgcccctccatccctacctgaatcctaacccttgccctttgggtgggattgtcagtctcggcactactgacatctctggccaggttattcactgtcttgggcagccctcctgtgcagtgtggggtattcagcagcctccctcgcctccacccagctgcaggcccggagcacctcctccctgcatttgtgacaatagaaaatgtttccagacattgccaatgtcccctgggaaacaacaccacactctgttcaaaacagctgccctacaggctcttgtcaaaagtgtacaggacagaaattgggaggctgagagtgggccctggtgggcacgggtcaagagagcttggaggggcacattttgcagcctgtcctcacagtgagaatcccgtgtgcttgtctccagggctttgctcactctcctgggagcgatctggaaagctgcacttgtgctcccttcctcgtaggtttgctgtggaacgttgtggcttctgtggctcctcaggcccgggggcgccccttgaaccctccactcttggctccaagcaccttccctgggaagctgtatctgctgggttcgcagacaggaacagaaacatggatggagccatgtggctgagcctctgtcctgataacgaagacctgctttggaggaaaaagcacaaattgctacaagcccggggcaaaggcgatctcgctctgcagagaagagcggatgccaagctgtggaaaaactaccagctccagcgcttggctgaggagttgaggagagggtatcaggaggcacagcacctgcacgtcggtggcctggacaggctgcagtcagcacgtctgttgggctggggaggaggacgggccagggaaaatgagcctgactcgcaggggcccatccagcgaagatcagccaggcccccgagggccaaggagaagcatagagcagcccttagtgaagagaggagttgcagggaagagttgggccagcaacaccccaggcactccaggccccggaagacagcagcgagtccagagaaaccacagactacaaaagccacgggtcggatgaattctcacctggccccgcctgagaagagaaagggaaggccagaaccttcgaccaagtctgggggtggccgctgtgccatccatcctcggaggagcaaaggggcggacctagaaaggtcaaacccactcgtggctgctgtgggagaaatcgggcttgtggaggaaaaagagaaaggaacagctcgggcggggaggaggcaactgggaaagggggcagtttgctttgttccagccctgaccagtcgctctcagggacagagtctggaggggaagctgagagacctcgggcagctgtggccagctgattccagctgcagaagggaagccgtgtccccagcatctcagtgcacgctccgggagaagaacaagtggcagaaagagctggagttggcctttgaagagttgtttaatataaacagaaagctgaaaaaacacctgtgcttgtacctggcactgaagcccaggatggaccagagacctggggaagggcatgccttctcagagatgcaagagtgtggcgctgggaccccaagagggaagaaaatggcagacccagagatgctgcctgccggggaacccaggagcccagcagaggaggaggcgcagcaggcagcgtccaagaccgacttgaaaacgttcatgggcaaggcccagaaccaaaaatatcagggcacggtcaagcccacgtttagaaatggaagtcaaacattgtctcccgaggcaggtatatttatcaacaaagaggactcattattgtatagcactgaatctggacaagagacccccaaactgggcacgctggcagagggctcccttcagctccaccttcaagaccaggcagacagagtgggctcgacggcatccaggcaaaggcagaaagcagagatggagcagagaagacaaaaacaactggaatcgcttgaacaaatggaacacccagatatgagcttggaaatccactacaaagctgagctagaaaaagagaggagggagcaaagaagagctcgactggcccatctgaagtcctcctccacgagagcccaggaaagggagagaggatctgagctcagcaccacttccccatcgggcaccagcctcgccgacgacgaccggcacagtcagatgatccgagaccagcagcagcagatcttacagcaaaacaggttgcacaagcagtttcttgaagaagcccggaaatgcttgcgggagtttcagaacatatgctaaatgcgagaggcccacccggggtaaatacatcactgataatggtgctgccagcactggtacccgggtctctaagatctgtgtttgcgtcattgcctcagagactattaggcctctttaaaatgggcaatctggggccgggtgcagtggcgcacgcctgtaatcccagcactttgggaggccgaggtcggcctcaggatcacctgaggtcaggagtttgagaccagcctggccaacatggcgaaaccccgtttttactaaaaatataaaaattagctgggtgtgatggcatgtgcctgtaacctcagctactcaggaaattgaggcaggagaatcacttgaacctgggaggcggaggttgcagtgagtcgagattgcaccactgtactccagcctgggtgacagagtgagactcgtctcaaaaaaaaaaaaaaaaagcaatctgtcattataccgtcctccagggcacattccctcacagggactctttccctaatcttgcctttattgattgattgattgattgagacggagtcttgctctgttgcccaggctagagtgcagtggtgcagtctcgactcagtacctctgtctcctgggcttaagcaattctcctgcctcagcctcccgagtagctgggattataggcgcctgccaccatgcctggctaattttttgtatttttaatagacacagggtttcaccatgttggctaggctggtcttgaactcctgatctcgtgatccgcctgccttggcctcccaaagtgctgggattacagacttgagccaccgcgcctggcctagtcttgcctttaaaacgaagtcccttttgggaaaccacctatatacaaaaataggaacccgtgtgggtttcagtgggtgtgtctagcccatgtgctgtggatgcatctcccagagccgatcatgtcactacattccagcctgggtgacagtctgttttcaggggccacaggcacagatggagactccaggtcatttaagcccttcagatgttttagccaaataaacactggcctttcaggggcacccaaggtcagacgggcacaatttcaggagatagatcacttagtgcttagccaaggctgagacattaacggagattgaaccaaagctaaaacctcttagtctttcaaagtcacaacaaaaccaacattgtttaaatagcacgtcgcttaatacattcttataactttaagagaaaagagagtagacggaaaagagaagacaagccaccctcgccccgctgggtgattccctctggggctggcaagggtgtcggcacctgggtgtttgatcagtttcctccccgctagctttgccactgacctggcatccaccagagccatggagacctcacactgggtagcttctcttctgccaattgcagtcttagggacaggcacagggatcaacatactttttctgcaaagagccagagagtaaatattttagcctttgccagctgtgcagcccccgtggtaattacccagctctactgcagctgctcagaagcagccacagatgagatgtaaatgaaagggcgtggccaggttccaatgagactctacaaaaataggtggtgagcggcatctgccctttgtgccatagtttgctgatccctgtactaggatggtttcagagtctgtctctctccctcccttccaacaacctcagatacattgacttagatcaaccaatctttgttcatgacacattagtatcattggtccacgaatggccttacttatgtatattttgtagacaatataatgaagtaccatgagcccatcacccagacccaagacccagaatattcactacctgtgcgctacctcccttttccatccccctgctgcctccttggacatatacctgctgatggctcacacctacaatcccaacattttgggaagccagcgcaggaggatcacttgagcccaggaattcgagaccagcgtgggcaacatggggagaccctatcctacaaaaaataaaaaattagctgagcatagcggcctgcacctacagtcccagctactcgtgaggctgaggcaagaggttcatttgagccccagagactgaggccgcacagggagctgtgatcacgccactgccagcctgggtgacagagcgagaccctgtctcagaaacaaaaagatactggacgcggtggctcacacctgtaatcccagcacgttgggaggccaaggcgggcggattgcttgaggtcaggagtttgagaacagcctggtcaacactgtgaaacgctgtctctactaaaaatacaaaaaattagccgggcgtggtggtggcatctgtaatcccagctactcaggaggctgaggcaggagaattgcttgaatccgggaggtggaggttgcagtgagccaagattgcgccactgcactccagcctgggtgtcagagcgagactccatctcaaaaaaggaaaaaaaaaaaaaagaaacaaaaagatatatacctgctgaacttggggtttagccctccctatctttatccatatatgtatgctaaacatagtgtttagttttacttggttttgaactttataaaaaggatattatgtggagtcttttgaaagctaggttttttggcctcggcacggttactgaattcatccacatcacacaaacgcctcttactcattttcactgcagcatatcctcatcgcgtgtatgagcttctttccaggatcatagcttctccagtttcgtgcttgtttccaaaaagaggactatatctctgatgcatttgaatcaaaggaccgggtgtcaaaaagtgcttttggcacagctgggatgtaggtgtgggaaagatcccgtttattgctctttttttttttttcctatttttttttttttccccagaaaaagattgacctgctcttataaaatatttaatttacaaatatgaggctgggcgcgtttgctcatacctgtaatcccagcactgtgagaggccgaggcaggtggatcacttgaggtcatgagttcgaggccagcctggccaacagggtgaaaccccgtctctactaaaaatacggaaattagccgggcgtggcggcgcgcacttgtagtcccagctattcgggaggctgaggcaggagaatcgcttgaacccaggaggcggaggttgcagtgagctgagatcatgccactgcactccagcctggggacagagggagactccatctcaaaataaataaataaatttacagatatgagtcctagacactgtcccagtcactagagatgagcagtgagccacacacatggaaccacaggactcccgttctggtggaggacgcagatgatgagtgagtaaaagctggaactatggctgtgcaggacaaggtgctcagtgggaccccaagtgcacgcctctgagaaactcaagccggacttccctggcgaatgcgaagctcgtggaaccaacaagcgttacgctcatttggacggggcgggagtagcatcccacaagactcttttgtttttgcttttgggttctttaatcattagtagcttaggtctctgttgtctgtggctttctgcttcaggccaagtagaggaaattcgaggctgggcatggtggctcacacctgtaatcccagcactctgggaggccaaagcaggtggatggcttgagcccaggaatatgagaccagcctgggcaacatagtgagattgtgtctctataaaaacaaaaagtagccaggcatactggcgtgcacctatagttccagctactagggaggctgaggtgggatgatctcttgaacctgggaggtcgaggctgcagtgagctgtgattgcgccgctgcactccagcttcagtgacagagaccctgtcttagggggaaaaaaaaagaagaagaaaattttgatcttagcctggtttctttctatcctctgcttccagaatgtcatgggctagggttgcaaagccactccacaatttgctataggctcaacatgattaagaaggaaactgggggtcaggagggctgctgtttttcaaaagccacatagatttctcggggtggggtgtcaccgtgctcctgctgtttctgcacttgccttgtgcccagctattttttgcacacggagacctggagcgtagccgcctgtcagtgtagcatcacctctgtctgagagggcagagagggtgttatggcatgactgagttaaaagccatggccacaatggggcccaaacattgagtagccgaggtcttcctgccttagcctggaagccacagtctgatgggggaaccagcctgcctttgagtgggttatttttgtttccattttcaaaggtagcatttgtgacccatgtgttctaggtgaggaatcgccccttcttgaccacacgagctaaaactaggcgtggagacgggcagcaagacagtgtggagggtgactcatctctgcccggacggtcacacctgcactgtcccctggcagcaggaccagacacccggccctttcccacctgtcctgcagaaggctaaggggacagggtggttctttaactagggcattggtgtgggcactaaaacagccctccaggatgtccacacccaaaaccatggccctccagtgattcttacggagatgtcatgagtaactttccatcccagggcctggcagtgcctgtgttcccctccccccttggtcaccttggcacagctggactgcggtagaaagggctgtggagcagcctccagcttcccctggctcaccccgtcccatgcctccacccagagcctccaccaggagctggtgagagccctactgccggggttggagccctggctctgccatttgccagcagctaggtgacctgggcagagtgttaaggtttctgcacttcctccaaggcctggccctccacctcctgcccctcacacccctcacacccctcacacccagcttccagcatctctcttcccaccacctctcttccggacacaagtgcacagggcctgccccctgccttgcgagcctaaatcctccccgaagtgccaggcacctcatagggctatgttggcgggctcaggggtgccccctggactcacaccccagcccttgcccagccttcatttgactgtaaaacaagggatggagccacccggaagggtgtggggctcctgaggtttccagagagcactgccatgccagcagcggtgaggatcccagatgtggtggccgtgttcaccttcatcctaaggcacttccaggtaccccgcacggttctcctgctccgaacactttgcaccttctagagctctgctctggtttggtgcttctgcccccacccttgggggacagattccgtgttcgcgcctcactctgcatttgctggaaccttcgtcctccggccccatctttgctccctgccttgtgggtccttctccccaaaccacagggacccaggaaggcctccgtggctgagcagtggtgcgtgggtcgccctgttggtccgtgaggcttggacggggagcagcagcgttgcttgtgctttctgccgaggtcagctgtccatgggctgaggggggccagcagggtctggcaggtgctacctgttcacctcctggcctgctcccccccaacctgctggccagttgggctttggatgtgaccccaccctgagagctgccctggggcgtccatcttctctccgcacaaatctcccttccccttcaagccctgtgtgaccaggatctccgacacataagacaaaaggaaatagggtttttagagtggacgggtgggtagagcaccctccctgacctgtggtcattcttccagttcgtgcaaatggcaagggggttatatcgagatctccaagaagacacggggcggagggctggggtgcagcctgcacttgcagctgctgtgacagcccaggccaagtcctccagctggagacggggctacacagatgcacaccccccaggacaagcttagggagtctgggggcgccgctcagcatggggcttgtttgggaagctgtgctgaggaggaagggaaaggggagtggggacctcagcccccctgctttcattctttcctgggtgtgtggaccctgggattccagccttcatgtccttcatgtccctgtttctgtctcctgagaaatgcagcaagtcaggctcagcccacaggccacatgaccctgggtccgacgaacagccagggctcaaagacagtcagtgccaatgagcctgaagcctgggcccggacctcacgttcgtccccaaaaatggatcggcttgggaggaacagtgccctgcccacctcgcgctgtcgcagccccccagcaacagtgcgaggagagaatctgctgctgcccctggctccggagttgtcaccctggccccctgctcatctgttgtaggggggcgggttgcagggatgggtaggggtttcctcggtgcctctccaggctccctctgcctcctgccctgcacggtcctgctcctgtccctgctccggctctggcttagggtttgcagggctgagcttggctgttccgtgggtcttgacggagaaaatgcagagctgcacttccctccacaaagccgcactgttctcagcaaatcctcccggggtctggtgcattgttttcaagtgattcagcagcacgtgaatgggaagggccgagccggaggctctggcatgagacctgctggcccaccagggaaagggagggcagcgggacgtgggccccgaggtcctcccagagctgcagagggagggggcagggccctggggttggggagggcggcaggaaggctgggcagagagggcggctttgctctgcgtggctgaggtgctctgatagatgctgtttcccaagaggagccaaaacgaatgggcaggaagtgagatgggagagctggtctccatggagacgggcacccagtggccagcagctcacgtgcactagaatctcaggcagccggggagggagcattccctggggcggcagggcctggagcacccccaggtgcccgctggcaggcggtgtggccccggctgaggctgcgcttctgttccctgatctctgttgtgcaccctgttaccttctctgccccaccctcctccgcaccctccccaacaaaatatcttttctgagtagttgtcattccaggcgtttttcaccctggcctgagtcatgctggccaagtcctctgtcctcaccctggatgtcacggtcccgccctgcaccagggctgcaagtcaccactgagggtggacctggggcctctctgtcccagccacccacaaactctcaaggtcagagtctggaaagggaggtggtgccccatgtcttcacttccggtgtctacaccctcaactggggacggatgtccagtgtgctcctatggtgccccctctgctgaggtctttcctgcttcccagaaggccccgttgctggcttccgggggccgaggaggttggaggacctgagggtgggtctggcctccacagcagctgcagggcgggaagagcctggttcctgcccagcaccacagggctgtttttaattaccaagtcacggccctcttttctgctcatttccctaaaaggagtgaatttggaggaggtctgccgcacccgctgaccaaaaggggctggcatgaaggggccgaggaagggcagagcccagtgcccgggggagaccctctgactgcccaccaagggcacccggctgtgtcacttgaggccagaggctgaaggtgagctggaccagctaaccctcactgtcacctcacaacacttgtgacacttcctggctgctcagccttgccccgtgcccctgggcagttccgttgggagaggcgtggcctccaaacctagaggactagagcaggtctggggtccttgtgagcacagccccttcctggatcaccgtctgccatccctggtggcgtttgtggccacttctgctgctccagctggcgaggtcggccccatcctgctaaaagaaggaggtgctgcccgaatggagagcttccatgtttctaagctgtctttactgtgatcctgaagcccaacgagattagttacacacaaacatttagggatcccacagcgatctgagagcagggccatgaaaaatagtcatttattacagcagttgcagggcagggccacagctgtgttactggacatctgtcctgagctgagggtgtagacaccagaagtggggaaagtgggcttcacctcccttttcagactctgatcttgtgggtggctggggcagaggggcccctggtacaccctcagctggcgctttagacatattaatcaaaatggtcaggccgggccaggtggctcacgcctgtaatcccagcactctgggaggccaagatgggtggatcacgtgaggtcaggagttcaagaccagcctggccaacatggtgaaaccccatctctactaaaaatacacaaaataaaaatcagccgggcatggtggcgggcacctgtaatcccagctactccagaggctgaggcaggagaatcgcttgaacccaggaggccgaggttgcagtgagccaacgtcgtgccattgcattccagcctgggcgacaagagcgaaactctatctcaaaaaaaaaagaggatatggagcccctgccaggttgaccagccatatggtgtcattacatccacccaaaagggacaagagactctcatccccaatggcaacgccaagttatagttacagatgttagcaagggcgttactaactgtgtgatttgagggtgtggacattggcactcatggcaccccacttttctggagagtttagacaaggcgtggaacgtcacagtcctttcccagtgaaagaacaaagctgagtccacctgcaactgccattggatcctccccaggagtaagtggaggttgggtttcatccgggagagaaaatggtttctttgataattcctctgaaatgactggcatgtaattccacccagagccaaatgaaccaaatgacgctcagaagacgtctgcggctccggcctgcagttaccgcgtttgcgtctacgcagtgtggagtcctccagggctggcccctgggatgcatgcagtggccactggtcttcattgccactgtgggtgctctgggctgactctgacccagctgcagcatcagaatgccccccacccactagtgatgtgggccagtagggtctttggcacatgtgtgaagcccccacccgactcccaggaatgacccatgttgagaacatggggaccccttggcgttctccgctgggccataagcaggacaggacagaggggaaggaggcgctttccctgccagtgctggtcctatgggcgcccctccccaggtgaaagctggagcctgcagaagagggtggacggctgggaggggccagtgccctccagtgatactgagcaaaccctcccagtccgagtcagtgtgcacacaaggtgcagatgatcgggccgggttttgactttgtatttagcagccgaatgtgtttctgagtcccagggatccctgcacctcgtctgggcagacaggtgactttgagggacagtgggccaccttctcccgctgcctgagcacgtcccgtagccgagacaggcgctatgctgttacagtgtgtggagtgccccggggagaggctgtgagtggtctagacgttgggtgttgatatccaccggtttgcctgtcccaaacttgggcctgggagcccggcagagtggctcaagtggaaaatgttctatatggtatatttatacatatagcatgtgggattcctccagcgagcagttgggcccctggcaagataataaagagaattcaatgagtgtggaataagtacatttcttacaggcaattttctttttctttcaaaggcagggtctggttctttcacccaggaccgaggtgcagtggtgcattcatagctcactgcagccttgaacatctagttcatacaattctcctgagtagctgggactataggcagatgccaccacgcccagctaatttttgtttttttttgtttttgttttttgtattttgttttttatagatgaggtattgctatgttgctcaggctggtcttgaactcctagcttcaagcaacccatccaccttggcctcccaagtgctgggattacaagtgtgagccactgcacccggcctttcgaggcaattttcttttggggtctgtctccctcccccaattgtgggcatggcttgttcttattttccgcaggaacttccatagtacttctgtggacacaggaggattggaaagatgttggtgggtgtatgaaggggacgtgaggacgcaggacccacgtgttgatggcagcagaggggacaccgaggagagagaacaagggaggaccgtgccacagaagccgtggcgtctctgcctggggctggcgtggttggagtctgtggagagtgccgcccctccggccagcccttggccctggcacatgctggtgacaccaggttctccagcaagcccccttcactgtctgctcccctccgagagcagcagcagccggtccggcctctgatggttttccaggggcggttgtgactgtcgaagtctgaccgtagcccatcctctttggatcgtctcccgcgaccttggttttccgcccacccggttcttttccgtccccactctggcgggtgcgctcgggattgtttttgcaggggggaagtgacatcatatggtgtcctgggctggaggggtgggggtggggaccctgcagttgcgtgtgctttgaattcagccgacggttgtacattccagtagccggcatctggcggtgaattcatcagccagtgtatcacccttgatctcaaacccagatgttgtgttcacagcagaagggaaagaaggaaaaacgaaatctgagacgcccagggagaggccgtggtttctgggctcagggcagttagaacgagagtctttataaagactccccctctcgcagctgcctctggctccttggggaaggggcagaggagcagagcagcccctctcgggggcatggacaggagatgggctgacacccaccccagtgcctaacaccaggcccagcacccagtaggtgttcagtaaacgtgtctgtgccacaattttcatttcttcccagattccttatgtctcttcgctttccccagccctgttcttcacatggcctgggactcggagaggccctccctcttttgaagtggcctgctttcccctacagaactggtggtccatcctggagctcagagtgcggaccattgccattggcatggaaatgtattccggagagctctctctccctcctcctctgtccaccactgggcattggaaactctccttctctgtgttcctatccatcgtctgtcatcttgcctggattggatgctcctcccaggcaaggcctgctgtatgcaggattcaccctgtaccctctcttcacctgctgtcacctctgggcaacaacccccgacaggtacccgctgctctgagcaggtcagcggtgcagatcccgctatgccaactggtgtgcaccgatcagagctgtcagctggcccctctccttcatgtctgcggcgtgctggtgctttggggaaggttgccgtggaactggtccttctttgcctctcttgattcccattttccttctttcatgtaatttctcattttgcaaagtgggggaggaggtgcccacccccaatttaaagggaccctgaagaatctgaattctgttccccaggggcagactaaagcagcccaggggagatggagatgccctcaggctctgctcctccaggcccctcacccccacttccctgcccctcacccccacttccctgcaggcatctggcggcctcctcgccagttcactttctagtcctaaccccacgtggctaccctggacccttgatttgaccagcctcctcttttctgacactttaaagaaggaaagtgtgtaatctgcagcccccaggcaaagctagcacgctgggaagctgcatcaaatcgagagtctgtggcctgctgaccaggaccgggtctgtgtacctgagtggcatgatgccaccgtcccaatccctcacccacgggagcgggagaattcgccctgcttgtctatgcgatgctcgtggtcctgaactgtacacgcattagttcccgggcaccgcagcctccacaccagcccctctaacagtcaccacgaccttgtgaagtgtcaagactgttgtcatcgtctctgtcttaggtgtgaacaactgtggctcagtgaagtcaaggagcttctcaaagatcacgcagccatccaggggtgaatgcaggatctctgtctcttgctgcctccttcaaataagtgcccagctgccacctgggagccttaggcgtttttgtaagagaacagcatgtgaacctcaatgcccatggtaggatgcaacattttggccgttttgaagtaatctttgcttattttctgaactccagtgacatgcttgttgagtgcctattgtgcgttaagcattgtgcggcttagtggaccattgaaaggcagctccaaggccgggcgcggtagctcatgcctgtaatcccagcacgttgggaggccgaggcaggcggatcacgaggtcaggagttcaagaccatcctggccagcatggtgaaaccccgtctctactaaaataaatacaaaaaattagccgggcatggtggcgcgtgcctgtaatcccagctacttgggaggctgaggcaggagaattgcttgaacccaggaggcggaggttgcagtgggccaagattgcaccattgcactccagcctggatgacagagctagactccatctcaaaaaaaaaaaaaagaaagaaagaaaagaaaagcagctccagaaatttccaaaataacatacagaattcagcagactgtaataaaggccggcttgctgctcctactggaactgttgattcctttggattctgctggcttgctttttttccttttctttcttttctttttttaaaagacggagtctcactctgttgcccaggctggagtgcagtggcatgatctcagctcactgcaactttcacctcctgggttcaagcgattctcctgcctcagcctcccaagtggctgggatttttgtattttttgtagagatggggtttcaccatgttggctaggctggtctcaaactcctgacctcaagtgatccgcccgcctcggcctcccgaagtgctgggattataggagtgagccaccgtgcctggccctggtttgcttgtgagctggtgactctgctacatgaagagcaaactttgaccaagttaatctggcacattgactaatttgcataaacatttttggtgcagcattgtcgtaaggtatatagattaggcagggagcaagagagccaaggacaaactgcacctgggccaccagcccaaagttgtcagcgtcatctcagctccatctggcaaagagttagtgagcaccaactgttctgcagtcagaatctagcctcaacctgttaggacctcccagggccctgagcagacaggtgtgcaggaactgacagcaggatggaaaagagatggggaatataccaagtgctgcagaaggacaggatttcccagaggaagacagaaaagggctattttagctgggtcttgaagaatgaagaaaagttctccaggcagagaggggagatggcatttggggcggaagaaacttgcctgttcaggctgggtgtggtggctcacacctgtaatcccagcactttgggaggccaaagtgggcggatcacttgaggtcaggagttcgagaccagcctggccaacatgctaaaaccctgtctctactaaaaataccaaaaaaaaaaaaaattagcctggcaaggtggcagttacctgtaaccccagctactcaggaggctgaggcaggagaattgcttgaacctgggaggtggaggttgcagtgagctgagatcaagccattgcactccagcctgggtgacaaaagtgaaactccgtctcaaaaaaatatatatggtaattagccaggcatggtggtgcccacctgtaatcccagctacctgggaagctaaggcaggagagtcatttgaacctgggagatggctgagattgcgccactgcactccagcctagcaggggtggggatgacagagcaagactctgtctaaaaaaaaaagaaagaaagaaacttgtctgttcagaggtgtggatgcacctgggcgtgttcagggcagacaagtattatgaagtggtagaatagtgggagcatgggtggggggtgttgggcacagcagctgaggcccctggctgacttcaggttgcaaaggcgctcatattttaggggagggcagggggcagccaaggatgatgtttgagcagaaacgaacgtgaataaaaaaagacagctggttgcggtggatgagaggatggttaggagggcactggaaatagggggccgtcagggcaaagccgtctgttctggagtggcctgccgggagacatttcctagatgtggcttttcaggatgaggcatggattagcctgggaaacaggaacctgtggccttggccagtcatgactcagctccaacagaagaagaaagaagaaaggggtttgtgcccaggcgaggcagtggggctgtggtgtgggactctgatgccagcctgggatccagagagcattggtggggcccagggggatggacacagatggagcacccacacgcctgagcctccttgcccctgtgggaagagacagccctgcctaaggggttctaagagatttgagccgaccacgtggggtggggctggggctggggctaggaggctgcctggagcctggcgtggtctgctccttacctctctgttttgctcatatccaccgtaacataacacttacccagagtgaccctgaagagctgagtttgggagggcaaagcttttaaagccattaaaacagaccatgtcaccaactaatggccttgaaattaagaaagggagggctctacccaaccctgcccaagtgacagcatgaactactgatctgcttgtcctcaggttaccaggagtggaacagaatcctggcttaattgctaggagaaagccctgtgttgcatggcctgtcagcaacctcaggctccagaatattctggaattgccccagcccagcctcttccccaactcctttctgtttggttggggcttagttgggatcctctttccttctgtttgtccttcctcagcatctgtcccttgggtctgccagctgtgcctgccgatgtctcctttgggtgaaacttcctgcccctgcccctgttgtgcccctgatagactctgtgttactgtaaagaatcacccaggctgggcgcagtggctcacgcctgtaatctcagcactttgggaggccgaagcaggtggatcatttgaagtcaggagttcgagaacagcctggccaacatgatgaaaccctgtctctactaaaaatacaaaaattaaggttgggcactgtagctcatgcctataatcccagcactttgggaggctgaggcaggtggatcacctgaggtcaggagctcaagaccagcctggccaacatggcgaaacgctttctctactaaaaatacaaaaattagctgggtgtggtggcagctgcctataatcagagctacttgagaagctgaggcaggagaatttcttgaacccaggaggcagaagttgcagtgagccaagatcatgccactgcactctagcctggacgacagagtgagactccgtctgaaaaaaaaaaaaaattaaccgggcgtggtgacagacgcctgtaatcccagctacttgagaggctgaggcaggagaatcacttgaacctgggagatagaggttgcagtgagccaaaacggtgccactgcactccagcctgggcaacagcgcgagactccatctcaataacaacaacaacaaaaattactcatagaacattttccaggtcaggaaagatgagaagagctggatagacctttccagatgtaagacccccaaagctaaatatgccgggtacgtttaaggcccctttaaggtggataactccccctctgccctcagcccagaaaagcttgtttccaataggccgtggctggagggtggggaaatgtcccatccttcgcggaatgtgtgggattgtgggtcagttccatggggtacctgcttgccccagccaccagtgagtacccactggagagaaggaaaaaaaaagccaaaagcactcaagcatgatatcaacagatgagcttcagtcaaatcaatgactgcctcccactgttacagaaactgccttggtcacaagggactctgggcttctggcttgggcccctgtcaacaaagaagggattcttgttgaagaatcgtggaaggaggaggaggaggctgggcatcatctctcagcctggaggaggagacgccatgccgggggctgggatcaccatgccccttgcccgtctcgcaccttgctgctgtctgtaaccccccagcacctcccgcaggcctggacgtcttatccctctccttagccccaggagcgtgtttcaggaactctcctcacctctgtgtcttgtgttttgcagtgatcagggccaaagcggtcagtgagaaggaagtggactctggaaacgacatttatggcaaccctatcaagaggatccagtatgagatcaagcagataaaggtaatagtggctgccggcatcccgggctgcactgtgggcacagctgtggggtgttggggttggcagagagcctgggtccctggaacacgatctggccacctgtggactagagcagaggatgaggtcatcaagctgcaaatagatccgatttcccttaatcctcgaatgcctgaaaagttgtgtggagatgacatgctccccacaaattcaattccttcagaaacctgtccgggcgttgcggctcacacctgtaatcccagcacttcgggaggccgaggtgggcggatcacttgagctcaggagttcaagaccagtctgggcaacatggtgaaaatccatctctacaaaaaaccagccaggcatggtagcgcccacctgtggtcccagctattcgggaggctgaggtgggagaatcgcttaagcccaggaggcagaggttgcagtgagacatctcaccactgtattccagcctgggtgacagagtgagagcttgtattaaaaaaaaaaaaaaaaaatatgtggcagggagggcagggagggcagggcctggcctggggcaggagaggtgatgctattgtcattgacagtaactaacatggtctgtaagagagacgaaaattcatgtcgcaggtggagggacagccgtgtgatatggtggtagttgtagtcatcgatatttaattttgtcattaaaaataaaaagtaaaccaggcacagtgtctcatgagtatagtcccaggtgagtggatcacctgaagtcaggagttcaagaccagcctggccaacatggagaaaccccatgtatctactaaaaatacaaaaattagctgggcgtggtggcgagtgcctgtgatcccagctacttgggaggctgaggcaggagaacacttaaacctgggaggcagaggttgccgtgagctgagattgcaccactgcattccagcctgtgcgacaagagcgaaactccatctcaaaaaaagaaaaaaaaaaaagtagctgaaaatcaatgttatcagaaggtcagtggaatgcttcatcatcacatgtatgtcagtttaaggggatgacctagtctctcagtgcctgagtctctttctttacgaagcaggaaagaggatctgctcttacgacctcataaaggggtcgtgaaaaggccagtgccagtgcccaggaaatgcttttagccttttggcaaatgatgtcatttagtacagcatcaacataacctttcctggtacaagctggagtgtcactctcaagccatttgtcatgacatcaggcatgcttccattccatttgggtttgcttattgaaactcttcggggggaaaaaaacagcctccctgagtgctgagaaaatgccattcttcacctgggcagcaggtgcgttcctgaaaggctgtgagtaaatcacatgttgagaaagcaaactcttctggcccatggagttatgtcctaattcctgaggtgcctctctgctctcattgccatcaagtagacaatatttgaccaaaattcctggaaatataggttgggtggagtgacttatgcctgtaatcccagaactttgggaggccgaggcaggaggattgcttgagctcaggagtttgagaccagcctgggtaatagagcgagacctcgtctctgctaattaaaaaaaaaaaaaagccaagcatggtggcatgcgcctatagtcccagctactcgggaggctgaggtgggaggatcacttgagcctgggaagttgaggttgcagccccagcctgagcaacagagtgagaccctatctcaaaaaaataaaaaattcctggaaatatgcaaaagtcatggtccttcatggtggtccagagtcacgtggaggtacaaaagcccctccccatagattcagaaatgacctctttggggtggggggtgagggaacagaggtgttgtctgaggatgtcatgctccagatgacagtctttttttttttttttgagatggagtcttgctgtctcccaggctggagcgcagtggcacgatcatggctcactgcaagctccgcctcctgggttcacgccattctcctgcctcagcctcccgagtagctgggactacaggcgcccgccaccacgcccagctaaatttctgtatttttagtagagacagggtttcaccatgttagccaggatggtgtcgatcttctgacctcgtgatctgcctgcctcggcctcccaaagtgctgggattactggtgtgagccacttcgcccggcacagatgagtcttgtgctcacctgctgtgatctgccacactaaaagttgagtgactccaaagaatcactttgctataagaagtctttttcttttctttttttttttttttttttttgacggagtcttactctgtcatacaggtaggagtacagtggcgccatctcagctcactgcaacctccacctcgcaggttcaagcgattctcctgcctcagcctcccacatagctgggattacaggcgcttgccaccatgctcagctaatttttgtatttttagtagaaacagggttttgctacgttggccaggctggtctcaaactcctgacctcaagcgacctgcccacctcagcctcccaaagtgctgggactacagccatgagccctgagcccagctggaacggtcttttcctaacccatgtatttgcacttcctggtcctcttgggtgctggctgtaccccagctacaggttgtgccgcccagggtgttctggatgggaacggaattcaccaactgtgtggcctccctctgcttacatgtcctcctccttgtctttccagatgttcaaagggcctgagaaggatatagagtttatctacacggccccctcctcggcagtgtgtggggtctcgctggacgttggaggaaagaaggaatatctcattgcaggtgtgtatgagtggggccatcagccggaggctggcacagaagtggggctgttcctagacgcggtccagggctcgtttcccaggctcggggggtggggaggcggagtagctgaggaacagtgaggcagggtacggagccctctcggccacttcccgtcagagaatgctagtgaatgttcactacctgccaatttcctgggaaatttgagattggtggacaaaaaaaagggagcatttttgccttttgttcctaaaagggaggcgagtgcgggatgctggagacatgcagggcagagaaaccctttctgccgtcgggagggccaaaagctcgcgtaacatctgtggatactatgcacgagacctgcttgacttattcattcatctgtctcctttttttattgtggtaaaataatacgtaacaaaatgtagccatgttaattaaccattttctttctttctttctttctttctttctttttttttgagacagagtgtcgctctgtcgcccaggctggagtgcagtggtgcgatcttggcttactgcaacctccacctcctgggttcaagcgattctcctgcctcagcctcccgagtagttgggattacaggcacacgccaccacgcccagctaatttttgtatttttagtagagatggggttctaccgtgttggtcaggctggtctcgaactcctgacctcaggtgatccacccacctcggcctcccaaagtggcaggattacaggcgcgagccaccgcgcccggccaaccattttcaagtgtacacttcagtggcattagatacattcgctattgtgcaaccatcaccaccatctgtctccacatcttcccaaaccaaaactccgtccccgttaaacactaactcccccttctctcttcctcagccttggcccacctccattttactttctgtctctgtggatttgactactccaggggcctcacatgggtggaaccctgcagtgtttgtcctctctgtctggcttatttcagtagcatcatgttttcaaggttcgttcacgttacagcatacatcagaatttccttactcttttttttgtttttgagacagagtctcgctctatttcccaggctggggtgcaatggcactatctcggctcactgcaacctccgcttcccaggttcaagcgattctcctgcctcagcctctcaagtagctgggattataggcacacgccaccacacctggctaatttttttttgtatttttagtacagacagggtttcaccacgttgaccaggctggtctccaacttctgacctcaggtgatccgcccacctcagcctcccaaagtgttgggattacaggcgtgagccaccacacccggcccaaaatgtccttactttttaaggatgaataatatttcattgtatgaatgtagcacattttgtttattgttgcatctctttgtttatagttttttggtttgttttttttttttttgagacaaagtcttgctctgtttcccaggctggagtgcgatcatgactcactgcaacctcgatctcctggggtcaagtgatcctctcgcctcagcctcccaaagtgctgagatcaactacaggtgtgtgccaccacacccagctaatttttttattttttggtaaagaagtctcaccatgttgcccaggctggtcttgaactccgaggctcaagcaatcctcctgcctcagcctcccaaagtactgggattataggcgtgagccactgtgcccagcctatatttttattcctaagtaaaattattttcccttacttccttctacggcctcctctgcttgcccagctaggctgaaccacaggaggccaggacaggattctcaatctcagcactattaacatttggggatggaccattctttgttgtgggggcctaccttatgcattataggatattcagctgcatccctggcccccaccctctacatgccacagcacccgctccagtcgcggggtctctggacattgccacatgtgcccaggggaggtggggtagattgcccctgcttgagaaccactgggctcaaagagctttctgcagtgatggaagcggtctctgcaccatccagtccagcagcccccagccttgtggctcatgagcacccgagatatggctagtgcagccgaggagctgcattttaaattttatttcatttcaagtaattttagtataaatgtaaacagccacatgtggccggcagccgcagtctagcatggcactgactcagccagttaaggaacattattcccctcctccctggggaagtaggaatctgatcacaaacttaagaaaaaaagaatagacaaggcctggtgcagtggctcatggctgtaatcccagcaatgtaggaggctgaggcgggcggattgcttgaggtcaggagttcaagaccagccttgccaacatggtaaaaccctgtctgtactaaaaatacaaaaattagctgggcgtggtggcaagtgcctgtagtcccagctactcaggaggctgaggcatgagaatcatttgaacccaggaggcagagattgcagcaagctgagatcacgccactgtactccagcctgggtgactgagcaagaccccatctcacaaaaaaaaaagagaaaagaaagaagagacaagacaattcccctagcctggtactatagtttgttccaaaaggcaactgtaatcataaacatatactccaaatccaaatatccatgattgggggattttcttctggtttaggtgacatgtacttttttcccttctaaaaatcaatgtgtgcttagtgagcacctgttaggtgcccagccccgtgttagagacaatgggagattcccacggtgagatccttggctctggtcatcatggagcacacagatgttccgaatggggagactggaaaagaaagaaaatagattttgcttgtggagaattgtgaatagtaagtgaatgcttagaaggtgcaaaaggggccgggcgaggtggctcacgcctgtaatcctagcactttgggaggccgagacgggcagatcatgaggtcaggagattgagaccatcctggctaacacagtgaaaccccgtttccactgaaaatacaaaaaaaaaattagccgggcgtggtggcgggcgcctgtagtcccagctactcaagaggctgaggcaggagaatggcgtgaacccgggaggcggaacttgtagtgagccgagatcgtgccactgcactccagtctgggcgacagagtgagactccatctcaaaaaaaaaaaaaaaaaaagaaggtacaaaaggaagagagactctcacaggtccaagggtctagacagacttgctgctggaagaaggtggtgtccttgcctatggatggggaggaggtcattgcagggaggaagatgcagggctgtgagttgggcagggaagactcctgttatctccccttgggtaagatcttccctcccttccttaacatgctcacagctcctgctttgctgggtatctcggtcatcaagacttctatccctctccttggggataataggagacttcccccccttttaagatgcatttctggacttcctaaaatgttttattatgagcacttttcttattctcattccaagacagagtctccctctgttgcccaggctggaatgcagtggtgtgatcttggctcacagcaacctctgcctcctgggcaattctcgtgcctcagccacccaagtagctgggattacagatgtgtgcccccatacctggctaatttttgtatttttagtagatacggggtttcaccatgttggccaggctggtcttgaactcctgacttcaggtgatctgcccgcctaggccttccaaagtgctgggattacaggcgtgagccaccgcgcccggcctacaattcagtggttttagtatgtcacagagttctgcaaccatcactacagtcaaaaagaaatcctgtattcttgagctattaccctcctgactcccctccccctcccccagccctaagcagccactggtatacttcccgtctctatagatttctctatgctgggctttcctgggaacggaatcatacgtgtgaccctgtgtaaccggcttctttcgtgtttccaagggtcatccatgttacagtgtgtatcagaatttcattcctttctatgactgagtattccactgtatggatagaccacgttttgtttatccggtcatcatttgatgtgcatttgggttgttgccaccgtttggccattgtgacaaatactgcaatgaacattggtgtgtgagattttgcagggacctgttctcatttttcctgggtgtatccctggcagtggaattggtggggtcgggggtggggaggggttgggtgactttaggtttaaccatttgaggagctggcagaccgttttccaaagcagctgcaccattttacacgcccagtattatctatgatttttacaataagaaaaaaaaaatcaaatggagaagggtagagggacaaaaaccacctgtggtgcaaagatcttaccagctaactaatgccctcaaaaaaaacacagaggaggcaggagagctggggtggccgcacagcacgcacggtggcgcgtggcagaggcatggtctgcagtgtggcattcgggggctgctgcagctgtgcacagaacagagcacgggaggaaatttcccagcgtgtcagcatctgctgtgtctccttttcagttctttcctgtattaaacctttaaaattatggcatttattacgtttgtcatcagaaaaataaaatctggagagacaagaaaggagacagaatcccccgtggtgcagggaacttacttccagttttctgcatcctgtttgttcctatccacagggaacagcctttaaagtaagtcccagccgtcccagctcagtttcgtcacactgccctctaggggctttctggccaaactgcagcgctgcggaaggactcttgggtgcaaaagtgaccttggtctgagccagcaccggtgtccaaacatacccagctgaatcctcgcccatgctgaagctctctgtttgtttttgtttttgttcgagatggagtctctctctgttgcccaggctggagtgcagtggcacaatctcgggtcactgcaatctctgcctcccgggttcaagcagttctcctgcctcagcctcccaagtagctgggattacaggtgcccaacaccacgcccagctaattttttttttttttttttgagacagagtttctgtcttgttgcccaggctggagtgcaatggcgtggtctcaactcaccacaacctctgcctcccgggttcaagtgattctcctgcctcagccttccgagtagcagggattacaggcatgtgccaccacgcctggctaattttgtatttttagtagagacgggatttctctgtgttggccaggctggtctcgaactcctgacctcaggtgatccgcccacctcggcctcccaaagtgctgggattacaggtgtgagccaccgcacctgggcggcattaagtacattcacagtgttgtgtaactatcactatctatttctagaagtttttcatcatcccaaactgaaactctctccccattaaccaataattccctgttcctctgtttgcccagcccctgacaaccacctttctacttcgtctccatgaatttgcccattctagacacctcgtacaggtagagtcatacctccttccatagctgaagcattgcacttagcataatgtcctcaagttcatccatgttgtagcatgggtcagattttattttattttatttatttatgagacggaggcaacaaagcccaggctggagtgcagtggcgcgatcttggctcactgcaacttccgccccccaggttcaagcaattttcctgcctcagcctcctgagtagctgaggttacaggcatgcaccaccacgcccagctaatttttgtatttttttagtagagacggggtttcatcatgttggtcaggctggtcttgaactcctgacctcaggtgatccgcctgccttggcttcccaaagtgctgagattacaggcttgaaccactgcacccggctggtagattttatttctttttatgtgcatacattttaaagtttccaaaatatgtaatactcttctaagttgaattctatatatgttttcaaattgttaacatttccattaactttttaactcagatactacttagtatctcaaggaggaggcacgaggttttgatgaggacacagaactaaaggtgccaagtgcaaacagtttattgcataaagaaaataaggaaatgggctgaccatagtggctcacacctgtaatcctagcattttgggaggctgaggcaggaggatggcttcaggttaggagttcaagatcagcctggacgatatagcaagaccctatctctacaaaacaggaagggaggaaggaaggaaggaaggaagggagggaggaagggggagggaggcatggaggaagggaggaagggaaggagggagggagtgaagggagtcagggagagagggagagaggcagggaagaaaggagggagggaagaagaaggaaggaaggaaggaaagaagagatgagctgggtgtggtcatgtgcacctgtagtcctagctacttgggaggctgaggcaggaagatctcttgagctcaggcatttgaggctgcagtgagctaggactgcaccactgcactctagcccaggtggcagggcgggaccctgtctctgttttagaagagaaaaagataacgactaagtgtcatgaaaagatgtgaagaaatacaatgagatgcccgagtgaaggctctgaaaacacctgctcgagttcgaatgtgtgctctgacacctgactcgttaatgtccttggccaagtaactttacctgtctgtgcctcccatgccgatccgtacatgggggatgatgacagtagtatctgccccacgaggggttgttgagaggatgaaagtgggagtaggagaccagaaatgatgatcacagagatgctggttatcttggtcaggccccactcaagggtagctgataattttatgtcttacactggagatgacagtgacccatacacgcagcacagcactgcatgaaaagctggtgagtcgatacagagagtcatactgaaggtctaaggagggctagggtagcctgtagcagaatgagcgtgaaggctctgctgaaagggcattgctccctggacctgtggcgggatcctcggtagaaagctgacattgaaagattttgaagagctttagttaaaaagttaaaaacagcccagcgcagtggctgacgcctgtgatcccagcactttgagaggctgaggcgagtggatcatgaggtcaggagattgagaccatcctggctaacacagtgaaatcccgtctctactaaaaatacaaaaaattagccaggcatggtggcgggcgcctgcagtcccagctacttgggaggctggggcaggagaatcacttgaacccgggaggcggaagttgcagtgagccaagattgtgccactgcactctagcctgggcgacagagcaagactgtccccccacccaaaaaaaataaataaaaaataaaaataaaccaatgttggcaaggctatggagtaaagggaacgcttaggaacgcttatgcgctgttggtgggaatgtaaacgagttcacccactgtggggcacactttgtagatttctcaaagaactgagaaagcaactagcatttgacccagcaatcccactgctgggtgtatacccaaaggaaaataaatcgttcaacggcactgcgcccgtatgttcattaccgcactatctgcaatagcaaagacacagaatcaacccaagtgctcatcaatggtgacttggataaagaaatgtggtgtatatatactacggaatactacgcagccgtgaaaaggagggaaatcatgtcctttgcagccacatgagtgcagctggaaaccattatcctaagggaactagtgcaaaaacagaaaaccaaataccacatgttctcacttaaaagtgggagctaaacattgggtacacatggtcataaaaatgtgaacaagagacactggggaatacaaggaggtgggagggaggaagcaggataagggctgaaaaaattctacctattgggcgctatgcccactacctgggcgatggatccgttcatatgccaaacctcagggacacacaatatacccatgtaacaaatctgcacatggacttcctgtttctaaaaatcaacaaagattgtgagacctgcccagtggccagctggctgtgtatcttctccaccaatgaggctgcattacttcatcctcctctccctgggagggggagcaggggtgaagctgttaatggccacagtggctgactcacctcatggcgagaggaacctctctcatctgacttctttcccagccttggtcagatgactccacattgaatctggcatttatttcccgaggcaggaacctagatccagtttgcctcgagtcaggatagaccctttatccaggggctaaccagaaatcacagggcacagtgaaccactcagctctggctggctgtggccagtgagtgaccgcatggcctgagcgggccacctcctcctggaccgatgactcagtctcacgtgtcgagtcgggcaccaggagactcatacagagttggccctgtaattttcttctacattcctcttctccaaaaggaaaaataaacatacaacccttcgttacaaattttaattcccggttttctgtaacccagactcatgcctcgcttttctcggagacagacataagtagaacatcgctgcagatgctcacggtgtgtacacccaaccaagtcttaatcagaccagaggcggtcctctcttcacatttatacatgacagccacgttcatgttagcccaataactaggaccattgaaaagatacaattttttggctgggcgcagtggatcacttgaagtcaggagttcaagaccagcccagccaacatggtgaaaccgtgtctctactaaaaaatacaaagattagccatgggtggtggcgcatacctgtaatcccaattttttgggaggctaaggcaggagaatgcttgaacctgggaggcagaggttccagtgagtcgagatggcaccgctgcactccagcctcggtgacagagcaagactccgtctccaaaaaaaaaaaaaagaaaaaatacaattttcacttcatctcttcttcctgccattgcttacctcctgaggaagccagaattggtggtaaaaggccaaaagagaagatggcaggaaaaggcagaatgtgaagcatatcattagaacaagcacgggtgtgtctcatcagtaaacttattgagcaattactatgtgcagggaactgtggaaacaaaagggttaagacacagcccttactctctatacgtactctctgattaaggagcgagatgcagaagaaaggcaaatctaatagaaagtgggagttaatgctggtcaagtgatacatacagtggaaatcaccatagaagctgggaagccaggatagagcttcagcctgtctgtagtggcaggtgcccaggctggacagggaaggggctgcggtatacctgtatgggcgccaaatgccagaatcaaccaggatacaggaatgggttcctttccatctgtctgttttgctccttcctgatctattctgaactcacagaaaatagctataggtctagtggggaaagttatatatctaattttgattttttttttttttgagacggagtcttgctctgttgcccaggctggagtgcaatggcgcgatcttggctctttgtaacttccacctcccgggttcaagcgattctcctgcctcagcctcctgagtagctgggattacaggcatgcaccaccacccccagctaattcttatatttttagtagagacggggtttcaccgtgttggccaggttggtctcgaactcctgacctcaagtgatctgcccaccctggcctcctaaagtgctgggattacaggtgtgagccaccatgcccagctagttttgaattgtttaaggccacccaaacatttaccttatgaagttataggatttggaataaatgttacaggagtaattctactttctcatcctgttcctcacctggaatgtcacataagtctaaacggagaaaaggacccgaagataaaggaacagctagaacaggaagtgcgagcataagaattcaaacccagggagctggcacaatgagtgccccgtgcccaggacaatggaggccacttgtgtctgcttggagccccaggcaagccatccacatttccatggcacaggggtgcagtcgatgagctgcattagtccttcgctgggctgtgtttctattagtggatcctctgaggctggtgctgtgcctgagatcattaagtcagatgcgctgaaactttgtcaaacaaaagtgcttagggcacagcctgaggctctgtctgcttctcaaggaattgcccatcagtctctgccaggcgtgggtgctcatcactgacacctgtgtctcttcacaaggggctgttgtagcaggagggatgaggttttttttgtttttgtttttgttttttttgttttgaagacagagtcttactctgtcacccaggctggagtgcagtggcttgatcttgactcactgcaacctccacctcctgggttcaagtgattctcctgcctcagcctcctgagtagctgggactacaggcacccgccaccacacccggctaattttttgtattttttttattttatgtatttatttgagatggagttttgctcttgtcactgaggctggaatgtagtggcatgacctcttctcgctgtaacctctgcccactgggttcaagcgattctcctgcctcagcctcccgagtagctgggattacaggtacccacgaccatgcccagctaatttttgtatgtgtagtagagacggggtttcaccatgttggccagactagtcgcaaatgcctgacctcgagtgatgtccctacctcagcctcccaaagtactgggattacagccatgagccaccatgccctgcctgaaagattagtttttattttatttattttttatttattttcttttttgagatggagtctgtctctgtcgcccaggctggagtgcagtttgcaatctcggctcactgcaacctccacctcccgggttcaagcgatcctcctgcctcagtctcctgagtagctgggattacaggcatgcatcaccacgcctggctatttctttttgtatttttagtagagacggggtttcgccatgttggccaggctggtctcgaactcctgacctcaagtgatccgcccacctcagcctcccaaagtgctaggattacaggcatgagccatcgcacctggcctgagggatgagtttttaaatgacttccatagctgtcattaggttctgtcagccactggaacacactgctttgttcttttcctcctgcttgtaaaacgccaaggctattgccaatgtagtatcttcagcaaaggaaggaggcagctgagtcaggagccggaagtacagaaagaagccacagctcatcatgcctgatgaagggaattcagagcagattcctaattttcaaaaattccatgctttggctcttcataatggaaaaatgcagaattataagtttaaactcaaatgggagaagcacctgtgaattaatattttgtgaaaaacaaaacaggaaacaatataatctacatactgcatgacgttttatgtgtgaagatgcacatagaagagaatattggccgggcgcagtggctcacacctgtaatcccagcactttgggaagtcaaggtgggaggatcacttaagctcagttcaagaccagcctgggcaacatggtgaaacatcgtctctatcctttttttagaataaaatttaatttaaaagaatattggggccaggcgtggtggctcatgcctataatcctaacactttgggaggccaaagtgggggtattgcttgagcgcagaagtttaagaccagcctgagtaacatagcaagaccctgtttctacaaaaaaaaatataaaaaattagcagggtgtagtggttcacacctatagtcccagctattcaggagactgagacgggaggatcgcttgagcttgggaggtcaaggctgcagtgagctatgatcataccattgcactctggcctgagcgacagagcaagactgtctcaaaatcaatagtggaatattggaaggaaatacatcaaaatattagctgtgggtaatgaaagtagggaatttttttcttttcttttttttttttagactgagtctcgctctgtcgcccaggcccaggctggagtgcagtggcaccaactcggctcactgcaacctccgcctcccgggttcacgccattctcctacctcagcctcctgagtagctgggactacaggtgcccgccagcacgcctggctaattttttgtatttttagtagagacgggggtttcaccgtgttagccaggatggtctcgatctcctgaccttgtgatccacctgccgcggcctcccaaagtgctgggattacaggcatgagccaccgcccctggccaggaagttttttctttgtttccaatgtttaagtttctgtcagtgaacatgcattatggctttctttttttttccactttttatttttttgagacggagtcttgctgtgtcacccaggctggagttcagtggcgcgatctcggctcactgcaacttccgcctctggggtgcaagagcgattctcctgcctcagcctcccaagtagctgggattacaggcgtgtgacaccacacccggctaattttttgtattttagtagagagggggtttcatcacgttggccaggctggtcttgaactcctggcctcaagagatccacccgcctcagcctcccaaagtgctgggattacaggagtgagccaccgtgcctggccacccactgtgttttaactcagaatagacagtgcacaggattgttgcaacgaaatcccagcgcccctgcgccgggtggaggagctgggcaggaggaggacttttccctctccctgagctcggtgatccccgtctctccgcaggaaaggccgagggggacggcaagatgcacatcaccctctgtgacttcatcgtgccctgggacaccctgagcaccacccagaagaagagcctgaaccacaggtaccagatgggctgcgagtgcaaggtaagcaggtcctgcctctgctggagcatcgcctcctcccagtgtctccagatggacggcagggattttgatccctggctttccaggacccgttaatccccggctcctgatctaagaccaggctctgggaaggtagagtcatcccaagagtaaggctgtctggctggggacagagcctttgacccctggtccctggagagccctgaggcacatctctgacaggggatgtctggaggccgggcgctgcggctcacgcctgtaatcccggcactttgggaggccgagataggtgggtcacttgaggtcgggagttggaaatcagcctcaccaacatggcgaaaccctgtctctacaaaaatacaaaaattagccaggtgaggtggtgcacgcctgtgatcccagcaacttgggaggatgaggcttaagaattgcttgaatgtgggaggtggaggttgcagtgagttgagatcacaccactgcaccccagcctgggttgacagagtgagactctgtcccaaaaaaaaaagagggagatgtctggaaggctaggagatttgagagtaagagcatgaattcagctctgttacctgtagcttccagaaaaaggagctgtatggggagagagaatatggtcccatggagaattttctacaaatgtgcaagtgcaaacgcctgtgtggcttatgagaaggcactgcaggccttacgctgtttccaacattcccgacattttcacacctgggttggtgtctatgtggggtctgtgtgttgagaatacctgaacacctgctcctcttaaaatgagcccggaggttgtgccaggcacagctggagcagtgcagcgcctagatgtggctgtggaaggtgagattaccgcctccagggctcccaggctggctcctaccctgtgggctcctagcaccctatccccaccctccctgcaggaagcatggctgagtgctgggcacctcccaccctgggtcactcccagtgagtctgggaccaggagactctggtgaggctgtggggattggccttccctggggagctgcctggggctgccctccctcctgacggcccccagccccttctccgcatgttcaaaacaggaattctgaactcatagtctccagccacacgtatgttaagcgaaactcctctgtgcccagcatgaaatcaaaagcaagtttttcctttttctttccacggtggtgaaggcggtcatcctcttgtagcctagggttccttggccaaattgctagttgccgatgacctcggggctcggcttgcgagcaacactgggctggaatctgtctccaggaaacccaggcccttttattgttgctgtgtcccccagagggcagggccaagctgaggccattctgtcatgctcaggaaggtagaagatggcccaaagggaagcacacctgcagtaggagggggggcagcggtgggcagggcacagcttccctgcaggttagaccccctcgcaggccagctgcctgcccctgcaggaaccgtgggtctcgggagaggctgccatccctgcacatgacaggtaggcacattgccgggttctggacatgcccccagagcagcctctgcccaccccttcctgggtccctgactccgtccccctccgtgtgcccctccccagatcacgcgctgccccatgatcccgtgctacatctcctccccggacgagtgcctctggatggactgggtcacagagaagaacatcaacgggcaccaggccaagttcttcgcctgcatcaagagaagtgacggctcctgtgcgtggtaccgcggcgcggcgccccccaagcaggagtttctcgacatcgaggacccataagcaggcctccaacgcccctgtggccaactgcaaaaaaagcctccaagggtttcgactggtccagctctgacatcccttcctggaaacagcatgaataaaacactcatcccatgggtccaaattaatatgattctgctccccccttctccttttagacatggttgtgggtctggagggagacgtgggtccaaggtcctcatcccatcctccctctgccaggcactatgtgtctggggcttcgatccttgggtgcaggcagggctgggacacgcggcttccctcccagtccctgccttggcaccgtcacagatgccaagcaggcagcacttagggatctcccagctgggttagggcagggcctggaaatgtgcattttgcagaaacttttgagggtcgttgcaagactgtgtagcaggcctaccaggtccctttcatcttgagagggacatggcccttgttttctgcagcttccacgcctctgcactccctgcccctggcaagtgctcccatcgccccggtgcccaccatgagctcccagcacctgactccccccacatccaagggcagcctggaaccagtggctagttcttgaaggagccccatcaatcctattaatcctcagaattccagtgggagcctccctctgagccttgtagaaatgggagcgagaaaccccagctgagctgcgttccagcctcagctgagtctttttggtctgcacccacccccccacccccccccccccgcccacatgctccccagcttgcaggaggaatcggtgaggtcctgtcctgaggctgctgtccggggccggtggctgccctcaaggtcccttccctagctgctgcggttgccattgcttcttgcctgttctggcatcaggcacctggattgagttgcacagctttgctttatccgggcttgtgtgcagggcccggctgggctccccatctgcacatcctgaggacagaaaaagctgggtcttgctgtgccctcccaggcttagtgttccctccctcaaagactgacagccatcgttctgcacggggctttctgcatgtgacgccagctaagcatagtaagaagtccagcctaggaagggaaggattttggaggtaggtggctttggtgacacactcacttctttctcagcctccaggacactatggcctgttttaagagacatcttatttttctaaaggtgaattctcagatgataggtgaacctgagttgcagatataccaacttctgcttgtatttcttaaatgacaaagattacctagctaagaaacttcctagggaactagggaacctatgtgttccctcagtgtggtttcctgaagccagtgatatgggggttaggataggaagaactttctcggtaatgataaggagaatctcttgtttcctcccacctgtgttgtaaagataaactgacgatatacaggcacattatgtaaacatacacacgcaatgaaaccgaagcttggcggcctgggcgtggtcttgcaaaatgcttccaaagccaccttagcctgttctattcagcggcaaccccaaagcacctgttaagactcctgacccccaagtggcatgcagcccccatgcccaccgggacctggtcagcacagatcttgatgacttccctttctagggcagactgggagggtatccaggaatcggcccctgccccacgggcgttttcatgctgtacagtgacctaaagttggtaagatgtcataatggaccagtccatgtgatttcagtatatacaactccaccagacccctccaacccatataacaccccacccctgttcgcttcctgtatggtgatatcatatgtaacatttactcctgtttctgctgattgtttttttaatgttttggtttgtttttgacatcagctgtaatcattcctgtgctgtgttttttattacccttggtaggtattagacttgcacttttttaaaaaaaggtttctgcatcgtggaagcatttgacccagagtggaacgcgtggcctatgcaggtggattccttcaggtctttcctttggttctttgagcatctttgctttcattcgtctcccgtctttggttctccagttcaaattattgcaaagtaaaggatctttgagtaggttcggtctgaaaggtgtggcctttatatttgatccacacacgttggtcttttaaccgtgctgagcagaaaacaaaacaggttaagaagagccgggtggcagctgacagaggaagccgctcaaataccttcacaataaatagtggcaatatatatatagtttaagaaggctctccatttggcatcgtttaatttatatgttatgttctaagcacagctctcttctcctattttcatcctgcaagcaactcaaaatatttaaaataaagtttacattgtagttattttcaaatctttgcttgataagtattaagaaatattggacttgctgccgtaatttaaagctctgttgattttgtttccgtttggatttttgggggaggggagcactgtgtttatgctggaatatgaagtctgagaccttccggtgctgggaacacacaagagttgttgaaagttgacaagcagactgcgcatgtctctgatgctttgtatcattcttgagcaatcgctcggtccgtggacaataaacagtattatcaaag

SEQ ID NO: 40 - DNA, 76692 bp, Homo sapiens
agaaaatttttttttgggggggggcggtttgggggaaggcagaaggagaagaaaatttgattgtgatggtggtggattttttccaaatttccccacagctgttatcaaaacatgcaaatgagattttccaacaggatcttaaacaaatctggaggagttaatgccgaagcaaaataatcagcacgtttgaagtgactgtgagtttcagtttgtcttttctccccgtgatattattgcaggggaatgataattagacctttagaaatccaaaggggctctcttgctctcttccctctctcatttctcttctctctttctctctctctctctctcccttcctccctccctccctccctctctccctccctctctcttgttccctccctctccctttctctctaactctgatgttggcaaagggggttttcttaatcagactgttttttggtcccagggaaaggaggaagaaggagattgtgatggagaaagggggtctgtgaaacgtcaggcacagcacaaaggctttgccacgtaattacaggctcctattaagtcgagatctgccctcccaggggtctccaattttcttgtattccctacaaagcctcctctgcatgccagtttgtgccttttgaagtgccagagagcttcttgatccaactgagaaggaaaaaggagcccagcaagaagagggggagagagagaaggggaaaggggggaacccaccagcaccctccgtcggactcttgaagccttttttttttaattcttaatttttttttttactctttacaaaaagtaaagtgagaatcctgctctctaatacatctgcaagacatcaccctctcctcctgaaactttagtcactcctgagaatccacaggagtgcagagaggggggaacacgttttcttgaagatgttttaaagctggaacaagccttcttctgttggtgcttgaactcttgcctgggaataacttttttaacctttaaaaaaaccattcactttgattcttctctcccaccccttcttctctcttcttctgtttgcctaactcccccgccctgctggcctccgctttcctctctcccccttgttattatttttagtctgtgcgtgtggacacttttggagagttggaagggatttttttctcctgacttgaacatagggtgactttttaatattgtattttactgtggattatctctttggaccgcgccggacttggcctcaggaaatcaaccaatgctgcggaaggcggctggtgcacaacgctctgctctacagaagggggtcccccaccctcttttccaattttttttttttggccttcctctccttccctccctcttcctccctctctctctctctctctccactacccccctctttcttccccactcggctcctctcccccctcgcgcccacagcgtttggtgttgattcgagcgggaagaggggggtgggtgggatcggtgggggagaccatgacctccagctacgggcacgttctggagcggcaaccggcgctgggcggccgcttggacagcccgggcaacctcgacaccctgcaggcgaaaaagaacttctccgtcagtcacctgctagacctggaggaagccggggacatggtggcggcacaggcggatgagaacgtgggcgaggctggccggagcctgctggagtcgccgggactcaccagcggcagcgacaccccgcagcaggacagtgagtgaggggcgcatgcccacgggggtgtgtgcccgggacagagggcggggacccgtgtagggcagctagagcccgtccgcggccagaaagacaaggtcctgggaccaggagaggtgatggcagacttcaaaggaagggccagtcacaggggaaaccagatgagaaaagcgggtctcggccgagggcatagccaaggaggacgctggagagaggctccaaggtccggggacactccgaggccctgcggtctcaggcagggactctgtccgcggcggactctctttacttcggctaggcaccggctcggttcatcccgcacgcggggcggcggggctgggctgggaaaaggtcttagcggggtgcaaactcagagagccagcgctgtttgggaaagcagcaggttaaagatgctgagtcgggttggaagggcttctctcgggcagcgtatgacggcttgagggagggcaccaggcacagggagcaggacttggcgctgctcaggctgcactctccacgcgggcaccgtaaggccgggcgcgaccgggaggccccgagagaacgcccggccccagacgctggagctgctctctgccccctgctgttgcctctaccgcaaatgggtttgagactggcagagtcaaaagcccggctggcttgggaaaactcgggccaagcaaagggaatgtcctttaagggtgaaacctgaaatccagccccgcatgatcccgcacaggcgagctgcatccgggaggcgcgagcttcagtgcggaggccagtgtcaccttagaggagctctccctattggctcttaaacgcccagaaaagtccagtttcccttccccatcctcaccgaccaacctcgcgacccatgaaaatctcgcttcgctagtgccttaaaaagagactgcaattgtatccccatgcccccaagtctgtaacagaccggtcaccctgttcatcccaggtgacatgtggccagatatgtacagatactccctcttctcctcgaggttgcaagagtctgaacttagctgtaagttctcaaatgaggctggttgctttctatgtcagtagttgctggttaccatttttgtcttcaaatttggaaatcgtggaaccggggggccctccagcattctatgattttcacaaaacgttgcctatttcagactctcaaagaatagacatacaaatcaaactgcacatagaaacaattggaaacagggtccgggcacagtggtggccccgcgggccacgctacagcaagccgcagagagagcctctggtgtgctcaagacgcctggtcttcaccctgcttccttagttccggcctgggcgcccctgggtgtttttagccaaaagcggcctagggccgatccacccaatgcattagcagactgctacaggaactgaatgaggaagtctggcctggacaccagagaaaggtggccaactctgaggaatgaagaaccaggtgtcctcaagttccgcataaagggctaggcgcagagacagagacgttctctttagggtttgggtgcttgagaggctgcacccgcagcattacttaagtgtttgcataggcactcttagttctaacaaaatgcactgagaaatactatgattgtttttaaacgttttaccagggaaaatgaaaaacgaaaaatgtagggagagtccaggcgcggtggctcacgcctgtaatcctagcactttgggaggccgaggcgggcagatcacgaggtcaggagttcgagaccagcctaaccaacgtggtgaaacccctctctcctaaaaatacaaaaattagccgggcgtagtgccgagcgcctgtaatcccggttactcagcaggctgaggcaggagaatcgcttaaacccgggaagcagaggttgcagtgagcccagatagtgccactgcactccagtctggatgacagagtgagactccgtctcaaaaaaaaaaaaaaaaaaaaaaagtagggagaacagcatttggtgtagaccccagcttcaccaattctgcacgtccagtcgtttctgttttgccaggacgacttattaattgcaacatttaccactgttcggatactagaggctggacccacaacagaaaacaggaccacgaagaaacttctgcttagaagaccagagtggggcaggagagactagatgctgctttgccctatgaggaggctggaggatgagaaaaccagggccaaggccagcggcctcggccagcctagggaacaagccagccgtggtggccctcagatactgcaggggaagagggatgaaaattgtaccggttgtttggctctgagtggacgccactcccaagaagggagctcgggattcgtcgtggccttagagtgggtatggagccgggctggccagaggaagctagctatggagcgcccccgagcagattcggaggcgacgcgcggtggctgggaggctgccctggactggggacaggcttctgtgagacctgagcctggcgcctcagaggccctgtggagcacgtggagtcctcaggagcgctcgaggacaagctcagcatcccgggcggaattggggactgtatgtcccgggagaaggggagaagactctagaaactcgcccacgtgatactcgggctcatctcagagttacaatgactagagaggccttgtggggagaagacccagaaaggaaactgaggctcagaaagaggatgctctgcggaagcatgatcaagagacagcttccggaggaggccgcagaaggcagagtgaggtgatggggacgaagtgacaggcacctggagctaggaaagtagccgagaaacacacacgcgcgcgcgcgcgcacacacacacacacacacacacacactccaggccttgcttcctagagagatgagggtagcgttctaacgaatagtttgttgcttttataagcacttttctcaacctctcttttctccgctggcatgagaatgggagggcctgacgagtcttatggtagcaagcgtccaggggaacccgcaatcctagtttttgggctcccatcaagagttgccaagaaagctgttgtgagctacttggaagtcaggacagctgggcctccagcctgcagtgacaatgaggctcagactgtgaatcagggaagaggggagtgtctcgggaaaggatggctagagcagactctcccccacccccaaagggactcagggatgaaaccaggagtctggcgctctttgtatcccgctggaagtctactcgagtgggaaacgattgtctcctgcggagagatggggaatattaaaaagaagcctttggctcttttagctatatagaaacagtcctcgtcctttctaaattttctcttcagctgaaattagcaaaacaaactccacttacaccttcaatattagattcttaattttgcaaaattcctaactataacctgggccgaatatagttagaaggagtaggtattctctaaagtgagggcttctcccagaccctccccaccccactcaccatcagcaattctgtccccacccccaccttggttgatattcactacactgtcctctctgtagaatgctttctttcactttttactgagtctcccagactagtaaattctcaacttctgtgctcaaatacattaagtgttcaaagaaatagttctttaacattgtttgggatccagtggctaatgggagagtgtggagtgtgaatgggggtggtggcagaacatgggtaatcagggagaggaaagaggaacaggtcataaaaataggcagacctacttcaatgaggacagtgcatcccgctgtcatttcttaatctgaacttctgcaaactctttgaaaaaaaatgcgcctgccttccacgtttccaacctctaaattagcgaaaccagattgtcctaataagaccttttgttggaaacacatgtagtcataaaaaggtagacggaaagtcaattagacacgcgcgcacacacgcacacattcacaagccggtgctaagtgtgcacccggcgcagctggctcccgggccgcggcgggatgcaaatacaaaacagcgacgcgggaaatcgatttgtcacaaagggagaggtgtaaacgcagcgcaaaggaattgcttgcccaatctaccagccacactctctcgggaccttgccccgccaacttctcttcgccagagaaacgcccaggagagcgggaacattttctagggcgctcccaagttggaattctcatcacagtaatatcagcttctagagtctcagcttttgcaacaaccctggcgccagaaattttcttatgcagcaccatcctgggactctggggcccactggcagtctaaatttgagcttcaattatctcgttgaagaggggagccaatgaaatataaagctttaagggtagcttggaaacttttctctttagaggaggtgaaatacaggattaagtgcctcactgagtccccagagctgaatgtcaaggccagccaagaggtggtgatttcggtttattttacatgcagaagtaggggcccgggttacctccttctcttagaattttggggaaattgatagtccagtgactcctacccacttttgggtgaaggacgatttggaatttgaagtgtggggagacaggcctgtgaagtccgaaggactcactgggtctccagatcccccaactctggaatgcagtgaatacccacccccatgtttcagagcatctctcccatgtgttagacgtcgtgcagtcctgcattttggctgagacacctaaccccggtgcactcaggtcagagcgccagggcttcaggcagacagcaatgggtcacacgggtccttatagttccttcctcttcccaggagtgtcattttagattttacaacacgagcgaataaatcatctccaaaccaacaagatgtcaccttcaggctccccactgcaaaaaaaaaaaaaaaaaaaaaaaaaaaaattcagaagcagtgatgcgtttctattccaccgacccagctttgaatgtctctcccagccaggccccttttccaagaaataacaactgtagattttcaaccacgacaatccctagaccagtctgattttttattttaaaaggcatgtttcttttacaatccctctcctacacactgtttcccgctccatccatcagcctaccacaccaccatcgcagacccctaactcctggaaaaccctccttggcggaagcactagggccctcaggtaccggattgttgcaaaggtctgtacgtgcctgtgcctgcattgcgacccccggcgcgcctccagttccaaggccgagctcactttcaacagctctggaaatatgaatgtatttttcccccctttagaagaagctatacgaggaacaactttttgaaatcgggagtgtgtttgtagagaaggagataaggattgcatttcgcttatttttctacaggtgatagaagtgttttgggggtcagagtatcctctcaaggaaaatgtaaaacgtgggggctcgcattctctatctaagcctttgtaagtttaattaacaggacccttaaagtattccttatagctacagataaaaaattacaggcaatgtttggataaggggccaactctccgtgtccaaacatttagagaactgcctgtgagtgtacaccgttgtaatcttattgggagccctttgtcgaattctgtattttactttgatgctttttgagtaccattcccattgtttgggtgtcctttaactccgtttacagcaatatattaataaagaggatgcatatgtcagcgttatgtatccacaagaatttggattcctttaaaatcaaacggcttggtgagcaggcaagcactcaaaacccaacagtctcaaacagcaataataatgtcagcaaacggctgccatgcctccttttctccaaatgctgtttattctaaaatcaataagttaggagatacattgcagagaaacagtcattagtggttcagggttggcaggtttgtttttcaggtgtagatgttcttgagtaatacctctccactgtggactaaatattagtagattgtcgttgtcatttttctaatttaatgcggcagcctcagggaagtactcatccagacaattatggggtatcgatttttaactttaagattaaaaaaataccatatttcacttgccttgggactacttttcttgataaaaatatatctgggaagatgattttagggccatgttagcgtaggggaggggaattaaggcacaaatggtggttggttaaggaaattttatgaaagaaaataaagaaaacatgtcagaataaatcaatcagaggcacaagtgagttagaggaatctgaggacaaccagcatcttggggattcttctgttcccgcggttctcagatataggaataagggtctgagttatgcccagaatacattcgtctggtactggatgtcccagtcccttagctgttccacgtaatgaagaagctctaattcccgagaactttggggcttatttttaccatcattgagtctgcccaggctcagctctcttacaaaggtataaatctgaaattcatgtattaatttgaatccccaagatccgagttatgagaaagggcaagggcaggctctactcctattttgtttactttcaccgagttactgtgaagtgattggaaactttcttaacgggcagagagagaatacacggaaactcggatgcagtaataaagttgacataggagtcggaacagggggctctttttggatctcacctttactggggcttgaggttgtggaatgggtggaagagtaattaactgaatgaagaattttaacgttgaaaacagagcccacagtatttttggttatagtggtgtggtctctgcctcggcaaagaaacaaacacccccaccccatcttcgcagttctcctctctgctgtagcgacgccaggcgctgctttccgccgggtaaattagcggcgagcctcgccagacgctttcctccttgccttctttcgccgaaagggggcgcgctcctcccaggctgcgctggtacctatcctgccttcaaaaatttctgggttcctgcaggacagacagtaacaaaacgtgggaaataatagtttgatgacacttcagggactataggaatataaggtgcacacacatgcatcttaatggaaacatgtagacacctggcaggagcattggctgcctgcctctcctcctttcaaatgagggtggtcggggttccagggtggcaggaggggagtggggccagatgaccgtggatggaattggtgggtgctaggactgacgcctgggttccatggcggaggagagggtttgtccccatggagctgtgtggacttttctgcatatgtacttgaggtcttcaaagaaagaagggcagatctgagaaatggagaagtggctggtattagtgagatgttgaaaaactgccacagaagccctcacagtgcctggagtgttaagacagaagagaaaacctggcaccatagagttttaggccctgggatcagggtaacctttcctcctcacgaaagaacaataactgccccaaatcttgtgtgagcctgcaacttgggtacctaaagccatttccaatctgcaaatctgactcctggcctccactgatcctccatttttgggcaagagtttcaagagactcacaggacagatgaggataaatttttaaccccttctgtaaatttagggattttcgacttcttaccactccctgacaatgggggtcaacaaatcaaggcacggtgagagtaacaaactggaataatatatattttgtcttcatagcatagatgatggttaatacatactttccaagataatctgagctggagtgttcactagaaacaggagcacaaggccagaactgtaaggcaaattgctttcccacaaacgtttgtctgagaataagaacattcaccccattcacttaatttctcatcatcagtcatgtcattatattttcaaggacctcacagtgctggaaagtggtgtagttataaataagcataaaaacagatgggtgatcccagtcctctaaatataatcggggatgccaaatcttttcaaagagaattcatatatacaacttaaaggccaaggagcccaattcaatcaaaatttgagccaggatatgctaagttcaatcagcttgaatatgggcaaagtgtaagacctagccagcacttcagatatatacagagaaccacattttctcaagtttccattgttattttccacacaaatttagtgttagtcttcaaagggattgttagatttggtttgggccgggagggtggtgagagtcagtgccccaggctcctgtccttgtctactcccctttctttggtactctctctgcttcagcagtttgccgaaaatctgtgttgcagagaaaattgacacctagaggccacagaggtctcctaaatgctgttttctaggatcctcagaaaacaagaggaccgctgagctcaattatatgtaatatacctggtatctttatgtatttttcttttctgctaattcattttataatagctaagttagagacttcttggagatttaggttttggggactggatatcattctgttttattttcagctaactcataaatatatgaatttgaaagttcccattgaagtaggtattcaatgtaaacttttatacctgggcattttcacatatcaccattaattcaaactgggaggtaacattaaataattatgtacattgtgactttccattttctaccagtgctgcttccctaaatactggtctagactccagcagtagtatactactgggacagttgctaaattgttgcctgtgttcagttaatgcttaccaagtgagagaatgagctctccatccttggtggaacacctttctaatctagcctaagtactagccactttaccctccccttcccatttcataccttttgcctaggagttatcttctaggcccaccattttaataaccatctatatactaaccactcccagtttacagcttcaagactctccattggagctgcaatccatatctgcagccacttatttgacatttccatttgaatatcacaaacgtgcttcgacctcaaaatcaacaaaacatggaactaacgaactttctttccccagtctgatcctcctacagctttccctgttttcctatatggtaacatgtggatgcaagacttatgcacttcagactcatccttgactctccttcctttatgtttctgttccatccatccccaaatcctatcaagtttaccttctaaaataatttgaattcatctactgtttaagtctctatcctggctcacctgcactgctgtaccaccctcctagcctgtggaaactctctgtatccatgcttgtccttaatgtgttggttacaaagactggatataatagatccctaaagaatatttgttgaatttccaaatgacaaatgctagtgtatttttctacaagtacatgtaaaaaatcatgtcatgttctttctttagaactcacaatcacttttcattctttacatcaaaattgaattatcttgattttaaaaatcactcttgatagtctaccttcccatccctgctctagcagcctgcctgatacctctctctctctctctctctgtcacacacacacacgtgtgcgcgcttgcgcacgcacgcacacacacacacacagattgtaactgttttcctattgttccctagtatgctagctaggctagtatactaactccctgtgttctagtctcctttcatgtgctctggtctcattttggcttctctgacttctgatgtgaagtgtccttgctctgtgcctcgtttttgcaaatcttcccatgctttcttccaagattctgctcccatcacacctccttgcgaaaccttctctgactactttattccagaccacacaaatctcttttctcaagacttactatgggaaataacaatcagtggctccacaagtagtgctcaattgttttctaaatattttatgattatctagatttttttaagatttagagacttttggggaaaaggtgtattctgcagtgtacaacaccgctgcagtaagcaaatttttttttttttgtacggagtacttctactgtttttgtaatccttttttttctcccctcctccccatctctgtttttgtaatctttagctgcaagtaattttgtaaattataggagtaataccaaagtgtaatacatgttcatttttgaaaatgtattattgtacatttcaaaattgaaacgggactatcaagacaccaatttttcaccagtctgagctagatacaattaatattttggtgttaaaatattttctcttacactttttacacaattggcatcatattgcattaacattcttcattattgatttttctttactcagtggaaaaagttttaaccccattttcaaagactgtgtttctctaaaattaaaaaactgtgtaagcatttaacccacttgctctgatcagaaaaattaaacaaacatgcaccacactaacaacagttctccaaggattgtgaaagctgtggcatcagttaattcccagctttctgaagttccagtgggtacattttcagcagtaaagtccttcagagtaaacagcttcttttccttttctgcttgttctagctgggaaacttccctagatatgagcacatgtcttcttttgaaatgggaaaagcctgcgtaatacctaaaggatgttcttagaccacagttagagaactactgctccaaaaatcaatttttacatgatttggtgaggaagagctcacaaaattagtcggggaaaaattttgtagcaaactagaaattttctactactcttggtccctgaatcttgaatttttaaaattaaatatcttaaggctcatgcatgctttttgaaagaaagaaggaggaaaatgatttactatataaaggtatttctttataccttttagaggtatacgtaagatagtgacatcttccaggacatgatagtgtggtttgacagaggaagaagcaattattaaaaattaaagatagtgcatttacccagacatgagcatctacagcatttcagcttttttaatgtgataatttcagggaaacaacatattttattattatgaagtctatgtaaaaatttttcccaagcaagtggagattaaaacatttgcctgatgaatacaaatattttatttagggaaagtattaacaagtgatataaaatcccgtagaacagaaattttaaattatgaatgacatatatgttaataattaatctttctcctcatgagaaagggagaagagagagagtaaacaccatttttgaaaactaaaaaccacacttgcctaataaaagtttctgaagttcccccacattgcctatttctaagagaggaaagaaagagaaccacccagagagctcttggcctataaccagatgtgctgttcaacagctctaatcctcaagatcaggggaagaccacaggctgaatcctcaacacatttaagaaataaaatataatttagttaattaatcatggaaccaaaatctgcagttttgctagccatatttcaaagactgaatcccttctgacaagggaaatagaaaataatatcactccacatttgactgttacagtctgttcttagctttcctcagggaagaaatttttcctggtatgatcgttcttactcagaatatacggactgctatttaaatttatatctcccctctcttttttttttctttacttcacattctttttttttctgggtggtgagaatatctgttttctgaactgttttgggctttttgatttggagaatcagagctaccttgaaggccaggaaatccaatctatgcagtccttgaaatataatcatttcagctgaattaatatactcagactgctggtttatttagatgacttactttgtcataaagaattaataaaattcttaatatgaaagataagttgggataaaacataaaactgcttcacaaactttaagaaaatgtgcagatgctgctatgttctataaagccaattttaagaagatagggctaattattttcattttacagataggaaaactgtggcttggagctgctctgaccccattttatttatttttcattatattgtatgatctttgatgtcaaccaaattcctctagatgcattattatctggtgaaatcatactgagttaggaatgaagagtctggcatgccatttcataacatattgccatgctgcacagacctttttaaattcctctggttcatgttcttcattataaaattggcatgtgactgctgcacctatcttcttcatgctaacacagcaggttggaaagagattgtgtttgtgaaaatatttgagaaataaagggctaaatgcatgtgagttgtcatactataagggagtgaatggcgaattttctaaattaagttgtcaagtaacaataaaaaaaacaagaatgcattttgttggatttacagcaaggtctcaaaatgtgaaatattttaaatttagatttagacacgttaggagtcttcatgtgttttatgttggattcagaaaattctgtgttaaattatggttccaccattcattaatacttgccaactgattttagacaaatctctgtgtctcaatttcctcatctataaaactggcacattaatatttatcacgcagatttgttatttggaataataaaatgatgtaagcaaaatgcctagtaccctactcaaataaatgctttattataaattgttataaatgccctttagggcaagcatttatttgagtgccttcagtgggaatggtagtagggtactgggcattttgcttacattatttccaccccacagcatctctgactagtatgacttatttcaggcatggatatatgtccactgtggcttcccaaacaatgttggaggccatttagtgccattgaaattaggaatatttgcatattccaaaagccatactcttacagcatgtcacttattgagtctatttgttttctatctacaattagaaactgatgcctcataactttcagtgatacttataccgccacaccatgagtatctggaagagccaggagtttggctcagaagttgctgactatggttatcacctttaggtcacccttcctctctcagcgtgaaacaataacacagatcattttatatttttggatggcaccaatattaaagattttacagggatttaagatgttacagtgattgaagaagacaaatcccctttcctctagtttctgaattttatagagactctatgacatatgcttgggacacaaggtgttaaggtttcttattccagacctgacatagctagtaaatttctggaggccaaccacgttaatttctctctgtcctatagtgcctctaacatagcactgccttactgctccactgagatttctgtgggtttacttaactttttgtacatgaataatgctcaccatgttaactataattatacataaagttgccattcttttgccaacttagatttcctaaaccagttgagtaagatacacattctgtcctccatttgatatgtgacctgttttcatacatattttcctttgaaatctgataagcctggaagacatacagatggcacttctatatcatgaaacatccaggactctatttttttgccaagcaatcaacaattaaatctctctggcatatgtgagcaatagatcagcatggctagcagttgtcgtacatgtggagaaaactggtcaccatgggtgaggcactttgacaagtttattgcaaggctagtgtgcttgtggtctaggaaagtagcttaacatgtgccttatgcaagagagaaggggcaggtcagccccaacatgctaagtgagtgttaggcgaagattaggagcacagctctcttggcaatagcattctgatatacggaaaagtgtttgtgtgtgtgtttgctaaaaatgctgtcaatattttatcatattgtgtaggatctctaactggggatgtagataactctgggtctctgttctttggagcacatgaagcccttcctcatctaggaagattttcttttggccgttgtttttcttcttctgtctatgtctctcccatatgtgcagttcatgtctaataatttagagaatagggataagagaaataacagattatgagattctttctctagtgtccttatactctaatcctgcatatcttcaatgtgatgcctggttcacttgcatcagaatgaactgaggtttctcaaaatgcagattccagggccccactcatacccagtgactcagaatctccaaagtatatgcatattaaatatcccagatgatttttatatcccacaaagtctgaaaacactgatccagaccactttctcccatagcaattggtattgaataatattttcctcgtgacatccactgtatcctgtgtgttccattgttatttaactctccttaagtgtcagtctcatctcttcaaaggagtacatacagctttaaagacaagggcagaggcaaacagtttaagcctcagagcacttatcatggtgctttttatattataggaggcttaacaaacggttgctgaataaacgaatatgtgaacaaacaagtgagaaagagcacacatatagcacttattaggcatctggcattttgttaagcactccacataaaaccaagaaaaacaatgtgaggcaaccatcaggggatgtcaaaattctaagtaagactaactgttttattttattttattttattttatttgagacggagtctggctctgttgcccaggctggagtgcagtggcacaatttcggctcactgcaagctccacctcccaggttcatgccattctcctgccttagcctccctagtagctgggactacaggtgcctgccaccacacctggctaattttttgtattttcagtagagacggggcttcaccgtgttagccaggatggtctcgatctcctgaccttgtgatccgcccacctcggcctcccaaagtgctgggattacaggcattttattttttgtcatatattgataaattgtggttgtacatattaaaactagttttaggtggttgttagcacttattctagaagaaaaaacatgtgtcaaagaagtggcaacttaccccatggatgatgtttgcaatttaattttagttttaagtatgtttttaaatgaaagtttatctttatcttcttttcttacaaagtccttccttactttcagacagttgataaagcacaatatttctattttgaaattttgtttacttatcttttttatggtctgataaagccaagttttaattttcccttttttctgatgctgatttttgaaaaggttgtgtacgaaatttcaacataacctatccaaatgtatcatttaaagacaactgcatttattccactagtagttttgacatatgctaaagttatatctcaaatatccccttttaaggtacgtttcagggctcttgtcctaaatggattttctattaaatatcaggctttttttttctaatgaagtatatataattatgaatcgttgtccaaaggatgtatttgttcatctgccctgaatgatagaccaatgaatgaattaaaaggaactacatttagaaaagcaggataagtatgattttagaaaacttgaaggaagaaaacaagaaagaagggcacttgtagagatgtgaaggggcagaaaacagaggtgaaagggtttcctggacccacgtctgtagtagagaccactactgagttacagttctctaagcccatctgggatcctttggtgacatgaattttgctctagtggtttatgacatcactggaaccccgttggtggaattacaacttcataattcacagttagctcttgtttattttatatttaatcatttgtggagcatactggcagcatactcaggggaactatgtggttatgctcctgcaaatcttgttgttgcataattaagtacgtcagaagtaattcaccaagtgtcataacatcccatagttcacgccttgcagatgctggcattggttatgattgtcctgaaagttatcctggctgcatcaccttctcaatgagttttccttttggaggaacagttaccaaagacagctgggcttcctggtttaaataaaatacaattttctgagtagcaagcatattgcttccatagaaagacaactccagaaccatgtaggagtgacttctataatgtgactgtaaaatgtggttctattcctgttaacccatgggtatgtaaaatgtatcaatgaaacaacaaaggcagtttttaggtgagcgaggagacttcggatttgtctccatatttatttgtgtttaaccttgagactcagaaatgattccacttaacttgtgcctttgggtctcttaatggaagaagggaactaaagggaagaaattaaggtgtattgagtaccataatggatcaggtactgtgctgggtaatgtatactaattatgttgtttaaattttcacaatagtgctgagtgatagatattgccacccccaccttaccaatagggctttgagactcagaggagttggagcaatgtgcctgaagcctcaaagttagttattgacaaaccagaacttgtcttgacccctctgttctactgtattccagtattttctaactccagtggctagaaaattggaaggaagtggttgagttcaatggtttttcagtggcatttattcagtggaacatagaactcttgtaactgtggtacctgactgtgctagaattacaaattaaaactgcagataatcctgcagaaaatgttatctttgcaaaaaaaaaaaccctcttaatagcactagacatttagatgtcagataagcagcaaatctgaagtcaattacagggctcagtgaacataaatgaagaagtgagttggaagatagtactagagaagaaacaggtgagccagagagctttcctgaaggtgaggagttgattttgaccatggtccttccaaaagtatggccttgaacatgccacccagcccttatgagctctaatcacaggaaaaatagaaatatcttcttgacaagtctattgaagattaaatcagatatttatgtaacaaccttaactcacaggtggaaccaagctcctaatttgcatcacctaatattgaattgtaaaacactgacaaaaaggggacaggttcaacatttctgattatgttctctgttgctatggaaatgaatatttatagccaagaatataatcttatttaaaagattcagacagttgtttctaatttggctgtttggaactggaaattcatttgtccaaatgcaatgttttaatttgtgattaggttcctaggaaacctccaaaagattggtggatgggtgatacagttgaactgtagtgtaaatggaagcagctagtatgttgcatcctggaagaaatagatttgtggctcagaatgaggaagaaagggatggcccttctctctttactggtataggaccaaaatttaggcaaaatttagaactagatgaatttaatctctaggcagccttctccaaaccccttctcccctgacctctaaggtctgaattcaatgttccttctgtgtgctcccatgttctcagtcacccttgatagtattatcacactgcatggcttaagaatgccagtaaggttttggtgcctcagtcacatcctgctcactcctctagagttccccgtaaggaagataaacacatagaacagtagctgaagaggaaataaggtactgaattatcatcatctaggcaaacactccataaactctgggcaccccatgcccccatctcctgggatttgttagtataacaaagttggaggcctaggtttaaatgttatgtttgtagaacagacttccatgcccatctctttttctttctctcactcatttttttttcatacatatttggcaaatgtgtcttgagtacctactatgtgccagtcattatgctaggttctgggatgcagcagtgaataaaataaacacgttgctttttctcctgaaccttatattctcctggggaaaaaaggcaataaacaaataaatgaacacacacctagataagtaattcaattgtgattagtaagttttatgaaagaaatgaaacagcctatttgagcaggaatatgaaagaaaagaaggagagctaactatgtagagagcagggtgaaaagccttccaggcagaggaagtgaacagcaagtgcaaaggccctgaggcaggaacaagctttatagccaaggaacagaaagaaggtcaatgtgactggaagatagtaagtgatgggactttgagagatgacaaagtcagagagatatgtaggggctaggtgacagggacttgtaggtcacactgaggaactgggcttatattcaaagtgtgatgacaatgggaagccagggagacattgaaaccggagagttttgtaatgtgatttatgtctttaaaagaacaacccaactgctttatggagaatggatattagaggaagaaggagaagcagttaggaggttattgcaacaggccagatgagagatgatggtgtcttgaactggctgtatgggtgaggatagagcagcagtggtcggcacccagagtgtgactcctacaggggctcaggaggctgacggagccagcggagtttagcaaatgaaagaggaaaagagaggacaatgtcaatgaggctgtgcagcctgccctggaggactgacctaggacattcatctttcttagtctcatcttttctcagtctcatcttttctctgtttctgtacctgggttttctctcaaacttccaagccttaccatggtgggctccctagaagcagctgcttccaggagaaggagtggttggttgtgtgcagtggggtatgaaataggagcaatttattttgattttgttatttgaaatgttagagtctataattcaggtactgcctttaattttcccagaaaggaagggttctgctttaaattctgcaaaagcagctctttgtaatttagcaaaacatcagaaggcagcattgctaaagactgcaattcagatatgtgaagacttgtgtaactgaaatgtcttcagaagtttttagtgtttcctaggtcttagtctcttctttttagtgtgtatgcattaatggagccaaaagtcagaaatcagttaggtcttttctccaagcaaacaatgaaacagtaaccaaaattcaggggagctaaaatcagaaaattatacccaccaccagttttttgattaacaagtatgcattgtattcagcatcatgccaagcactttggaggatattaaagaagtgaatggcatgacctcttgccaatcatccagctggcgagatggatctaaaattgtgcctcacatagttcatattcagcatgattttaacatatctgctcctggggtcatagatcctgttcctcctcttttccctatcactcaatggtccctcgtgctctcaggtggcacctgctcaaaatgttaatagcaacctcaacttcttccagtcttttattctctatgcctatttctcaggcttgtcctctcttttccaagacagacattttatctcagaaacttaatcagatcttttcttgtagtttcttacagatggaactttgtatgaccccgaagtgattccaggctatgagaattttaaacccataagaaacagctagttggaatactatcagaataaactatttgtatagatacatcttgcttttaaagatttggaatcggctgggcgggatggctcatgcctgtaatcccagcattttgggaggccaaggcaagtagatcactagaggttaggagttcaagactagcctggccaacatggtgaaacctcatctgtactaaaaatacaaaaattagctgggtgtggtggtacacgcctgtaatcccagctactcaggaggctgaggcaggagaatcacttgaatccaggaggcggaggttgcagtgagccaagatcatgccactgcattccagcctggacaacagagtgagactccatctcacacacacaaaaaaagatttggaactcagatactttaagcattctgcagtttgtagcaccatgaagaaagttaagaaatgcttcactatctcatttttctcagcatcttgagctttccaacatttttcatgattttaaaaataatttggcaaaggataagttataatcagtataaacctagagttatgccattgattaggtagaccatgcagagaagtttagtacttgaaaagaaaaactagacttcatgtaaactgaagcttggaacaagaaaggcagtcatctgacttccaaattacaatttagaacctaccagttttttaatttcttggcacaggaaatttaatcaatatttttcctgatgctgaaatattggttttggaccaaggcttatttgaggtttatctcttctttgagctttcactaatgtctttattaatgatctgaaataaggaacggagaagaaaattgggtcagagtaagccagttgacaccatttgtgactggacccattatccttgctcacctcctgacgcaggaggacaccaaggactgtgtgaggtgggtgaggccacagcctgggaagtcttgtcaaagggtgattcaagtgtgggctagcagctgactcaggaacaacccggcagtgctctgaaggctgactcgagctaggggatttgttaggccatctgcaagacacatttagagggaaaatgatttgagaatgaaagtgctgtcatccaaacttgaaagtttaaaaagtattcattttgatagatggagactaaaagattttggaatttggagtcagaaaatctagatttcaatcctgcctctatttctgccactcttggcttgtattacctacctgtaaaatgaaaacggtaatgcctgcttgatttctttctttctttctttctttttttttaatcatggagatctgaagagggcacaatgtggaggaaaagttatacatggtttgaagtctaatgaatacctctatgaagctctaatataataagagggtaacaagctgctagggattcagagggtggatttttcatatctagcaagggtatataaggacaggccttgagtgcacaaggcagcatgtgaatgcaacttgagtgtaattgattttttttttacaagtcagactattgagagttaagaacaatataaacactaaacaagcaaattcaattggacatatacctgttcattcccacaagagactgaactgaagggtgaggcttgtgaatttcattggctgtagtcaatattgcttcactctgttatagttaaaatgtagaccgtctgcctccaaggctgtcaatccggcacctttcaccagcattaagctcacttaaaaatgatttaaaacaacattacattaaaaaaaagcctgatagatccttagttaagggtacaaaaaaaaaaaaaaaacaagttgctatttacgtttcagatattttttaaaaatactgtctggtgagtggaaaatggcagctcggaaaaaatgctagcttagaggactaaaaacctaagagggcaagagcaagcagctctgtgcttcataagcgagcttttctttaaaaggagctacagcagcactggggcgtaggggaagcagaagggaaggaagagacgtggggaatagaatttcttgttccaataatcccatagttttcagcaaggtcaaaagtctgagagttgtgtagagccttggggagtgggtctaagaaaaatgtgacctgccaaggtcagcaattctgacactgattcaaattctagccttagggggtagctgtttgatgagaacagagaaggaggtggcatgaatagatgacatttcgcattggtaggagacgggcggctgcagcggcttgtgcagtcgattccatgagagatatttccagaacaaacagagtcaccttttaattgcctgcatatggatttaccacttggtgtattcttttaaaatctatagttgacacctctctctaacttgcacactccagagtttctttatttccttatcagagaatctacactttgagggttcaaaatcatttggaaatgaaacaaaaatgaggaaactatgtaatgtgggagacagaactataataacattggttgagtgccttataaatggttatgccttgcctctctccattagttagaataaacaagaattgactggacgcttctccagtcccatcccaaatgcacgtcattcaagttttcttactaattaagcatcctcccccagccccccaccctcagagtaccacaaggttaaacaaaaagcaaaatttctatgataagaagagctttttacaaaaaggtcatcttgaccatttaggatttctctctctctctcttttttttttaactttacaagtcagaatgttgtgagtgaagaacaaaataaacacgaaacaggcaatttccaaaaccccatttgtgaaggctggtttttaaacgatgagaaaatgtctgcattgcacatttacagtctgttgaaagcatatttggtgaacaagcccattggaggcatttattgaaactaaacaagaactcttggcctacaagtctccttctctagcctcttaaaggcaatctgtttggatgctcagggatgctccccaacttttgtgaattctgtcttttctttcctgccttaagctaacagtagatgacgtttgcttcgacagagcagcaggacacaagggctaagaacatggacttgatatagcgcccttctcccgtcacttaattgttctatgaagtcgccctctgagcctcactttccttttctctaaaatgaggattataatacatcctttatagggtttttgtaagcattaagtaagataatgtataggatatggttagcattgtgcctcgtgtgtagcaagtccctgcttcatggaagttattttatagcatgtgcttgattcttattttacaattgaacagacattgtggagtccgttatcactcagccataaaaactgtgtggatatatccttgaaatatttgtaaacatctggaaacaatttagtctgaggacactttaggtaactaaaaggactcattctcaaaatgaatatatagtctcaggagacaccggggtcaaagagcaagtggccaaatacttctactcaattcaaaaagctctgtggtgagaaaaaggggaaaaagaaaggagaaagagaaggaccgggaaagagaaatagctaatcatcaagaatattttgattgagaagcaatgtgttgcttactctataatttagaagtcaagcatgtaggcatacatttattcacttgctatgtgacctctaaattcattgtcatacttctcaaaagttgctattattattatttttctattaccctaaagatcttgagagatgaaataaatcctggagctcattgttgactttggacccagaaagcagtataaaataagaatgtaaggaaaactaacactccaagtacaaagtgggtccaaaaactgtaatgttatatagtgttaatatatatttctgaaactggactgtactgaggcagaaaattaaggtatctattttttttctatttttcttaaaaattgcttttatttaaccaatccatttgaaaaagtaatagaatttttaaaaatttactcttaaagatagctttgtccggtatgtttcaacagtttctaacttttaatatccttgaaaattaatttcaggtgaatgttcagggttatacagatttatgaaatttatttaccaataaaattttatgtttaaaaggtatgaatattgacttatttaaataaaaacatttaaataaacctcctatagtctgctgactatatcgtttcatagacgaaacattataagaccaaaataataaaactgctatgcttgcaaagtaaaataaatgggcatatttaacatataaaactttactatgttgtactgatttttgcacccatttaattgtgacacttgaagagtttgtctttgttctgggaactgtttacaggaaattcctgactgacatttttttcttcccatatcttaactatatacttgctaatttcagtactgaaacttatttgataattttgtgctgactcaagttcaagtgaaattcatattattctttagctatgcatcttttggtttttagttctgtgacaatataattgttatcaatatacattagaaatcaatagcatattgataatgagatgaaagattaactgagctaaacatagatatttgagactttttcttcaggaattattgatctgaagttgtatttaatctatcagaatatgctcttttctaatccattggttccccatctcagattccctaacttctttgggcagtaatagaggacctttatttttttttctgttatttcaaaaagattaataaaaatgtatgtttactctctataagcaaaagaagaacttaagatttttgacaggattgataataatttagtgagactctttctgtggagctgtgtactgttcttagaacaaagtagggactcattaaagagctgaataagtcaatgaatgaacaatattcctggctatctcaggctaaatgatatcatagtctgacaattttgaatttacttaatgcaaatgacaaaatatagttgatttagtagaaaaggttttaaatcatggaatctatgtgggaaggtagtccatggggctgcaacaattgagaacattcataaagatgtgagtggaaacaagggtgagttttgaggaagatttgtgtgtttaatctttatatgcctgtgaccagatgtctatgccaagaagcacatgtttttgtttttgttttaaactttcagtttatggttccaaggtcctgatacttatcagctttaaaaaaatcgttttcattttttaggtagttttcttgcttttgggcaccaggtggcgatatggagtgaggtggggagtgcatgggatacacaggttgggttgtcataaagaccaagcatctgtagagccgaactgatgagatttaatattccgtctctctctctctctctctctctccctctctctctctctctctctctctctctctctctctgtgggtgtgtgtgtgtgcgtgtgtgtgtgtgtgtgagagggagagagatccaaaaagagaaaactttgtaaagatttggttccattttgtctgagaaagactggattggcattcctcatctgtatgaaacacttctcaacagattccatacaatatatcgcttggaaaattcaagagctgccaggtctctagctcttgctagcatttggttagcatttcactgtatataagatccttactcctcccctccccccccattttttcaacatttactgagcacctataatgtcccacgcactgtaataagtattagaaatattgcatcagataaggtctggtccgtgccccctatgagcttatagtttagcagagatagacatatgaaccctaaatcagctgcatgttatggcttctgcgatggagtcaggatcaaggcaggatatagaagggtcacaaggatgaacttgtcagctcagtgggtaaagaaaaacatcatgggagatatgaactataagctgaatagtggcagatgagtagatattcatcacttagaatagacttggagagagaagttataataatcaattttgctcctttgaacccttcaggtgtgtgtggtgcgtatgagaaagtcagttggatcttagcatttatttataataatattcataagcacaatctatagctaacattaccagcctagtttttgaatttgaaaatgtgagaaaataagtgtttggtaaaattcaacttccctgcttcctcctatatatgagaatttgtgtgataagaataattataatataaattagactttaagtattcaaatgtttttattgggtcagggcagattaaatatgtgccacctgaattatgtaccagagaggccctggaactgtgactctgggaaaggtatcagtaaaattaaatttagaagatattcagagagatggatatttcagaaaatgtaagagactacagagagaacagcaagttagctcgatgcagtctttgctgtgagcatcaaaataaggaaatgcatgaactggtcagacatagtccatcagaaaaggcttgattccaaagagaaggtactcgtggttttatctagacagacaaaaagaggcttgagaggataatgtaatgaaaagatgcttgacaaaatttagggatggataatacactaatttgtgtttttgaaagctatcgagagagcaaggtaatgtagcctttcaagtgagggccatattttattcaccactgtttttccagtgccaatcatagacctggaaaatggttgtgcaaaaggtatttgttgaatgaataaatgaaagaaataaagcagatgggttgcatgtttgcaaccaaagagtggattaaaaaatgtttattagccaaccagagagtgaaatataaagtaatgtcttttagaaactgttgatggatttaatcagatcaaacttacataaataatgagaaacagcttgcttttatagagttgccactcaaatggattctgacatccctaagaagaaatttattcccttttccttccctttccttccatttcctttcctttcctttcctttcctttcctttcctttcctttcctttcctttcctttcctttcctttccttccttcttccctccctccctctcttccttccttcctccctccctccttgcctgcctctcttcccccaccttttttagttctttttaatatttttgtttttatttcagatatattgttgtgtcaattgctttctttaatttcactctttcctcttctctctttctttcttttcccttctcttttcaccttttctcccctcctctccttcccgctttctcttctactcttatgtgttgtgacaaagatagtattgaaaataaacaaaatgaagcatagtccaaatggtttaacgtaaaggatgaaaatattaaccctgtgctctgggttgtggtcaacagagttccagcagcaagtttcagagcactatggggccttctgttagggtgaggggaagcagtgttctctaagcctgccttatcagcacatttattcaagaaatatttaatgcacagttattgtgtgcttggtactgtgttaagtgctatgaggaatacaaagctccctgtcctttaggaaacttaagaggtcatatatgggtctagaatctagactctagatatacacataaatataatatcaaatggaaagtcatgccatgagagaggagccaattccataataaagttgtttttatcctggcagaccaaaattgaagttggatctattcaggtttacatttccaggaaaaatatacatttgtattattaataacaattgtccaggatcaggaagccctttctaataactgacataaatccttatggggtaagaacccaatttattttccattgtttcaatacttttgattaaattcttaatttgaagggtttaactcaaaataacagcctacaaaattccaataaatagaattggtgagcctgtcgggatatctttccttaattcactcttgacatattttacaatgtagctaactttctagaatgtagttaagggatcaccttacattattcttaaattgttgtgtgtatttgatgaaaagttaaagctgttttttttttttaaattcaggccactagagttctactattttttaagaaccaggtctgttctagttgaatcttttttttttttttcaagataggaagtaatcatctacaacaagtattggggattaaaatgggtcaaatagagaatcttcatggaaataagtggaagaaaccccttaacgaactaacaaatcctctctctctctctctctctctctctctcacacacacacacacacacacagacacacgtgcacacgcacatgcatctctcacatttttctgcaactgagacttctagaatttttatatcatcaaaaggcttaccttctgcagaaagcccttgaccctgaggtgtcttgggaaattttaggacttggcctaatcctatatatatgccagacaaattttgacagccttattgcttttcatcatgaagtgatcctggaacttttcctaaatattcaggcatgttaacaccagcatcttgattcacttccaacccaaccttcaatttattccacttaggctagtcacagcatttttccccagtccttctgtgacccaagcaattctgggagactgcaatgtgtgctgttaatatttgtagcattctcaggagacagaagctatagaaaagctaaataccatggttttgttattactactaattacagggctctacctcaaaggaatcagggtgagaagagatgaattagcattgataaatgactcgcaaaatagaaaatgctgtagaaaggttctaaatatactataaagagtggagacagcatgcaagtgtgattagggaggtggggtcaaagagagaaacactggaatacgggtgtacttagggtcagtatgaccaaattctagtatgatgtaatttcctgcacataccaatctcagaggcaggctctcaggaaagaggatatttgatatggcagtacagcctttcttatgaagggtaccaggaaagaacaacagttgacttttttgctgggctgtgatcttccactttccctatccaccagcccccactaaaatcaataatcactgttgtaaataatttggaaatgtatgttgttagataaaacttactcagctagactcttaaaagaaaaactattagaaataagaaatttgatagtgtggatagtatgatggaagctgacaatttattatttaaaatttctttggaagttggatcgaaaagatgagaagctcagaccttgaatcagactaaatttacaagaggagacacaagatcgagggacatttattctctaagaaatctgatccgaatggggaaaatgagatgtagcggcaaggcaatgggtctgcatagtatacaactcaggcaaggtttgtgcccacaaagaaaaatggttgggagcaataattccatcttatttatacatattttattactagtttttttttcatgttttcaccacacagagattccatgaagcaaagagaggcttagttttgtaaagaactttgcaattttcctggaggaaagttgtcgccacgaaggactttattaccacatactttggtttccaggtgcaagtgagtccaaaccccaggtgcaaatatatccaaatttcagcaccataaggtttcagtttctcacttgtgttttttttatagtacctgccaacacatgaaacacggtagaaaggtttgatcaattttttaaaatgaatttaggaaaaaatagtaacttacagaaactttgaattcagagttgaaagagagcttataaatgatcaaaccaaacctattctgggagccgaaattccttctccagtattcctggcagacaggatccagccttgcttcaagattttcacacagaacagctgttttcgttgtagagtggaaatgattcttatgaaatttatatgaaaattctgtgaatgtctatgtgtatgtgcatgcaaaatttatatttccatctaggagaggcatattccctatataattgcatttgcttattcaaaagctagtcacacgggttgagaagtatgagggtacttatggggaaaataagacagaattaggatagtactttaaatctgggaaatgtgcccacagtatttaccgctgttttaagaaagcatatttatgcttttagtaccaagcagatcttcttgttgattcaggacttctgctattttacaatgaaagcagattgtaaatgaaactttactgatttccctttttccttttcctgtagtaatcaaatgctctcagccactggatctaatgagtaacagctgtgcttgaagtggccttatagataaaaattaaaagtatgataacatctaaggattttgttgtttttaaaataacggtagacttaagaattaagaggaggctaaaggcatcaatgcttctaatatgtcagtcagcctcttcatgtagtaagttggagaaactgacatagtctaacaatccgatgcattgggagatatgctgtggtgatctgaccttacttgtagttgcaaagacttgcactggaagagtctatctcctcagtgatggtggagatggtttgctaaatgtccgtgaaggcctgatttgcaagatatccgatgttgttatgattaaatgcaacaaccataccccatgaactattagagacagaaggagctagagagggtgcccttccaaatctcttactggcaaaatgaggaaactgaagtgatttgcacaagatcagccagctagctgcacaactgtgactggaaactgagcccctacataatgcttattatgtcccaccaatggctttcccatagctgcattatggttgtagacactctaaacgagatgctattttaatactacatacctaaggttcaatcagttggatgtttttctctttttaccaaaacctttttagaacatatttgacactagtgtcatttgtctgttgacatacgcttggtggaaggagtaattgtccaggggtagaaaggctattcttctctgctggggatgtgtgggatcctcagtcacagttgaatagaagagagtattttcttcttcagaatcaagaccacaattttttatgtggccaggcttgagtttttgcaacttaattaaacatatcaattccaatcaattatatttcctattagttcaaacacttctccagtcaacaacaaatctgtaaagagtccctgagtgcctgccctcactctcacacacttttctttgtgtgatcagtatgaacgtgcatcttttccttcaaatatcgtgatccccatccttcttttctcttttctcttcttttcctgggtatgctttttttccccccctctctattctctgagacctttgatggaacctttattgaatgcatagcacatgcttggagcaatttaggatgacttttctaggatcatccagatgtccagtgtggagaaataaaataaaacatgcttttctctacatttcaacataaaggctttgtttggccttttagttttctctatctttagcagtagacatgtccaaagaccagtacagaaaaagagacagaagggatcagcatgtgcctcacacctgcactggtcactcattcaaggtgcaaggtaggcaggagcaaaggagagagtgacacatgaaaagtatccgggccatatggcagtaggacaagccaggcatgcttgtctaggtctatttgtaaaccctgtgggtgttatccccacactgcaagaatagtgataaatacgtcattaaccatgaccagcagagatatgtctatattagagaaaaagaggcaaccctgaatcttaacattatattttacgtcctacattgcctattctctagtgtgcggttctcagagaggaatgtgccacagtattccaatagttatgaaaagataacataaggtgcagccagcagtccagaagagatgtggtcaagatttgtcaaactatttgaagtcgtttataagtaaaaatacctcactcaatgattcttacgaattcaattttccagttaaaaaaagggcaaagaacacattttgccatttgtgctagagattaatatccctttatttacatgcaaattactttaaaaggtaggaaaacctataaaattttaaaggttccacactgggggcttacactaagagtctttgtcaaataaaatgaattctcacaaatctgctttgagctactttctttgcttctaagcacagcctctcttagaggaaggaaacagtaaagttctcacagagaaagaaaacgtttaccactcagtaaaaatccctgggcctcactgtatgaaagctttaatttagctcggctcattcctccatgagttaatttagaacaccaatgaaaggagattatttttggactgagaatctgcctggcacattttttgaacttaatagagctaaataaaactatccaaactcctgtgatttttggaggaggtcatctacaagcgatagccctgtgatagttttcatgaacatagcagaccaaacgtgaaggaacattctctaatctggagagattaggggcctcatacatgaatagagccacttcttaaatacacattaactggaaaagatatggaatgtgaacatgcatgcacacgctctccaggcaggagacagccaggagaaatggaaagcgcagaggcctaggagtaagataagccatgtctttcttagctttggctgtgctggggaactaatttccattgggaaaacagcttcatctctttgagcattagttacttttgtaaaatgggaacaatgatctcccttgaagggttataatattgcatgtgtaaaagttttataaatacataatcttccaagtgtgatatttttgttttgatttattgacttgcctgtattttctattttcttataataatacatgtaagacaagcttatcttaaagaattagagaactatatagaaaggaagataagggaaaaagtcttcattattgcatcattcagaggtttttcttctaatctttgcattattcaaaggcactttcttccaatcttttgctgaacattttcttatatagttaagaatacaccatatttgcagctggaatccttaaaaaaagatatattttatgtatctgtaaatatacatatatttatatatgcatatatatacatatacaaatatctatacacatatatagatatataaatatatacatatataaatatatatacatatatagatatataaatatatacatataaagatatataaatatgtatatataaatatgtagaaatatatctctgtataaatatatagatatacaaatatgtatatctatatatacatatataaatagatctagatctatatataaatcactgtgttcttttgtattattaaaaggcctttatataacataatttttaatactgcatattccacctccccatcatcatcatctttatctttgttagtatcatctccaagatcagtatcatcatcatttgttaaacactatgagccaaatcttatgtaagtggtttacacatattacgctattttactttattctcaagaattattcacatttgtaaatggagacaaatatagccaacaaaaacaaaaatattgaagagaaaaataatcatctgtaagctttgtgcctctgagagaaactccaggaccatttcaaaccaacttaactggcaacaaggtgacagaaacactgattattaccttgtacttttttggaaagttaaagctaaataaggctatatacttatatatgtttcttgaaagagatttcttatcattatataaccacttgagaaaaacactttttaaaaaaattaaaaactgaaaaacaaagcgtctctttatttttcggatcctaaagaatggaatcatttaaagatggggaaatgcttcagctcaatgcaaaaaggcttcttccaagaatacataggcactattcagggtttagaaagttgttttagaatcacagtagaggccttttgcgtattaaaatagactattttttttcctgaccatttagccttgcaaagcagctgagaggagtaacaccgtattatttcttcagctttcagatatctatctagtaatttccattttcatccacagaacacattcagagcagaattggcgtaaagttgttgctgatttgatttggccaatgattcttaagaaatgacggtggcacaactgtcacatctttctgccaaaaccttgtcagtccagcagtctccactagatgaggtgaagggagacgagggctggagataggagagtcagtcctgagaggggaggagggtggctaaggaagtgtcaagggggtctctggagaaggggccccgggctattagctagctgtctaatcctcccctcagcaaggccttttggctgccaagactgttatcctgtgtgcagtgttgatggtctgtgatcctttgtcagagtaattgacggtgaagtctgcacttttgcagctaatgataaatagggcttttaaaggttgtaatttcttgtttaactgatgccagttgcaaatactttgtgctgaggaataattcctctctgccaaataaaatacagtggaagtctgtggtgtgtttttcagcttattgttagtcacagctttcctgacagagcactttctatgcaggagataaatgctcaggccgtccggctgccaatttcagcacataaaggacttttctgtggaaaagacttttctgtttctctagtgaacattaataaggatttttatttattttactttttattttattattttacaaaaccctttcagaggggcaaatgtttacttccttggaatgagaattatttgagtttttaaatgggtctcatttctttctctgtcccattcatgagctctagtttgcacacagctcctctagataaatggcaagaagatggctctctagtctgttcacagaaaactgtattatgggcaatgggattggggaaaggcttccccaagggtctgtgcaccacaagactgaagggaaaattatagtaaaaggggccagaggatggcaaaaatgagagaaatcaggttcctatgggctcaaagaaagattggcttgcttggatgtaaactgagattcatacctttcacaatgaaacaaagcaacacaaaagtgcaccgagaaataccagtgtgcctcaaaagtgcaagtgaatggatttgagaaggagtctcgctctgtcacctaggctggagtgtggtggcgtgatctaggctcactgcaacctccccctcctgggttcaagtgattcccctgcctcagcctgccaagtagctgggattacagacgcctgccaccacgctcgggtaatttctgtatttttagtagagatggggcgaggctggtcttgaactcctgacctcaggtgatctgccagcctcaacctctcaaagtactggaattacaagtgtgagccactgagcccagccaagcggatggatttcaagggttttcatatatatgcttataatcatatttaaatgtattgatggggttacaaacttaaaaatgtcctatggcctcctatggccattttttttaagcaaatgaaacaccatattcaattttatgcatttggaagttatttttttgtgtgaatgagttggttcaagccaaattcattcataggaaataattcctgagcccaggaagtccagtaggtctcaggtgaaatgttggcaggtggaggtgtttctagctagtatagaaccgctgatgagtgtgttactgcaggttctactatagggtggagaacctttaggatatatattcagaccatttggaaagtccgtcagagctcttccatacattaaaaaatgacatgtccttgtgtcttgaattcctgctttacttatctagtaatttagatacacgtgtgtgtcatagattgaaagaaagatgaccaggagaattgaaaacagacctatacaggggagaaagtgggagatgatggacagagatattgtggtcaaagtttagcagtcagagaggccttgagcatcctatccattaaaagtagcagacaggctgtattattagtactgtccttctgaatctgtaaagcattaatgtttgtctcatgcccagccaaaaccaaactccaagttaccaggatgctacctggagacaaaactgcccttatcacccactttgctgctgaaaacccgttactgactgtcctaccctggaggatgcagttcaaagagtcttagcatgttgggaaaggtcctctaccatctggccctactttcccactacggcttcatcttctcttcttaaagctcccaaatgctgggctgagacaacatagggaaatcatgatcatatcacttaccagcactgcattcctgagaagtctatttttctgaactcttgaaattaggacagtgacatagtttttcatagggctgttatgaggaataaatgaggtaaaaatccacttttaggaatgagtaatactgcctttatcaccctgctctgtccattacaaacagtatttttccactggtcaaaatgtgtatttttccatcaaaatctagtgcaattagttcctcttctttatgactcatctattatctcatctattaagttacagttgatccttcctttgcatcacagctttacaatatatatcctccattatcttacataactcatttttgaagttacttgcttatatatctgtttttcttcactaaattttgagctccttgtgggaaagattgacctttcatacttaccagccagtactcatcaccagtagtaagcatatattacattaaatagaaagaaaacacaacataggaactctgaattgtgatttgtcattgcaacttaatttgaattccatggtttaaaggctcatataatccttgggcatgaaatcagtttaacttgtgggcatctgatcattccatttctactcaggccaaatgttttgcttgttttgttcaagaattacaaatttagagtttatgaaattttatttccaaaaactattaagaagtagaagaatttttttaaggaaagattttattcgaaagggttattgcaacagggagaatgcttcaactacaagttttacaaatgtcctaaagtcagacagaaaatatattttattatattattatttttaattgacacattgtaattgtacttgtttatacagtacagcatgatattctgatacatgcatgcaatgtcatgatcaaatcagagtaattattaatagcatatccatcatctgaaacatttatctttttttgtgttgggaacactcaaaatcctcttttctatttgaagatatacataaattattttatagtcacccgatagcactatagaacaacagtccccaacctttttgacaccagggaccggtttcatggaagtcaatttttccatggatgggggaaggcggggggagggggcgagaatggttttggaatgaaacttcctcctcggctcatcaggcattaatttaaattatcataaggaacctgcaacctagatcccgcgcatgcgcagttcacaatagggtttctactcgtataagaatctaatgctaccgctgatttgacaggaggcggagctcaggcagtaatgctcactcacctgcctcacacctcctgctgtgtggccctgttcctatcaggccacggactgttaccggtccatggctctgggggttggagactagaacactagttggaactagaacactagaattactcctcttatctagctgtaattttgtatctgttattaaccaacctctccctgtcctcccctcccctcaccctttcaagcctctaataaccacaattgtactctctacttggaagaacttttaagaagtgggtttgtcggactcctccctatggagttggcagtgctgtacaatgggtgtgtgtgcaggcaaagcagatccatatctctgttaacaaatgtaatttataacaagtaaaaagagaactattcaacttaatttctttagagtgagggtaactagttcccaggattgaggcttttacccgtgttcatgtaagaacgtatcacatgttttccattcttctatcacatgagcaccctctaaagggtaaacgctcaaatttaaaattttagttttatggtacttaaggcaaaaagacaatataatgtgggtctcccataaatggcaatagcagagtgtttttaaaacttggaaagtgttttttaaaacccagaaagctaggttgcagcatttcaataatttacgatgttgggtgaaatggatgggtagatctatgcaattatcttgctctcattggcttcgtgcataattagattaatgctcccactattctgagagggatttataaccatttgatcaagagaagaacagaaatatcttgcaggctggaacttcagtttgcaaagccaaatcaaatgctcagaggcatttctttgaagaaaacatctcttatgaaaatcatagaattgcaatccaatcatatcaagaagtttatctgtctatctaatttaatttctgggttaaaattatacccaatacactgccacgaattcctatccatttcttaaaagttcttccacttcttaatagtttataggaagaaaattttataacctctgaattctttcaggatcattggttctacgaatgtcaagtgtttcagaacttgggctctgtagccaaactaccagatgtcgtccattgtgtgccctgggcctggatgatcagctccctgagccttggtctcctcatctgcaagacctcctagtgtagtgaaatacaaaatggtccatgcagagcacttaacagaggttcttagcaagtagttagtacttaataattgtttgttattcagaaatatttattaagtacttacttggtaaatcatattgacttgacattacattagttcctggaaagtatatagcaaaagtacaaaatattgtctctgtcttcacagagtttataataataatacattatataatagtgttttttttttaagtcatcttacttgaacctcacaacaactctttaaagcatttaggacactttccattggtattttacattttatttcagaacttgggctctgtagccaaactaccagatatcagctgcatgccctgggctcaggcaagatgagtgagtttgctgaaagacagtgagtgacaggtctggctctcaaggctctgtcttctaattaatgtcatttccagtccatgtcagctcttccccctgaatacgtagttgagaccaaaatacatagaaaacaaagaagacatcatgaaaatatacagccatgtcctaaattgtgtgaatcgagcactagctcagagttaaggaaggagaataattaatgtggcctagagtactgggaaaagcaaagcaaaaataaaaattttaattaaaggtaaaactaatcaacttacccactgaccatttttattctgaaatataactaaacattgatttccccaagtgttaaactagataaatataactttgcttagttttgttaaaatttattaaattaacactttttaaaattaaaattgtattgtgtccttttgttatactataaacacatttagaatataaatgaaataacataagtaagtgaggtgttttatgatctttgaaagaaaggcctatataaacgcaacctctcaacgctgggaagttatgaacacaattaagttgctctctcatggaattctgttctttccaactacactgagaataaagtgggggacatagatttctacttatttttctaaagttcaagaatctctaagctgtggttaacttttggcatgagaccacaaaaaacacactccaaatattcatcatattcataggttaagtagggtacacaagatgtaattgatttattggccattggtcactgcagtcatcgtataggcctgaatgcaaacttgccttctcagctgtattgtgttcttaaaggaaccttgagaagcaagatagactttggaaagttggtgtcatacatctttcctgtttcctgtccttagcctccacaaatgatgatcttggagaaactcaacttcatgagagtctttgttggaacaaataaaatggtaaatagattttccccaacagatctgcacctggtgtgtaatagactatacccaaaacatttccaaatcttcaatattagtctttcacactcagtctggagaataaatttttcttctggattctctccttttggaaggggcatcatcttgggatcaaactaacaggcctagattctgttgttactggatgctttgtgccattatttttccagccctgacaagaaactgctcttctagagggacccataaaacttacctagtggctttggtctgaactttgaaatgtacactgcaaagagttccaaaggcacacatgttatttgggtcctagtggaatggtctcaatatataaactctcacaatgtaatgggagaacatccttagtgattcaccttaaatgtaccccattctttttttttgtcaccactttgccactttcctgctccatgtctgcattacgtagcaatttaagacctcatttatatagctcatggttgtgtcaaccagcataatctggcaattcacttcactaggaaccttacatcctctgccttggtttatttaaattttagacattatatatacatatttttggcaggttctcactctgttgcccaggctggagtgcagtggcacaatcatggcctcagtgcagcctcaaccacctgggctcaggtgatcctcccacctcagcctcccaggtagctgggactacaggagcatgctaccacacccagctaatttttgttatttttgtagagacagggtttcgcaatgttgctcaggctggtctcaaactcccaggctcaagtgatttacccgccctggcatcccaaagtgctggaattacaggtgtaagccacctctcctggccctgaaatatctatttaaaatatatattttttgtttactgctaagttcagcaggcagtgatatcatgtgacctattgtctgggagctcctaccagaaactactatgtcaaagtgagctagcagatacagttagtactgtactaggtaatgacagtaagtctcagcagttttagtgggctacgtagagaactcaaacaagtaaaacttttgcattgcaagaagttgttccttctcatgtgagcaattgaatctgcttctagttctcatgtttctagcactgctgttaccagttcaattttgggttctctgggctaagtcacacatatacccacatagacacacacacacacacatacacacacacacacacacacacacacacacacaaacattttatgagaaattatgccccccacccttaaatgttagattttttaaaaactctggaactttataaatagtttttcaacagttttctttggtctcttgttaagtatttgaatacctgctaaatctgaacattatctttaaaagttatctaaaagaaaataagcattcatgcaatgttgaaataaccctgatatctgcaaatatcattactagtgttatttaaaaatagtcaaagacattgcagatttgaccacaggaatgtatatccatggaattacacagtgtctagttaatccattgttaaatttatagattccaaaaatggaggtaattagcaattaagtatattattctttactatatacctctttgaaggcacagatgtatctattggtcaagtacttgaagaggagtttgtaatttaaaattagaaagagttattaaaaacaatttaatactatgccctttttcaacagcaacagtaatagaaacctagattggcaaagttacattctcaagatcacatgacttttttgggccagagacagagaactcatgtcgtctggcttctgatccactgacgttcccccgtaccccattatataaagttgacttctcatacatttctatgaaaaaactttactaacattgaattgctgaaaatgtgggaaagagtataaagttataattgtataaatttggtctggggctatgattaattagagacaagttttgatataaaaaatgggttctctcaggtcaagaagttacctatattcgtatcacttggtgaccacctacacttcatggccagaaaagcttagtgccatttggtcttgggaagacctgagactggtgctcaaaccagaagtctcagcagggcacagtggctcacacctgtaatctcaacactttgggaggctgaggcaggaggattgcatgagaccaggagttcaagactagtcttggcaacatagtgagaccccaaacctagcaaaaaaaagactgctgggcatggtggtgtgcaactgcagtcccagctactggggaggctgaggcaggaggatcacttgagcccagtaaatgaggttggagtgagctgtgattatgccaccgtaccccagcctgggtgacagagtgagaccctgtccttaaaaaaaggaaaaagaaaaagaaaaaaaaaatacctggatgtctctaggaaagaaaattgtaataatccttctagtcaagaagctttctcctcaaactaacagatctgtagtaaaggaataagtttaatgatatcatcagggaaagtatgaccactacaactaaaaagccctagtatggaaataaccaaatagaacaaagtgaaggagcccagcaggggtctgcagaacacagctgaatagcaagaaaggaaaatatttccttttaactctcttgttggccagataaaaaaaaaaattaaaatgtagcttagaatgtccccacctttgcccaaatcagttaccatgcacacatcttctttaattgatttaatgcaaacactgtgtttataaaatctgattttctcaaatcctttcttccatctactcatccaaccagtatatgttttctataagaatctcctgagtctatgaaattttcatgtttattcctaggatgctttattttaaaggtgctgacttctgagtaaattaaccacataattataccctgtgccattttaatcaaatagattaaagaaaagaaataagaaggcttgtcaatgaaacttttaccaattgttggaaatgctcttgcagtggaattaaacactagtatatccagtttgtccttgttcttggttcaacatattactatcaaagtcctttttcaaagtaatttaaaaattggaaaatttttagaaatagggaaaacctgaaaaaagacccaaggttatatgaggaaatatatctgtaattgtcatgtaagtcatattggaaacagatgccaaggaagagaatgacccagatggtgattaaagagtcattgtccttccttaaccttgattatcttccttttctggttatcattttatgtttaatcaatacaactttttcttaggtctttccttcatcctactttcttcctgttatgagttgagcagtgtaaattcttcttgccagatttcagatgatgaggatttggaagtgctggtcacgacatgagtcacagtgacacacagattactcatagatttccactccaggcagacagaatgactattaacaaggacttctttagggctgttcaacaacaggggacatgattcaatggaataagattattccacatgaatttttgggtgttttacccaaatgtaacttttttttttctcatatgaccttagtgcatcggcttccttactagttaaaacagtcgcatatccttggagaggaaatcaccatataattaaggcttaggtgtggttgacaggccgtaatgttcctgtatattggagaatgaattagccaggcttttgcccaagctcctttgccagagaaagggaacagaaaacacggtgactggaaatgactaactagaagaaaatacaacctcaagctaaatatgttttttggaacatagaaataactgtatcaggtcaagccttttgagacttcctttgtcttttctaggagcaagatggtcaataattccatatgtatcatcattatcaaagtcaaacatttactgagcactactaaaaggtttagggctctattctacacactttgttcacctgccttcaaggcttactttctaatcagaataattactgctgcaaagtcattcactgagaaagtgcatgagaaacctgcataacacttgatcctggaatttacatgccttacaaaaatgcagtaagcaggaaattttgtgtgtcaagaccttattacagaaactgatccctgaaagagtggtcaggtttggtggctgagtgtgaatggaccaggttgttcagagtaggcactttcaccaagcagagtctaacatattaatttaataattctaagagaagtacccaaaatatggaagactaatgtcaggtgccgggatagcacagttaacaagtcaggtaaggtgcctaccctcatgaagctatattctagtgtgagacaatcaacataaataattacagactgtcataagtgttataaagcaaatggttaagatgctggatgaagaatagtgagaagactacttctggttgttgatcacagaaggttcctacaaagaactgacaggtcagctgagacttaggaaaggagaaggggccattaatgtaaaagttagtaggtatgggtaaggtctgtgatgtgttattaggcaaagaaagacaaggtcagagaaaagtataaatgaaaaggacaagaaaattatgtttttatcaccattagcagtacaactagagtggagtgattgggtgagaaataatagatcagctgagaaaaggatgctaagcttcaggtatgacaaagagaggcccatgcagtgttttctaaccttgcactctctttggtatatctgtcctccttcctggcccgttcctggctctgatggtcaccaagtgtactggaatattttttttttctactattactttacttgtcaagtgcttttgacttctttctccagatcagttagaaagtaagtatcttgaagtgcagacaacatacaacatttctctctactcagagcatctcatcgcttggcatgtaggtgctcaatagatatttgttcaaatgaatgaataaagtgatagggaggatgctaaagtcaagattgaatgtaaccattgttagtggcatccattttgggattaccctaaaatggttgatataggcagtgtttgcagcaaggctgacgccacttgactcatggttaagaggtcaaggatggcagagaaatgaagtatgtagctattcttatttccttttagtaaatttagaagatagaataactctttatagttattctaaaaaacatcttaggtttcttctttctctagactgtggttagaggtaaactaatgtcttctaaagattcacattgatttcagtctggagtttatccctgcagagtgctgtgggcatggaggaatatgtcaatcattgaagctttcctcaggcctggtaattacattacagcccttatgcaagataaaatccagcctaactttttctcaaaaaagtaaaaaaacacaccaccaacaccatcaccaccaaaagaatataattcagtcatcatgctaaatgagcaattattgaaagttttttattaggctaggcattggaagtgtaaaaactatcctataactccacaatgctgaatttgaaacagatcttagtcccatagcccaacttacaattatgccagttaggacacttgagggctaacatcacaggctttcccagtaactcccctgaattagaatcaaagtctccttatttccaatccaaagccatttccactattgctccataatacatattttacaataaaatataaggaaatgtgtacagctagttgtcacaatttgtatcatttaaaaatatatgtatcacttgtatcttaaagcagttgtcatggactgaatgtttacatcctccccaaattcatatattgaatccgtaacccccagtgtgacactatttggaagtaagacctttgaaaggtaataaggtttagatgaggtcacatgagtgagtcctcatgatggaattagtgtctttataagaagagaccaggaagcttgctctcttttgctctctctgccatatgaggatatagtaagaaggcagttgtttgcaggccaggaagcaggccctcaacaggaacccatataggccagcccctcttcctgaggcttccagcctctgaaacatatttctgttgtctaaactacccagtctatagtattttgttttggcagcctgagctgactaagccaacaacccattttacagatacagaaattgaaagcttcagatgttaaagaatggtaatttcctcaaaaaagtcaagctttaagccactatttacacttcgacttttcttattttttaaacaaaatttgaatttttgttctttaaagagaattttatttcatctaaaaagtatttaaaaatatcaagcttcttattttgaccattttagcatgttttcatcttcagatttatttgacatccaagaccagagtaacaccaagaagaactttgatatccttttcagccctcttcatttattctatatagtgttacagaattacctttggttctatctcttactgtgatggaaagctaattctctgttattgtggctttctctgctataagcaccttgtccttttaacacaagataaaaaattataagaaaattcaagtcatacttttgttctcataagttcaaatgccttgtagctgtctttctatctaagcagagaagctctgctccatcactcctgtccttctaagagctgagcttactcattaactatgtacatctccttcattcctgtctgcttccagtcttggttttttagaacctgtgcttaccagatttttctttagaacattaaaaattataaccaaaaagataaggaatcattgaaaaaggtgacatatgatgcttgcctctcatgaaaacactagtttctactggtaatggcaagattgatgttgtctcttttatgaagtgacagcagtctcagtgcaaagggaaaaaaacctcagcagaagaagacaagaggatatgcctcatcctcagctctgtttgtaatcctagtcaaattcctagtcaaataccaggcacttccaaggggaccacacatctggattattgcaagtttagaaagcttctaatatctcagtcagaactcactcttttcccagaactttggtttcttcttatccttttggaatttaccaaaataatcagacatttctttttaaaagagtcactgaataaatagtgagtaatatgactcaactgttgtgtttttaggcatatggcaaccaaattagttaaccaaaagcaaataggctgggaaataattgaattttcataacctgtctttagctcttggctttcttttctttcctgtctttttttctgaagctaatttctagtgagactacttgttaaaggtaccaattgcttatccgtctgagtactagaatctatttgctttctagattttttttccaaaatttgaatttaagaaggcaagttggctttttagaaagccaagaattgaataatagcaaaaaaatgccccaaatggaacttttggggcaaacacctgtgcatgatatatatccttgtgcaattttgagtctaccctatatctcagttcttgctgaattttaaagcttttattcatttttccagtttcctagttctgttatgctctccatcaaacatgaccgagccatataaacgtatttgaatggctttctcactttctctccagttattttgtgatagaaatcttactgaacagctaaataacaacaaagagtgagcagaagagtaaaggtacagcagcaatggcttgaccagcccatttttgagaacacattatggtagcactggtagaagtaaaatccacctcttgtcaaatgcctactatgtgtcagcctatgtgccttttatgcatttattaaattttcaaatgaccccaggatgcaggtgatcctactcccattttatcattttggaaactgaggctcagacaagtgaaacatcttatccaaggccacacagctagtcagtggcaggatctgtatgagaacaaaggttgttcttatttctaagctggtttactttctactccactccacttccaactatgcttccatcccaattatagctagttgggtctgacaaaaagattcttattttccccttttttggcatcctgcaatgaattgaaaaaatgagtaaactggtaattcatccatagaaaaattggaggtagcttacatatctgaagccagaatttcatgtctttatcaaagagagggtactctgttcaataatgcatctcttacagtaagaattctaacatattcatgaatacattattgttattcgtattagtaaattatggattcaggaatacattagtattattattagtagtagtatttcatgtctgattattcacttactgaacattgataagagcttcaattaaatacaaacacaaatgttgtgctctggagttatagcctaaaacagattcatcatcacacggaaaatgcccacataatgcggtggggtggggagatttatcaacatagcctcagaagtaagtacagttccaatatgggactacatggaaaaccttgctttgtgttggatattctcaggggttctgatcaataatcctttaaggaaaatgtcttaagagagttaaagcgcttaaggtgatatggattgtgttaacatttttggcgctatagaaaagtatttgttctatagaggtgaaaagaaatatataacaaagaagctaaaaacagtgcaaatcaccttagagtacctcacattcttgagtgttttctacttgaaaggagggttggctatattgagaaagttaaattttgagctatctacacagaaccactgttgctttacacagagccactgactcatctctttgatcaaaaccatgcaaaataatgtaatttcacacttcttagagcattttgttctccagagaacatatgtcatttcccaaatcacatataagatgttttaattctatttgctaaggcttagtctgatacttgactaaaaatgaaccaagtctataccaagatgacagtaaagacgaccatacaaagtttaggggctttagtgggctatagttcaggtagctgtgctgtgataatgcgcaatagctgcacagttgggtatttgtattggcagagatttgttcgctcttgatacgtgctgggagtcaatgatggaggaccgctgaagggctatgctgttgagacgatgtgtgtgtgctgctaaacttggctttggtcattgtgatgcactaagctcagtctatattgcaacaatcttcccagttaagtgacccatgtgccatttatcaggacacatattagaaagatgctgtcctaatttcagttaatgctaagtgtagccaaagaaactcaaatgaatgccacagctctatttcactgcttttcatgggccttgcaataaaagctaaacggtttttagtggcttttgcaattacacttcctttcaattttccaaaggttacggggcctgaaccacacaaatcccattaaagtaagtagctgttgtgcaatataagttcctttgaaaacattgttcaatgcccataaaatgatcagcgggctgcactttagatccgcttgcctgccatgctttcaaccaaaaggcagatgacaaactttgatgtggtagttggtttctgctactggagctggcattttatcttcttgcatcagattttttcccaaactgatgtgacccaggcataggaaacgcatttttcttcagattttattcctaaaatatgtttttccgtacctttaaattacgtttggctgaccaatgatttggaatctctaaggttcctcccacaggatgcagagcagaagagggtgaggggtgttggagttagctgaagcttgcatggcaagagcaaggccttagtgaatagggatcaccacatgctgtcaggtccccatgcttgaggatggcactttatgccttcttctccaccttccctctagggcaacttcagcagccacatgaggagtccagagtgaacttcatactagagccgaggtcagggctattgttctctttaactcatatttgaatgcacagagggtagcctaccttgggcttacagtcttcttttctcaagaagttcttcatatgtattctaacattgtgatccattagaaacacccatctcttttagtacctctttcttgtgtattttcttggtggtttaagtaattcatgtatcctgcagccgcttttctagtaaaagataaaaatgaaagaataattcctacatttgcagaggaatcagaccacaaggctttttccctctctaaatctggtgactatcctatctgataaagaaacactgcaaaagaatttttcctctgtgggtaaaactatccagagacaaaagacaatgctaacataattacttgctatgtattgttaaaaagaattcagaaattactcagtcctttaaaactttaaataaatcactaaaattctaatattgtgggactgcttctataccatgacattactataactctttcaacttttactgtaatgtaatatgtcaaggaatcctatctcttttctatagaaatacctgaatacattaaggtgacaaaatatttacagagaaaatattgaaccataatttttaaaaagtatttgataatatactaatatatgtatataaatttagagcctgagaaatcaatatgaattggtgctatcagaaaaggtttatagagaaggtaagatttgagatgtgttttaggaacagagagattttaaactgtgtcctaaagtgaaaatcatctcctatgattgtgggagaagatagaagatggggcatactactaagctaaaataaccctgcacttatttaattgatgaagcaaggacttatggatatcattgtaaagaagaatgcaagaacatctggatcaaaatggctttctagatgagaatggttgcattttttaatggctattctggtagaaaggacaacatgtgatattcatcgaccctctttctcagaccctctttataacagctagtatggaaaaatctgtctttcctataaatattttccctggggaatggtttccatttatgtgttggatgctttgttgtttctctcttgcacagcgtgtatgttgtcatctgcacttaagagtggaatggaattgggaatcctggtttcttgctctggctggaggtcccaagtccgcattgtgattttgggcaagtcacgttgttcttctagatctaatttaactcatctgtaaaataagatggttgaattcgacaatttcatgggtttcattagatgccaatattttatgactcatgatcccagcaagactacacctatttataaggctgttttgcttgtttttactaagagcaacaataactacatattttcagtttactcaatcatcaaaaaaattataaaatccataaacactttggatttgaaacattgcaactttgataaaaaatgtatccatgtaggccaggagcagtggctcacgcctgtaatcccagcactttgggaggccgaggcaggtggatcacgaggtcaggagatcgagaccatcccggctaacacggtgaaacctcgtttctactaaaaatacaaaaaattagctgggcgtggtggcaggtgcctgtagtcccagctactcgggaggctgaggcaggagaatggtgtgaacccaggaggcggaggttgcggtgagccaagatcgcgccactgcactccagcctgggcgacagagcgagactccatctcaaaaaaaaaaaaaaaaatgtattcatgtttccgctggttattctacaacttggtgaatccttcccattttagaatgccaaagaatgagatgcattctaatatccagttggatgtcagtatcttcagacagcatgtttcaaaatcaactttcactgtagttgtttttgcaagaaaagatgaccctcttggaattagtaaaaatacactgctttctctcccctgtattcaaccagagccaagaatctgataaatgtgtttatcacaggtccttcagataccctgcatttgtaaacctctacagtgtttatgtttccttttgtactgctgaagatactgtgctgggtcctgttctgcattcttggggaaaaacagggagctcacattttgtgattagtgagcaaagacagaccatccccaggactgctgctcgagctgtctctgttgcccgctcatcgtctctttctattatacttgcactctgaaggacatttgccagagccagactccctggatccctgttatttgtgtcttttctcaccttcaacatgatctgaactagtgttttcatttgttaaaaacaacaagaacattcactgggaaacttttgctggaattgcttcaggtcatcatagctatttattccctgtcataaactataattctccatttcccttactcccacatcaggggagttggtggtttatggtagacagtcagtggaatttgattgaacagtggaatatttcaaagaactactgagattatgtagcaggttgtaatactaagaacaaaacataaaatattcttggtcttgattgcagttggcagtacaagaagaaataggcttttgaaacaacataaaagatttataatttgtggttgcacctaagaaagaattttctttgagagaagaaaacaagtcatgggattggcttaataggggattttctctatatgattaaaaataatggcttagtgtctaattggtctcagttaaaacaaagtacagaagctaaggatttttcttttttttttttgcagacttctgttttgggggcatgaaattcagataattgtgctatcacaagggcttgtattacttagaaagacctgaagtacgagacaaaatgatttggaaaaatgaataggaatgggaggaatgcttccaaatattaaataggaaggagaatgcaagtgcaatgtaactactgaaaggtatttaatcctaggtgtttgaattctagtgctgatcttattgcaaactaattttgctaatagctagtggtataatcagtgatgttggttggaatattttaggcattggtagatctcaaaaattattattaaatttgctccatttccaagatgcagctgatcttacattcttactgagtgtcacagaagtgccaccaaagctgggccctgaggtaaggcaccacaagtgtaaaataccaaagagaaggtggactgtacaaaaccatgaagcagagagaaaggtatggtagcttcttggctggaggaatctggttgagatcatctgacatttttttctacagaaacagtcttctaaggacaagaggagtttcacgttttccctgaaaacaaactcagcaagcatttactatatctgggtgctttaattatcaagaagaaatgtgcagtctctattctaagcttcaagggtattcctggtaaggaagcattgatgaagaaggattctcttagcaaaagacttagaggcctcagttgtcaggcctctggatttaagctacattttgactctgtacacaaatctagatcattccctcaatttgtaataaaaacaatattatagctgaggtaggtgtcatcatgacttgtgctaatagttttgctgagtacattgtgtgtttataatcagagagaatcaggagaatttgcatattagaagagagagccaaaagtactttctaaatagtgaatggccaagctctccttgttctccccatcctcactccaacacttcataattttctttgggctgagcctctttggggaaaagctatggggaatgtaagtcaagttcattagatggagcatgtgacttgggttttggcagcatggtgttgcaaatctctgggacctacacaggctctgcagagctcaggccttagggtgatagtttgattgaggtgtcagcacagctggtattccattcagtttcacatatacatcactcctgactgggctgggtgggggcagcaggagaggagcatactacactctgactgctatggacaacctggacaattatctcaccacgctaccttcaggggaactcagagaaaaccaaggaaggatcttgacaggtaaaaatggagttgtgattcttcaaaggtccctaagatctcagggtcctagaactcaagtttgagtgaaacattttcagggatctttctgaactgtttcctgttcttgggttctcagggagtgagccccaggctaatgttagcttgggttgatggcattgtagcactagtcctgatctaggctgaggcctctgaagcctgcctttgcaacagcatggagccttgagtgaatggtgttagaaattacttgctgcttcaaggagagttcatggtaaaacaaatccctgtaatgtggtttgaacatagtttcctctctataactctatgtatttgttcatgtatatatgttaggagagaaggaaccaggagataattggtctacttgattattaaactatatgagtgagcataatattgtcaaagacaaataaggtacaaaaccatttactcttcttcctttatctctagagaagtccaaagaacatgggcaggggtaagattttccttgacaaacaggcatcaaggatcatgcaagtaatgtctctctgacagttcagatcttgtcccagatttagaggcaacagccaagcattagagttgctgggattcttgacatatgaacttgagagcgctaatggccacatttgcacatgcaaagtggcatttggctataggactttgataaagatgtgagcaaatgaagcaagatctcactatagatataccataaaaaagtcttaactgggactcctacagtgaatttggcttcttttcatcattgtgttctattccagatgaccagctgaactcagaagaaaaaaagaagagaaagcagcgaaggaataggacaaccttcaatagcagccagctgcaggctttggagcgtgtctttgagcggacacactatcctgatgcttttgtgcgagaagaccttgcccgccgggtgaacctcaccgaggcgagagtgcaggtaactcaagctgtgagaggctggcaccaagtagtaccctcctcagaggcacatctctgaaaactgtttaaaaacacaaattatagcccagcacagtggctcatgcctgcaatctcagcacgttgggaggttgaggcaggcacattgcttgagctcaggagttcgaaaccagcctgggcaacatagtgagacctcatctctaccaaaaatacaaaataaataaataaacagccaggcatgatgctgcgtgcctgtggtcccagcttcttggaaggctgaggtgggagaattgcttgagcctggggggtggaggttgcagtgagctgagatcacgccagtgcaccccagcctgggtgacagagtgagaccctgactcaaaaataaataaacaaacaaacaaataaataatacccaagttataggcttcagatgggagctggtacttataagggttacatatggtcagcatgaggatagaatcctgtttccagctgtgtttctttgggcagcaagtatttttttaaataaaattgaatgccttcaggtagggcagaataatccttgctacaggttcctctcccagcacccctttctttctgacacttccagatttatgtgatatacattgtccatctgagtattttactctgcacccttagatttcaatctgatctcgaagtggttaaagagatgaattctctgtcccctacctcagctctcctccccagtcttcaagaaacttgttgtaagtacacatgagtatgagcactgatggagtgggaaatgaatacttatgaactgagttaagagcacacttaagtggatgattttattttccttcagtgtctctgtgaactgaaagaaggtaagagcatgaaaggcaggaaaaagagaatagccattctttctaacattagtgccatgacacaccaactgcaagccagacatctagaacatgatacaacctgcgattaactcataacaatacgtaatactaacactactggagcccttatatgccaagtagtgttctttacataagtaatttatttcatcctcacaccaattcagtgatgtggatagtgttcttcattttgcagatgagaaaactgagacacagagaggtcaaagtattttgcacaacatcacatagctaggaagtgtctgaaataggatttgaatgcagataggcagatccagagttcatgcttttaattaccactccccaccccgcctcccaaaaaaactgaatgaataagagtctcttggctaaatgccttttcaagtagtgctttgttgtgtctctgctgaaagatcttgtcttccatattgccagtagcaagatgctgttttgataaggtgggtaggtccaatctgtcttgtcttccttacaaaattattgtttgtatatctatgttcagtctgagtgttaataatttctttctgcaaatgataaccctcttgaacagccagaacttgagctagacctcagggtagattcctagcccatcgattagggcctgtgtctatggaggaggcacagtacacagtgggagaccactgtggagttgatgcagagatcctagtgctcccttcagcctgaagagaaagtgtgaacgctttcccacggggaaacagggacctcaccaagaagtactccccaagagaaaaaagaaaaatgtcagtgacaaaagaagaaagtcgtgggagcctgtggggcccctgagggtagatcaggaggaagtgtgagtgcaggtgcccctttgggctcaagtgagagtgacccatagagacaatactcagttttgctctcccattcgccatccagtgcagattatgcaatttgtcttcccacaccctcttcctcaacactgcttaccgcaaatctctaactctgctgttaaatcctttcctctctcctcaaaaaccccatgtcttttatgccacgcctcagcttgcggtggtgtaatgaatacttttagtccagtaacccacagcacactaatgtgccacttttgctatggtgatctaaattttaaataaggaaaactgcagagggcaatggtggacatttcaaaaaaaaaaaaatgaaagaccaattttggggttgggggactgtcttgcccctatcatgacagggaaataccttttttatatgttggaactattttttatttctcttttcccaccttgctatgatttaatgacttttagagtagtgaacatttcctaagtgagtagggcagagttctcccttcatgacttcattcttcccccatgaaagcctaccttttcccagtctgaaccaatcccttctgattctgggcttctttgcatttatggcatttatcataacatgaaatgtattatattgagttgtatctgggccaacttcccccacaggactgaggaggcctcttggatggaggccatgttttattcatctttgcaacatttatttttttcttcttttcctctttttttcctcatacacttatcaagcacatattatactcttgaacccggttttgttttgctggggatgaataagatactgaccctctccttaaggatgtttggactggggtggagaagatagatgtacaaaccatacacttatgatatcataatatgattcctacatcagtggaatgtacaataattagtgatagaccagaggaaggaatgatccaatctgcctgggggaaaagggagagaatttatgtttattaggcactaattctgggccaattctcaaaactatcctgtaagtagatattgttatctccaactgattaggagacaaaggagcagagaaattaaacaactcacaggacaaatcttgaaagtagtgtagccagtatgacttttaagtcatgttcaatgttaaagttgaactttgaaaaaaatatatgggctttgatacccggacaaagcggggaagaatataataggcaaaggaaatatccggtgtgaatatttttaggtaggaaagggcctaacacatttaggagtccacaggtaattttgagcacagggtaggagctggagctctagagggccagtgtatgaggttagagtgatgtggtttgtggctggattgatggacaaagagctaattcctgaacagccttagttctatggttaagaagtttttattttattctgtgagtaacggggagccagtagatgatataaaacgaggcaataaggtgattgtattaacatttaagatgatagctctaagagcaatgtgaaggcacattagaaacagaagagccaggagtgtgggaagccaagtccagattccaccttggccaatttccacccaggcccttcatgctgcacagctctacagggcactgatcacgtggtaatttatgtgtatgttggcccctcgagctgtacaactgctcactccacaaaaagaattttcttctcccataccttgttatacatttctataattgcacttaaaatacttgttttgtagtttttcaaatttacatgtcttcatttaataggttttgatctgcttaaaagcagagaataagtttctcatctctctctttccagcatttagtactgggcctggaccatagcaggtgctccataaagatttcttgaatgagtaaatgaatgagtagaattccatagcactctagaagagttgtatgatcatgaattggatgtccttgacttcagaaactcagccatttattatttatgtgaatttcaacagattacagtcatacaatgcttaacaatggggatctgttctgagaactgcatttttaggtaattttgtcattgtgcaaacatcatggagtctacttacacaaatctagatggtataactgactgcacacctaggctatagggtatagcttattgctcttaggtcacaagcctgtacagcatattactctactgaatagtgtaggcgattgtaataccatggtaagtatttgcgtatctaatcatatcaaatagcaaaaatttggtattataatttaatgagaccactgtcgtatatgaggtccatcatatgtggtgcatgactgtatttaatctcattgaaattgcttcctcaactgtaaaatagaaataataaaacctaatacgtggaattgtcatgttgactagaaataatgtatgtagtgtgcttatataagttcctagccctggtaacacttaaaaaacaatatcgtttgcccactttttcatgggattgtttgtttttttcttataaatttgtttaagctccttgtagattctggatattagacctttgtcagatggatagattacaaaaatcttctcccattctgtgggttgcctgttcactctgatgatagtttatttttctgtgcagaagctctttaattagatcccatttgtcaatttttgcttttgttgaaattgtttttgacgttttcatcatgaaatctttgcccatgcctatgtcctgaatgatattgcctgtattttcttctagagcttttatagtttggggttttatacttaagtttttaatttatcttgagttaatttttgtatatggtgtaacaaagaggtccagtttcagttttccgcatatggctagccagttctccaagcaccatttattaaatagggaatcctttccccatagcttgtttttgtcaggcttgatgaatatcagatggttgtaaatgtacagtcttttctgagttctctattctgttccattggtctgtgtgtgtgcttttgtactaataccacgctgttttggttactgtagccttgtagaatagtttgaagtcagatagtgtgataccttcagctttgctctttttgttgaggattgtcttggccatacgggctctttttcgttctatataaattttaaagtagatttttctaattctgtgaacaatgtgaatggtaatttgatgggaatagcattagatctataaattactttggatgtatagccatttttgtgatattgattcttcctatccatgagcatagaatgtttttccatttgtttgtgtcctctctgatttccttgagcaatggtttttagttctccttgaagaggtgctttacttctcttcttagctgtattcccaggttttttattctctttgtagcaattgtgaatgggagttcattcatgatttggctctttgcttttctgttgtaggtgtataggaatacttgtgatttttgcatactgattttgcaccctgagactttgctgaagttgcttatcagcttaagaagtttttggggtgagacgatagggttttctagatacaggatcaggtcatctgcaaacagagacagtttgacttatgtagcaaacctgcacatcctgcacacgtatcccagaacttataaaataaaataaaaataaataaaattaaattataggtttattattagttgtagcaaatgctgtcagtgctgtccatttcccttgaaccctacaattaggtgtagtctggtcagcttccaactttcagtgcctgcatttctgtgccagcagtttcttcctagaacttcaggagagtgccctgccttcagcattctagaagtgctggaacattaatagacaatgactgacaggatccagtgtacacacacccagctctatcacctccaagagggataactctgaagtgtgtgttctacgttagtcttagtcttcaggttctctgcaggattgagctaccacagagatagctggtttagtagtacaccctttagtggttgccttttcatctctgttacttccttgctccccaaatggtggtctttgcacctcccaaataaaacatttccttcttaaatctttgttggaacatctacttttgggagatggggaattttcttaaaatataattattatgaaagcagatgaaattttcacattttgaagaattttgaaaaagcttttagaaaagtcattatttctgtggcagaagcctaatgagatttttcttcacttttcttgattacaattgtaacagggattataacccatattttgctgtcccgtgggtaagtcacagatcccatatctggagacctgattactggagaatttcatggtcttgttgtaatagtcttgacctttaagaatggccctcattgagggaaggcggatggcatgtttctattgttctacggagaattccatagccatcttatatcttctttgggaaggcattatatagtaaaatcaagcagaatttcattcatgtaaccccttcttctttgtttttcctctctttccttatgccttcttgcctcctaacaatcctccaggtgtggtttcagaaccgaagagccaagttccgcaggaatgagagagccatgctagccaataaaaacgcttccctcctcaaatcctactcaggagacgtgactgctgtggagcagcccatcgtacctcgtcctgctccgagacccaccgattatctctcctgggggacagcgtctccgtacaggtgaatgactggcccactctcccttgctccacttccacatgtttctcagcggtcggtcatgtttcaagctgcttgtgcagctcaccgacatttcttactgggttaatctcttcagagacattcaacttgctgacatccccacattttcccaggagattataagctgccccagcagcagggtttggggcagaagtgagaggggcaggctatctcaccaatctcctcttggactcaggaactcttgcaaaggtttcaaagatgaggaagaatctaaaagaaaagatcattaagctgtgcccagtgttcctcttgcaacaattctggaacaaaactttaccctgtttccaaatttaagctaaattcgttgtattatgcaaatgtagggacgtaacttgtaaaactccaagtatagggccaaaggcaaactttgcagtaaaactggctttgaattaaaaaaaggaagaaggaaggaaggaagaaagaaaggaaagaaggaaggaaggagagagacgagagggactatgacagagagaggaggaaagaaaagccaagttcattctgatcactttcatggccaaggttctttgttagtaggtgtgaatttcttataatgccaaatgccttcctaatctattgctaattcttgtctacttgtctgaagttttctctggggatcagtttgtgtgtatttgtgtgtgtgcgtgtgtgtgtgtgtctgtgtgtgtttcttttaaataaaaaaggaatgtataatttacactaaacttttatattaaaaagttgaacatttttaaagaaacaaatatcagagtactatttcaatctcataaagaggcttttaacctcccattattatgctgttcagaaaatataggctgccagaagggaagctgagacacaaattcctaacccattggattagtctagagtgactttctttgaaaatatacctgagtactctgagaaaccaggccaagcctacgtgttctccctggctgatttcagtggaggaagaactattcaaaaattcatttattatgcttttgtttacctttttattgtcaaggttaattattggtttaaggagaggttttaaatgaaatataggagattatgtctcagatgaagttgaatttctgacatgaaatgctacatttttgaaatgcaagtgtttttcaaaggttcttagctttaatcaaagcaaaaagcctcatctaaaagtttctttctgttccaaatcagttcctttagagaaacatggtaaatgcacttggaaatttgttttaatcccctgttataaaattagcctgaattctttttgtcttagcacatagagaccctacatctaggaaagtcttattctgggccctattgcactcagatgtggtgtgccttactgatcttgaaacattagttatatctgtgtgccctattttaaatttaaactcctctcctataagatttactacaaatacattttttgaagaccactgtaaaatcacatattctctaatattttaaataaatgaaaggctgctttatttctcttataaacattggtataagagaaatttggtgtgttcatgaacacgctaaatggcttggaaaatgggtgtggttcaaagcctgatgcttcaagatctctggtttgaatttggtcacaaccaggaagtattgcccctttttctgtctgggtcctccataggaacttttcataccagccataaacaatccagatggctgccacgtggtccttaccagtgagaggcgtcacacagcacacactgcatgaatggggatgaaatcattcctgaattaatatagggttatattacttggacctcagccatttgagcctcagtgtctgcatcatatgtgtttagtatatggacatctaactgaaattattaacgtggcaatttatgcgtgccttttttggaaatattctattttaatggaaagaattatgtagaaatactggatacatttttaaaaacatccataattcaccatcttgacataactagtatattcatttttgtgattagagttcaatgttttatatagatgtagctttagtgtatatattattttgtattctgctcttttcacttaaagtcatatgacctagtacattttactcatttcttggtatgcttttatatcatttctctcttagaaattggatttgtaaaaattaatttagaaaatcataaaatctgttcatattctgtatgaagaataaattaatcttcagatataagcagaaaagtgatgttaaaacaataatttaatcaataataatgttttttgatccaatgttgactgaagtgtttatattttggttgatttctaaaagtagcaaaaagctattctgttatttggagaattttctgctatgtttagaaccaaactatgttatgatttcacactttgaagcttgataggaaatattgttaaggaaataaaaaagaaaaacaagtgatccaaagcaaaggaaatgatagacttttgtgttatgaaaaattaactcactgttcttgttggtactattatgtcaagttagttatctcacatgtgacactcattaaaaggcatttctcttggttaattcttggaacactgttgtgtgatagctctgtcttgctgtgcttccaaagaagagactaaacacttgcccaaatttaagtcttcagcaaggagaattagaactaatgcttgtgttccctgttttcatccaacatgttaagccacacgactatattttcattcaaattaaaccttgcattgtattgaaagtagtaaaaaaagtataagattggaaaactatctaaaatcccctttttatgcaagagatatctcagatcagtgaggcatgcctgcagctgaagtccacactctgtggggacctcatcccattggactgatagacgtggcttggtcatacaagccagagacagtgagcgacagttttgccagaaaggatattttgctgacttccacagttatcccctgaaaaaagaaaggagaaaaccaaggcataaaagcagttatttgcatatggtcagaattttgggttggaaaatagccaacatacttttttctgggtgtcttttacatccagagtcatggatgtgtaatttattgttcaaactgggacattttttagagtgaaaggggagcattattaataattatactaggacaacaggtataagccaggattgtccctagcaaactgggacatatagtctgctctaattatagcttgtcatgacctcactcattcccttgagcatgttagaggtgatgacattaggcaggcaactgagtcaccagagggacaaagcattccctatcacggacactgttgtcctggcaggtgccttctttacatccgtggccagttaaaggaagcttgtttttggcacacacacccattgcttaactcagaactatttttcttaggcaacttgtaagagtgaaagcacacacaagcaccagaattattcagactcactaatcttgcagtgctttgcttcgtgcttcgtgggtagcagtgatcaaccaagtcctgaacttttgactgttatttgagatgaagtagccaagaaacattttctcagagacatcctttcctaggtgaagtggatagtgaatggcctggttttgcattatttacctgaagtgccatttccagagggagggctgggcttaaaagaaagctagtgatgagtgaaagagaggtcagctatccttgtccacagcttccctccccatccttctcctcccctcatttgatcgtggtcatggtgctgcctgacatctgctgaacgcatttggcttatttctccctttcacactttcaaaaatagatcctcgtccctcccaagatgttgtttacacgaggggcttcataacggattctaacggaagacactgaaaaggtaacttgtcagagggggaagagggtggctgcttggggtagggtttaagtgggaattcagagtgtttaagaaagtgggggttgcagttctagaaatttcagcagtgaagtcctcaagtgaggaatattattggtaaccagagctgcaagaaagcatgtccactaaatgaagcatagtgtgatactaatctagagcagggctcttcagagattgctgtgcacaggaaacatctgggatcgcgtgactgtgcaaactctgattcactaattccaggttggagcttggattgtgtatctctaacttgcttctaggtgatgctgatgctgttgacacttggtacacattttgaatagcgagactttgtaggttacaggacggggttcggaagaactacgttcttgtcctggcttctgctgctcctcaggccagtcagatcattgctctcttatgcagctttgtatctaacatgaagctagcaataatctccctattgcttatttcacaggggtgtttggaacctatcgataagcagtgtgcgcttcaaaaaaagtcttgcaacaatagaaagatacaagaggctttatatataaaagtatttctaaaatgaaaagttaaacatagcagaaagatcactgaacatacagtacaaacggaaagcttaccaatgaaatgtgcaagtgtgttcactttaagagataaatatacgtattagaaaatcaacttctgaatttcaaaacagaagttagaaatagaagttagttatttaaatcacaaaagatccctttccaaagaatttaccagatctctttttaaaagtaaatttccctaggaaaactggtattacattttatcaggtgaagcaagtatgcctccgttgttcttgcactgacaaaagaacaaacccgagactttctgcaacttctatgcatcacagtcttgaacaccgtaacccctacagtctttgaaaaaatcctgagctggtgaaacccaaggatttcaggaaaactcatagacttctcggctgacagatttgtctttagggtgaaattgtaaacatcttgtcatcatttgttcaaagggccaaatagaaaacaaagagttgaaaatagagtcaggtattatttttttcccaagctatcaattgttttgtgatttgtgggacttaacactataggtgtttagaaagcagaggggcagttgtccatacgtttcctggctttaaaatcgtagtacgaatagtattttccatacttcctcaatgtttgacaatcattttaacacatttttttttcctcacaactttcagggtaggttgaaatgataaaaaatgatttgtcccagtgaaaacagtactccacctctgctagtggttagcattctgctctctatggctgtgttgcatctgttaggaatctccaaacaagtaaatggaaacatttgaagctgatttaaatgtgtcagctctgtgtaagtctcagggcagattagctgaatcaacagatggggtgcaagcatttattattaatctctaatttctcaatgcactttattcagtaatgtggtttcttggtcactgacacaaagaacttaactaaaactaactaaaaatggggctttagccaaagcctaaaaactcagtcccagaacttatgtctgtaccccacttccaagaataagtgggttttacttagaaggcaagaccaacaggcaggatctctggttgttgttaagcaggcttctggttgttgtcatgtgcttaatctgtacaaatcacttagcttcaatctcaccattttacccgagcaagcttaatcctgtataggaaggactggtcattttacatgttccgaatggccctataaattggttgaaaacagttaattaccctctttggacttttaagaaaacatttcagggttctctttcttttcctaaagcagaacgtcagaagtctccgtgacatggaaagcagatggtcacaaacaatttcatattggcagccactcaaggctctcttgcatctgttgacactttaggaggcaggtcctctgcatcttacttctaatgccatttttgaagaatgactaagatactcttagagtactcactcactaattctgtcttttctgacttgtaatacaagttttgcttttcactggtatatccaaggactgctcactgcttgcctgtatggcacccttagctcaaattgagaagctagatccatgtcaaactactggaaaacagacttgcaattatttagtatgtgtacaaaatattattggaatccctatttgtaggattacatattctaaacatttgttaagaggctgtgaaataagatggctttggttcttttatcctacttcttgcggctataggatgctgaaacaagttaaatcaattttgaaagtttatacatttcctaagcatttatcaagggaaaatattatcacctatcaagctcctagggaattgctaaattcattcattaaaaacaactacttgttaatccactaatttgagggatacctataaggcattgtcacagacttgcctctggtggtgttcttatacaatgccaccatataatcagacgagggcactgttctttactgtggaaaagcaggctgccgtttatgtgaaaaatgtgccagtgaatatccaatctcctgtgtaatagatgatctgaattcccattaatttgtttttgagatagaaagtgcattaacattcatctcatttgggatattacagtcttgcctacattcaagagagaaactcagtatttccaagaaatgtgttaccctgctaagtcctcagactagaatatcaggtggtaaagctagttgactctgaaatcactacagcaaaaacggttatgcaatagacaacttgtaatcgttattataggagacatttctgggaaatagcaatagcatcttcagtaaactaaaataatctccccaaggttctaatctccctttttggctaaagagatggaatacagctttgattatctaagaaagggcacatttctgttacataagactttgcttgtccagaatctcaaaaaacacatcatctttcagaaaattagaccaagtacttaaaagcacaatattctatgacaatctacaatttgggatgagaaaatttttctttatactctctcataagttttagctttctgttttcagaagccattcaaatttgttctcaatacttagcaaataatacagacaactcctaattccagcttctcttctatgtgtttacaatttcactaattgtgcatcatctttagggcttaattctctcacagaaacctgattaagaaaggttgacttggttgattttataataatctatgacttaggtacatttcccaaatccaatagtctttttttctcagatacttagatcttcggattcttggtataccctagaaattttttgaatataggttttgtgggtttacatacatttatggtaaggtcttgaatggaactgtgaactaaatgataatacatatatgggctttgaaaataaatgacatttcttggtatattctaaaacaaacttgtcccactttagtgtatcgttctggtcatttatctcacttctaacttaaacctaccttaactgggaactcttctgcttctatcccttggtaggcagtggttgaagtgatagtctaaactgtactaataacttgttcagtttttattgtgaaatatattttttgatggatccaagtatacacagtcaccagctcctgcttttgtcatgtcctactgactttgccctttctattaagatagtaaaattggcagtaaggaccagttcctatgaataaaagcatattggtaagatttttttttttttttttttagaaatcattgctcacagcagaatgacagaaaccaatgacatcgagcaggaatcaatttaatcacactatatatagatatttcttagttatctgtctattcattgaacacatggtactagatatggtgtcatttctacctgaggaaacagttgtgaacaaggcagatgtggtgtctgatctatggagcttatagttgaaacagtgatagatactaaacaaattattaactaaacttgaatcaagtgctaaaagcaaaagtttagtgtgttataaaagaacgtagcctggtctagagggttgagatcatctatcatgaaatgatgagtaagagttaagcaggcaaaactgaaatagaagaaggtaggatccttttgaaacctttctgagtctcctgtgtcagaacacatacatgtatgtgtgcacacacacacacacagtcacccatacacttaaccagggctataaagattttaaattaaagatgtatatttctggaaagacctagtgatctgggactcattatatttcttaacttaattttcttgagttaattattagtaactgagctgaaataggttattatgagttttgactccgtggtgtcccaaataagtatcaatgatatattctatttgtggagtagctttacttttctctctttctgatcttgtcacttgatccccagaaccacaaagtcttatgtggctgacaaaattccattggaatgcaggcaacagaagagcacatgtcattccatttataagtctatctcattccagccctgagttgaaagggattttgctaatcttagaagcaactaaaaacatttttattgaagtaaaatatgtatacttttaactatttagtagaaagactaatttgctattaagtctatgaaaccatttctttttcctttaacagagattcatggatgcaattaacagaaacccaccaatgataaatttctgcctagtggtgttcttaggtcctaattgtaatctatgacaatgaaaaacaagtttagatttttctcagcaatgaagacagtgagaaacagttacctctgaaatcaagaatgctgaaaatggagactttgatagtttatctaggagatttaaacattttcaaaataactgacccaaaaggcagtgtatgctattcaagttctcttgaggaggttttaaaatcaaggccagtggcttagtaacctcttgattcagcaagcttggtgctatcaaccagtaaattaagaatggcagagaacatatgttaggttgtttaactggttctccaggcacattatttattatggtatttattatctaaaatgtgttagaattaaggtcagttatctagagtgaaggagcaaaattccctttagtttattttcaaatgcttgtttctattccccactgctcccacaggctggggaggtaggcaggacaagagattaaatactgttttaataagtcagctgatgaaacacctgctattcaacttgagcaactttcttctctcaccccagaaataaatcattactcactgtatccaccacaacaaatacctcttcctccctttcctcactctacaccactttctcctgctcttcaaaacatgaccactcttccctaagtaccttagacgaatggaaagctggggctgtaagggaccctagaggtcatctagtccaagccattgcccctgcctgcccccatgctgagagtacatccatctggggcacagacttgcagctttgtgaaactaatgcctgttattctccctgctctctcctttgtccctacagcgccatggctacttattctgccacatgtgccaacaatagccctgcacagggcatcaacatggccaacagcattgccaacctgagactgaaggccaaggaatatagtttacagaggaaccaggtgccaacagtcaactgaggaaaaaaaataattaaacaggcctaagaagaaatcaaaaaccataagacacctatcctgctctgttatttcttcatctgctggggggaaaaagtaaattacaaacaaacaaacaaagcagaactaaaatattgggaccatggcagagaaaagcaggagaggagcaaaatgaaaattagttaacaaatgttcctcctccctctgggataccaccaccacttgtttctgtgtgtgtttattttgtttttctttcattcatgctttgcttaatgtactccaggcttcttcagataggttcagcccacccacccccatgattgtatgaagttttaaaaaaaactacagcagccaaagaaactatatatatatatatatatatatatatccagaatgattgcctctactgtcctcattgacttgtttgaaccttagtgccttaccctgtcctcttcccagttctctttatagaagctctaggagctttcgaaaagccaaagtctttctgaagaatctgtgctggacagacataattccctttctcattgtctccatctttgttggtcatggtaaggtttttccatcagcctctgaaaaaatagttgtgcacaacatctgctcactggactgtctgatccaatgtaattggctgcgtctggctaattctaagcactaaagtctacatctaagctatagatttaagcttgaagctacagattatatcactatcaccaccacccctcaccctatgcaatcaatcaatcaatcatcttaagttaaagatatttgttgtctttgaatgatttgctgtcacagactatttggtagaagaaatatttttcacctgagagaggaagagaaatttctctagtaacacaaagagtgagttctaaaaggcatgcccacatctctttcgtgccttaaggatagtgagatgcacacttatatatatactgtatatatttatatatttatatatatatttcatatatatatataatattgcaagcttaagtttgcaatttcccaaacaatacaaaaagcaaattacacaccctcaccactgttcttatctctatagtgatgaaacattaattagggatcttgctgcttttctttttctacacgaagttttcattaaagccacagaataattgatagggcagctgtttgagaacaggtcccattttcacattagggctttaaatgaattagaaactatttgaggctataaaaatgtccttgagtttggagcctgagctctggtgaaatgctgatacatctgatctatcatgggaattgcagttagagagagtaaggaataccatttagtcatctatccgttcttcacttagcaggaatatgaaagaaaggcacatgtttaagaggaatacctaaaggtttttctaaattccaacatttaaaaggcaattgtgggctatttttattttttaatattttgaaataaagtttagtgtctagggctgggagccaggactgatcttccatttctttttctttgttcccagccatgcttttgtaacttgccaggtggacttgaccaactacattaccatgctgtgcctcagtttacccatttgtaaaatgggattaataatacttacctacctcacaggggtgttgtgaggctctattcatttgctcctttattctttcctgtattctctgtatgtccagcactttgtagccatgggaggaaagggactataaaagtgtacaatgttaatggaatgatacggtacctgaaagccttgttttctagtaagaaaatgctaccttgctgtacatacttataaccttgtatttggaaatgagaaataggtttatattttcagatctctcaaaaatcacatcatttgaccaaagaataatttaagacacatagaacagatttttttaatttatattttcatcctgaccagcttagttctaataatttttagttgtgagtgattaaaaaactttggatcaattttggtcaaacatgccaactttgtagtctgagtgacaggcaaggatttttgggtttaagatgcacttttagcacacatttgtatttcccttggcatatcagattgagctaatggtgatgttatttcaatctaacagccaccaatctgaaattgtatttcaaatgttgattctgtagttctttaaataataatgaagctcatcttatacattttgctttcaccaattgattccttcttcttttagcccactattaaaacatttcttactgaatggttcatgtaggcttgctgaacagcacgcattacttgcttcctgaagagttcccccattcatccatttgtcccattagttgctgtggattatcaagttttgaaggaactgtacatcccaacagactgaaacattctaagtgaaatgagtataatccaagtaactggtgaactttggaggtttggagcttgaagagaatggctaagaagatttgaattatagggagggaacagaaatcatacatgaaaaggttttactgagaaggggaaaaccttagatagagggacatgtgaaacaaaatcatttgaaattttgattcagacatccatttccagtggcaaacagcaaagcctgaacccataaacccaaatgataggtgaagttgggtggttttatccaatgtctcaagcaagcaatgtctgggaatatcatagagtaacaagtgctggtcagccaaagaaacattcactgctggtgaaccaataccataagcatgtattatctaagcacttgatcaagaaatatacatgttgtacaagctctcaattttgttcatttattatcaaatttttaaaatacaagtttggtatgtgatttggaaaagatgccttctggatcttaagccagttgtcagtggaggtcctcagggctgcaaatgtcaagacataaccctgttcctcaccatcatgataccagatacaggtgaatacataggaactatctgcctgtgtcctcaatctcccttcaaacaagatgctgatttgtagggtacttggcaggttaaattaaaccagaagaggtgacttaataaaaaagggaatgacatttagggtataaagatctcataagaaatgtaatatgtaaattatatcttgctttatgttgtaaaatatacattgtttgcgctagaatagaaatgatttcttttcaataaaaagaaagaaggactctaccatgtcttttgttatata

SEQ ID NO: 41 - DNA, 14616 bp, Homo sapiens
cctgcccagcctttagcctcccgcccgccgcctctgtctccctctctccacaaactgcccaggagtgagtagctgctttcggtccgccggacacaccggacagatagacgtgcggacggcccaccaccccagcccgccaactagtcagcctgcgcctggcgcctcccctctccaggtagggctggcttcaagctgcctcctcagcaacccagagatgcccctggctctgctgcctccgctgtcccaagccctggtcctgctgtccccagtgccgcgagggtgtccacagatttccccggtgctctctgtaggctgctgatccacgccccttcatcgccaccctgcggcccccttggtccctgtcaggcttctgcctcgtctcgccgccctccaggcacctttccctcaccccttcctctccctctcccttctgaccttgctctgcttcatccacctcttgtctctctgcctcccgctcggggtccgtcttcttggctaccaccctagagcgtggctgggtgactggtaccccagctttgccaatggccctgtttcatcattgcaagtcccaggcgcatgctccactccctcagcctcgctctgcccaggcgcctccttgctccagggcttggcgcctggcccgggttgggtcggatcggggaggaccgcccagcgcccaccgagctcagcacccaggagcagtcctccgctgcactgcctgaggccagtccttggcatgggctgaaagacttagtttcccaggcacaccccaggcaccctgcccagatgttcctcgctcgctcacccccaggttaatgctctgcctctacatcctctgtgagaagtctgggtcctgggagccctggctgcaagggccctgactgggggtgcctgggtggctcagccctgtctgtttccaggacccccttggactgggactcagaatgggtgtggaggggaaggagagaaaatcaggcaactgtgccatgctccccagggcggacctggcttggggtcccagaggggcctgccaagggacccaggagagggagcgagagagtgccctggaaggcccacggaggggagcgccccctcactgctccatgggcggggctgggtgcctgagcgcctgctgagcagagcagggggcccagggatctgcagggcacagggtacatcagtctccagtggtctgtcttggtgggcaggcctctctcctgctgtcctggctgccagactgctcaggtcccatcctcagggggtcctgtttctgggccctcgcccctccctggcctgccagctctctgccctatagcaactaattggaactgagacaagctggagatgctcagcccccctgcccccgtgccagaaaggctcccggggaccagcgcccaggggtgcgggtgagcacctcctggtgacacccagccgccggtgccagccgcaccccaggagagctggtgtatgagcatggatgtcttggtgcggagcatgcccatgtatggccactgtgggccagcatggtgagcctttgagggcaagcccgtgtgggtatattgaaaggaagatgcagggctgcctccaagccaccagggctgggcggtgggagcaggttgcgagccagggagcagagagggctcccatggcaagctggccagctgtgggtggcagccctggcctccctggcccaccttcaagccccaaggacccgtacggcagtgggcattaaccctaccaacgcatagatggggagtctgggaaaggaaggggggtgtttccaaggcaagaatgagtttcctgtctttagcaacattccagagtcactcaaacaaagctatagcgtgtcccttccagtgacagcgccaagtccccagaggaggggtttgtaatgagttcacacttgacagttagcactcagagccttcagcaagggcttctgagtccttgccaccccgtatagaggtgggatgaggacctccccacctgccgtctcctgtgcttcccgggcccaccccccaccccccaccccccagcatctccagcctgcccgggagtcacatgtcctcggcccacagaatccccagcacacgccccacccacaggcctagccccagccctggggtccctggcaccccacctgccagggcccctcccctgccttgctcaccccccaacacccctgcttgtcggaaatgtcttcccatgcccaccacgaccccctcccactcatctgtgggccggagagcttggtccctgccgcacgttgcccccctagcatccaggcccaccaccgagcccccgacaggcctgggagccccactggtgggtggggacccaccagctgggggtcttgctcacaccgaggggctgggggtggcggtggctttcccagggcaccctgccttgggctgcaggccgctgggtgggcaccggctccctcggaaggcagcgcaacccgggatcctgccggccctggcccccaccctgccgaccgggcctggggcgatcagtgccccagctcctgtcctcttctgctcagatgctgggttgggagatcaggggccacagctcggccactcagagccctttccgcaagtcttagagggaccagctgtggggtgtgtgcagaggggctgcgctgtggggagggcgcatggctcagtcctcctggcctgaggcccgcctagcctaagtggcctccaggacccatggccaggcccttctgcagccttccagaaagaaccagcttcccagggttccctggggaaggcctggggccacctcctctggaggggtggggcctgtgcttcattcctccttccccaggtccccttccaggccagaagatcccctccaccacttgaatcccacagccagaagccccttctgggactctagactcctgggaaccatcccagctgcccccttcgctgtttcgctgtttgccttcttcccctgccccgtcatggctctaggtcagagcagcctctggggtggctatggaggggccaccagccttggctcttccgaggactgcagaaccctcccactcccagcttcccacctgcgcagctctgatcccagccagcccaaggggcagggtcaggtcccggctccctggcaggcctggtgaaggtgctgcccattcccatgaggctcatctctgaggcttaggggcctggggctctagccagccttcttgcatggaactctcctggtccactgcatcttaagcctgagctccacttaaacactggcctgagataagctggaggaccaggggcccaacggactctgtgggcctcttgaacttgcctctgctggccatcccagtcctgtttggtccctgaggtgttcagatgggccaaggggagcatggcgggcagactcctgggtggccagaagattagaaggcagccctgtccctggaggcaggggaagtctgggaagccagtgtgacttctatcctctggaagtctgagtccctgcttggccttgactgccatcccatggttcttggaggctgccctcatgcaaagagacacacacccatgggagcccagcagtcccaggagcctgaagctaagcaggctgtgggccaccctggctggctgaaggaggctaatcccagcccagcctgagcccccggcagagagcgggttgcggcagggaggggctgcaggaaaccttcccctcccctcctggccttggtgggcctgtaccagggagggagggaggcagggccccaggctctggggggcaggccgggaacaccttccctggggccctgaagtgctcgcctggggagacgatggcttttccaggagactccctgcagacagaggcagaggtgagaggctgggcgggggctgccctgctggctgtgttggggctgaggaggggcttctggatctgtgggccatagggagctactgatggtcctcagaagggccatgcttccaggggagccccctgcacagccccgagagtgtgaagcgtgtcagctttggggcctgtggcactgtgtgcattgggagagggtgggtccagacatgggggcaaggacacagacggacagacagacagtgtgtgcagccccagctctgctgtttcctcaccgtgtggccttgggcaagagtttggggccaacttcctgagcctcagtttaccccttcatcaagttctaagagcattgcttccttcttatagtcaacgggggacggcaggatgctaagtaaagaaatcacatgagtcccctgctctgcctctgagaggtgacagcatcctcccttttccttggagactctagcaggaggccccggatctcttcggagagtgggagggggcagcagtagtccgtgtgcagaggaccaggagcgcacagtgggaagggctgagtcccgcactccgccgactgtggggacaggctggaccttgacatgggcgccacaggctgcaaagggctggcacagagaggtgggaggtggctgggcgcatcaagggagaactccacccttgtcgccaccctgccagaaaacctctggaaaggatttgagcagcagatgagccggggtttcccagcccctccacacgtggctgcaaggggagcagacgcccaagcgtggctgcctgaagggcatgctccggcaacggcaggggcttggaatgtggcacaaggtccacccctccccactccagcccccagcccctcaggcagccactcccacagatgaacgcacacgccgggctttggcaaggccagggagggtacacatcccctctctggttgatgcccaagtacaggctggagccatcggcggggagggactggtggactggggcctgggagagtggcagggggcaggccgggtgtcagcgggggcacaagcaccaggctgctggttgaaactgggcccaaaaggctttggaggccagaggggaggggaggaaggacacagtcccggggaccccgcagggctgcgtggaaggtggcacatgtgtcagagttcaggtcgggttgctcaggggggcagacgcccagggctgaggctgcggagacagcatccggcgtctgccacttggcagctgtgagccacaccatctgcaggcgagctcccagggcccgccagacctcaagccctgctcccgccgcccttggcctggcctgaatgcctggcacggaccctccatgttctcagaggctgccaacgcatcttgtttggctgtgacctcgagcaatccagtgcagaggactgcgctagctttcagaggggcagacaaggagggccctattggggtggtggcggaggctccaggaagcccagcctcctccctcactcacacctgcggtcgccaaacctggggcttatgccattgccgcccctgtcctttgctctaaagagatggtatccagggagctcagggcacactttggtggggcttgaaaccctccctgaagtccctgaagacacacccagagaggccaatgaagggaaactgaggcccagaggcctcagttgtggtggtggagagttgaggactggagggacttgctgtgggtctcacaggatctgactatggggtattcctgcttcctgggctggggtccccgcctgccttatctatgtgtggatatatgtgtatgtatgtgtatatgtatacatatgtatatgtgaatgtgtgtatgcatgtgtgtatagatgtgtgcatgtatgtgtgtacatatgtgtatgcgtgtatacaggtgtatatgtgcaggtatgtatgtatgtatgtgtgcatgtatgcatgtgtgtgtgtgtgtacgtgtgtataaatgtgtatgtgtgcgtgtgtgtgcatgtgtgtgcatgtgtgtatgtgtgcatgtgtgcatgtgtgtatacatgcatgcatgtgcgcatgtggatgtacatgtgcatgtatgtgtatagatgtgtgcatgagtgtgtgtgcatctgtgtatatatgtgtgtatatgtgtatcatatgtgtatgtgaatgtgtatacatgggtatgcatgtgtgagtgtctaggtgtgtgcatgtatatgtgtgtacatgtgtgtataggtgtgtgcacgtatatgtgtggatgtgtgcatgtatgtggatgcatgtggatgtgtgtacatatgtgttttgtataggtgtgtgcatgtgtgtgtgcacgtgtgtacatatgtgttttgtataggtgtgtgcgtgtgcacgtgtgtgtatgtgagcgtgtatgtgtgcatctgtgtgtgtgtttgtgtgtgtatgtgtgtacgtgtgtgtgtgtgcatgttctggcaggagggaggggcttggtgtgaggtggtggggagaaggcaggggccaggctttgggaggacagctgagcctatactgccaggacctcccaaactgccacccccagtcttgggcattcaggctctcacaggcccagagacatggctggagccctgtggctgaggagcacagctgagagctcaggcggggcctggaggcgccaaagctgagttccaagtcaggctgagtgacttgggagaaatcagagcctctctctcggccttagcttttgtgtccataaaatggggatactcatcaggccagctccaggggatcctatccttccccccaggctcccctggctccctctgacttcatgggccccttgctgcctcctgtgggctcagacacggagcctgccccttcctcgggagaggtctcagttttgtgccagttctttgaggggaaatgagggatgtgccgggaagcctgcccggcccccgcccctccagcctgcccactgcttgggcacagccatgagccatggaaaaccagccaaaccttgtccttctgcctctgtcacggggcccgggtgtatgggccttccagccctcagcctccctccccgctctgagggaacctcttccccttgcccctttctcagtctcttggagaccccccagacatcctactgtatcaggcagcctgcctccagagccctcgttgccccacagctggtcccgggaacccgcctgagaccccgatggccagtcttgccgtgactggcctgccctgtgcctgtgccccctgccctggtggagggcccgattccctaacaggagggcctgcagggaagtcccagctcctggggagaccccttgccccggggcaggagtccctgtagagtcctcctccaggccaatgcgtgggtcctggggggctccaagctggccatggtcagatggtcctctgtcccctcggccttccccagcccctccccacagcctcccgtaggcccagccggaccaccccaaccctacctgtccaggtggactgcccaccctggagcttgccagggctctggcggggtgtcccagccctgactcactctccctgggaggtagcggctttggcaggggcatcggcaaggaggggcagggcagtctcctccctcccccactccatcttgctctcctgcttccaccctgcccttcctgttctctcccactgctcctcctcctcctcctccttctgcccccgggtgtccactggcactgggagagggtcctacagcggcagcaggcatcggaggccctgccctgccctggaggaagggaaacaccatccaggtaggtgagtgttgagccttctccctacttgggggccaagaccctccgggcggttcccctaggttctgctgggccggcctgaggctggcaggccctgggctgcaactgtgggatctcaaggctcaaaagaatgagggaggctcggtgctgccccagcaggggcctcctggtgaccccaggggtcagcatgaagtccagctccacatgagggggaagctgagctaagccttgggctccgactcccactttgcagtgtggcccagggcctgtgggctcaggagggctccggggctggctgcggaaaggccactccacaggcctggcagccgctatagccacagcctcaccacaggcccctctgtccacaggtgtgggagggcgcatgggtggcttctaggggggatgccaatgcaggggggacgcgtgccagcagatgctccctggagcacccgaggagctgcatgggggcgacaggacaggcctccatcccaaccctctcctgggcttgtgctcagacccaacctggccctgaagtggcctcaggcccccggcccgctggtagcaaggactccaaagcggcagccccgggcagccagcccagcccccagggcaactggggaagcatcgggcagggcggggctgctcatagggtgctggcctgggggcagagcccccacctccccacggcctccttagacccctgcaaccagcagctgggcttagggggctcacctcgctctgctggagccccagacagcccctccccagctagtactggccctaagtgagggtctcctgggcgtgcgactgcttcaggtctgccagaggcccctgctgcccagctgggctccccatctccagatgcaccgagggccaccccaggctgggtggcaagcagggcaggcatgtttattcccacttaacagatggggaaggtgaggctgggatgagacctgggcctttgctggagagtcagggtggatgaagtggtgagagaggcagggctccagcctcttcctgtagggcacattcccggctgcctctggacgggagaccgtgtctgatgaggagggaggaggcaagcagaggtgggtgctgggggcaggctcgggcagggctgcttcgcctccactcccactcgccgcctcggcctggggggcctcaggcaagcctgaccctgccctgccaccctggcggcagcctgctcccctggggggcctctctgggctgccgaggctgtgggcagggaggaagggtgcgagcagatctgggagctccagggctgtttgggccaaggcggtgtgggcggggggctggggcgggtggtccagaggaggaagccaaggcccaggggcagtgttgggggcgccacggcctccacctcgggggcctccactcagtgctgcctcagccaactttacccacggcctccaaggataccccctctttctccgccctgcctccctaccttggccttagagggtctctgagaaacgtgggcagggtggagggaggaagcaactcagagtcgccgcactcaactaacttcatccacgctgccctgagcccagaactcaaaggaaggatcggcccgggtaggaggccacagtgatgtccccaaaagtgaattcttcaaagcccttgagggccaatggctaggattcctcctccacctcctccacgcagcctcatggacgcccccgccctaaagcaggcttctggcagactcagaggcgtgggggcctgcagacttgctgatgaggagacatttcatcgcctgattaagccaagtcctgtccgggatggggaggggggtagtggaagcagtgaagggagtggagtggagggggcaccctccttgccagcagcatccactcccttcctgcctggagccctctgcccacactccgccctctccgcctcccgctccagggtctggccgtccctggtgagggatgggaacgcagtgccaccacacacgcggaacaccagcccctggcatggagaagacaggtgggtgctggtgctgatgatcccctcgcctcttcccccaggtccatccgccatgtggcccctgtggcgcctcgtgtctctgctggccctgagccaggccctgccctttgagcagagaggcttctgggacttcaccctggacgatgggccattcatgatgaacgatgaggaagcttcgggcgctgacacctcgggcgtcctggacccggactctgtcacacccacctacagcgccatgtgtcctttcggctgccactgccacctgcgggtggttcagtgctccgacctgggtttgtccctgagtgatggggagcggggcatgcagggaggctcaggtgcagcctgagagccccttctgaaggggacacatgctggtcctgtgggacggtggcgagcatgatgtaagtgtaggaggggtccagccgtctggctgtgagctgtgcagtttgtgcccacttgtggtggcatccccgtgtgcccgtcagtgtccctgtgtgtgtgtccccggtcctccctaccagtggggctagtcggctggatggctccaagttcatgctggtgatggtggtggggcccctaggtctcgagttcatgctggtggtgggggtggggcccctaggtctcaagttcatgctggtgatgggggtggggcccctaggtctgaagtctgtgcccaaagagatctcccctgacaccacgctgctggacctgcagaacaacgacatctccgagctccgcaaggatgacttcaagggtctccagcacctctacgtaaggagctgggaggaaccagcaggcctacagcagagggcaggggtccgggtgggtgcatgtgcgtggacgtgtggggtatgagaggggttcggggactcgtggggcttcagggtgaagcctggagccagccgtgatgggagctcccgggtttgcggctcactcatgtgggtttgagcaaccacagctgcaggaccggatcgctcagttcggctcccttcgtggctgaaaacgtttcatcacgtccactcctcccagcaacagaggagaacggatttcattgtagccagtgtgcgtgtgaggaaactgaggcttggagcggcaaggcagtggtggcactgctggggctcaggaccgggcctgggtgctgcctcctgccctgcactctgctcacaagcatggactgaacctcctcgaggcccagtgggctggggaggcacaggaaggcaggagagaggggcgggtggggtggggagtctgtgccttcacctcctccgcccaccctgcttcaggccctcgtcctggtgaacaacaagatctccaagatccatgagaaggccttcagcccactgcggaagctgcagaagctctacatctccaagaaccacctggtggagatcccgcccaacctacccagctccctggtggagctccgcatccacgacaaccgcatccgcaaggtgcccaagggagtgttcagcgggctccggaacatgaactgcatcggtgagctgagggcctcccagaacattccagagccttgtctcgaggcatggggaagggagaccaagggatacctttagaggctcagttcaagaaagagtatggtgagaacggtcaaaagaaaatccatggatttcttggcaaatcctccatgcaggcgatcaccacggctaaagagaagactgggccagaggggccgggtggcttccgggagccccatcttcatctctggcactcctccctttcctcttgctgcccctggagctagcagtcctggggctagcagtcctgaacagctaggagtttgcaattagcccggtaaattagcagaactgctttcaggagacgggagcagccggcaggtagcagggcccaccacactggcccggaagtgacaggacccagggctgtgcagggaccaccaggctcccgggctaatgaggtctctcccctagagatgggcgggaacccactggagaacagtggctttgaacctggagccttcgatggcctgaagctcaactacctgcgcatctcagaggccaagctgactggcatccccaaaggtaggaagcccactcttcctgcacgcctgcctgcctcacccccaacagcacagatggccagggtgggggctctggatgggcccgatctactcagggaaaggctcaacagtcccctcccgccacctggggcagagctagggcccctgccctcagcacctgcattctcccctgtgccctcttctcctggcagacctccctgagaccctgaatgaactccacctagaccacaacaaaatccaggccatcgaactggaggacctgcttcgctactccaagctgtacaggtgaggccagcagggcaccgcccaagggtgatgccagagtccctcagtgctgtgtggcccctcgcgcccagccccccatccttacctccagcctttgagtccgtgtcattctcccgctcacaggctgggcctaggccacaaccagatcaggatgatcgagaacgggagcctgagcttcctgcccaccctccgggagctccacttggacaacaacaagttggccagggtgccctcagggctcccagacctcaagctcctccaggtgagagctgggcatgcacagccaggttccctaaggctgggctgggggaggcgtgtgtgtccccgggcagtccctcagtcccctggccctccttcccgaccggctctgggcatctgcaagggagcggtcctgatgctcccagctggtgctgaggaggcagggagcaggggctccatggtggataccgagcaaggcagcctggtagctcttggacccgagggtctccaggtgggtcggacaccagaaagatgtggcagagtccagggagtcgagaaactgtgggcgtgggagtgcacagatctgtgccaagacagtgaccgcccagggcaggaagtaggctgacgagggggagcagggtcttgcctgggattctatcgggagcttccatccctggcctggcccgcaaccaggtgggtgatcttggtcttgcccagccctgctccatccacaagtgtttggagcacccccatccgcaccagctgcgagccagcaccgcgcaggccatgcccatgctgggccgagtgcgccctctagtggccattgtcatgttcaccagcactgggctcccagcccaacccagcaggcgcctcgcctgcccacctccgctcctcccagagacagcaagacggtggctccagagagttggaggggctgctagagggcgagctcctctgctgactggaagaaagaggagggcatcccaagggctctttctcctctcatgccccatggagtgtgagggtgctcccccgaggctcaggccacctttcctccacctcacaccaccaaacacacctctaccccagccccgcccccacatgtcctcaacctgacccacctgagaccctcatccttgtccctggtcacatccagtgccttaatcctggctgacacccacacaaataacacgcccatgccttggtttgctcctcccaacaacggggagcctctggtgtggcccttgaagtagggtgcagaggcaacagcaaaatgcctcctggaggcagcgggcttggcgtggagggagggaggcctgccgtgacccggcctctctgccttcaggtggtctatctgcactccaacaacatcaccaaagtgggtgtcaacgacttctgtcccatgggcttcggggtgaagcgggcctactacaacggcatcagcctcttcaacaaccccgtgccctactgggaggtgcagccggccactttccgctgcgtcactgaccgcctggccatccagtttggcaactacaaaaagtagaggcagctgcagccaccgcggggcctcagtgggggtctctggggaacacagccagacatcctgatggggaggcagagccaggaagctaagccagggcccagctgcgtccaacccagccccccacctcgggtccctgaccccagctcgatgccccatcaccgcctctccctggctcccaagggtgcaggtgggcgcaaggcccggcccccatcacatgttcccttggcctcagagctgcccctgctctcccaccacagccacccagaggcaccccatgaagcttttttctcgttcactcccaaacccaagtgtccaaggctccagtcctaggagaacagtccctgggtcagcagccaggaggcggtccataagaatggggacagtgggctctgccagggctgccgcacctgtccagacacacatgttctgttcctcctcctcatgcatttccagcctttcaaccctccccgactctgcggctcccctcagcccccttgcaagttcatggcctgtccctcccagacccctgctccactggcccttcgaccagtcctcccttctgttctctctttccccgtccttcctctctctctctctctctctctctctctctttctgtgtgtgtgtgtgtgtgtgtgtgtgtgtgtgtgtgtgtgtgtgtcttgtgcttcctcagacctttctcgcttctgagcttggtggcctgttccctccatctctccgaacctggcttcgcctgtccctttcactccacaccctctggccttctgccttgagctgggactgctttctgtctgtccggcctgcacccagcccctgcccacaaaaccccagggacagcagtctccccagcctgccctgctcaggccttgcccccaaacctgtactgtcccggaggaggttgggaggtggaggcccagcatcccgcgcagatgacaccatcaaccgccagagtcccagacaccggttttcctagaagcccctcacccccactggcccactggtggctaggtctccccttatccttctggtccagcgcaaggaggggctgcttctgaggtcggtggctgtctttccattaaagaaacaccgtgcaacgtggctccgtg

SEQ ID NO: 42 - DNA, 75200 bp, Homo sapiens
acaagcaacgtgagagaagctcgggtagaggttcgaagagctgggagcgcagggcggggacctcgcacgggagggtgcgggcgggagcctgcctcgcgagcccgggccacggcggctgctcccgaccgtgactgggacccgggcagggaaggtcgctacaaagcctgccgggcgaaccgaaggcagctttgtgcggagccatgccaggaagcttgggaaccgtgagccacaagaggtatttttggtttgtttggcttaagcagaggagagatggttttctaggtttctgtttcattgctagctaacaagtgagggctgtccacagcctggcatgccctaagtgcctcatgtgtattaactcatgtaatccatccagcaatccagtgtggtggctcctgttatctccctttcatggacggggaaatgaggcacagtgcagtaaggtaattttctgatggacacaaaggagaggtgttgaaaaaaaagactggggccaggattccaacacagggcttctgattccagaacccccaagcccttatatcatataccatactgcctctgatagcagtcatatccaaccattataccatactgcctctggtagcagtcatacgcaactctttatttttatttatttattttagatagggtctggctctgttgccggaatgcagtggcgcgatcagagctcactgcaagctcgagctcctgggctccagtgatcctcctgccttggcctcccaaagtgctggaactacaggcatgagccaccgcacccagccaatgcaacacttaataaggcctagctgccctgtgatttggtcctacacataatcacacaagtccattaggaataaaactgcactgcatatgggattcatgccaaatgagtagattttagccactcttgccacagagacacaaaaagggttggtggtaactatatgagatgatggatatgttaatatgcttcactatagtaaccttgtgactgcctgtttcagctgtccccaacctttttggcactagggaccggtttcatggaagacaatttttccacggacttggcaggggagtgggtggtatggacttggcaaggggatgggggctatggttttggcatgaaactgttccacctcagatcatcaggcataagattctcatagggagtacacaatttagatccctcctatgggcagttcacagtagggttcgagctcctatgagaatctaatgcgcggttgatctgacaggaggcagagctcaggaaggtcatgggggttccgaacaggccgaggactggttgctggggactggggacccctggtctatatgatatcaacttcatattgtatatcttaaatatccacaatacaagttattttttaaaattttaattgaaaaaggactgggcatggtgactcacacctgtaatcccagcacttttggaggctgagacagaaggatccactgatcccaggagtttgagaccagctcggtcaagatggtgagatcccatctctatttttattaaagagagataaataagagatacaagtccagtggaagaaaaaattgaaagcaatttaaatccctacctcagattctcaagaggtactcaaaggagaacacagacactgtatagtaaatttcctaaaactcttttttcctcttattttaccattttcaatttctcttatatgcctcattcacccaactcccttaaacctcagcatgcttctccaccttctcatctatctaagctttttttgagagataactctctatgttttaaaaaggaattctcaggacgggtgcggtggctcacacctgtaatcccagcactttgagaggccgaggagggcagattacctgaggtcaggagttcgagaccagcctggccaacatggtgaaacccatctctaccaaaaatacaaaaattagccgggcgtggtggtgcatgcctgtaatcccagctacttgggaggctgaggtaggagaatcacttgaacctgggaggcagaggttgcagtgagccaagatggtgccattgcactccagcctgggcaacaagaacaaaactcagtctaaaaaacaaacaaacaaacaaaaaccccaaaaggaattctcactattttttttagcttctgcttcttaaattctccctctcactgagtattaacccatttttttttttttttttgagatggagttttgctcttgttgcccaggctggggtgtaatggcgccgatattggctcactgcaacctccacctcctaggttcaagcaattctcctgcctcagcctcctgagtagctgggattacaggcatgcaccaccacgcctggctaattctgtatttttagtagggatgaggtttctccatgttggtcaggctagtcttgaactcccaacctcaggtgatctgcccaccttggtctcctaaggttctggggttacaggcatgaaccactgcgcctggccagcccaatttcataatatgtccaaagagaatttggaaagggagggagaaataagatgtctgcgaacagaaaagaggttatgaatatttatctattaatatttttctatgtcacatacataacataggaggctcttaaatgttgccataataaagtttttatggatttgaaataaaactggaagagttggaataaagcagtgagtttttcataaaacccaaagtgtttaatttaaagaactgtactttgttctgagagttttgtgcctagatggtagtttttttctaatgcccttatagcacaaggttaaaggaaaaaatcaaacgttccaaccctaatgttgaacttcaaatttaaaaaaactagtctatgatatttgaaagcccaagtacccttgaactaggagaaaaattaaggcaaaatatttttaagacaaaagagattgcaagctataactggtggcttagatagggagctgcagggtgatgaggaaatgtgtactagtttcctagggctgctgtgaaacaataggaatgttttgtttcacagttctgaaggatatataagtctgaaatcaaagtgtcagtagggctgtgatccctgcaaaacctgtaggaaagaatgcttccatgcctctttctagcttctggtggcagctgtcaatccatggcagcccttgacttgtcaatgaatcactccagtctctgactccatcacatcatcacgtggtgttctccctgtgtgtctgtctcttcttttttttttttctttttgagacaaggtctggctctgtcatccaggttggagtgcaatggtgcgatctcagcttgctgcagcctccacctcccaggcttaagtgatcctcccacctcagcttttggagtagctgagattataggtgtgcactaccatgcctggctagtttttaaattttttctagagatgaggttttaccatgtttcccatgctggtcttgaactcctgagctcaagcaatcctcctgcatcagcctcccaaagtgctgggattacagatgtgagccactgcgcccagcctcttctcctcttattataaattcactagttatattggattagggctcatcctgtgatctcatcttaacttgattatatcagcaaggatcccatatccaaataaagtcatattcataggtacagcgggttaaggcttcagcatgtcttttgggggagatacaattcaatctatgacaaagtacataatccaatgggaaagatgttttagtagagcagttttgagtaatctgtccttgagggaggcatctaaaataggtccccatttcacagtaaagtaccttcaatctctgaaacttcaagaatgtagtttggaaacaacaacctaggaggagagtttggagaagagggatggaaaatagcaccctgaagaagccagcattgatggggtaaagacaagaggaggcactcatgaaggaaatagagaataggtagccagagaagttaaaagggaactgggtgagggtgatgtcaaagaagccacaggcaaagagggtttcatagaggcagaagtggtaaggaaagccaaaagccacagagaggtcagggaagaagaggacgaagaagcaactgttggatttgcaaattaggaggttagtagtggcctagaattaaaatgttttcaatggagtgggagggaaagaagccagagagaactgaagcatgagttagaaaatgcggataacatgtgtagtctattctttacagagacttggccatgtaaggaaagaaagaacaatggctggcaaggagagagaggtactgtgtaaattgttattattttggatggtgagacttgtgggcccagaagaaggatccagttgcaaacaaaaggtcggaagagcacaaccagcaatcatttccaaccttctccttgcctgcctctcattattgaggctgggaaggaaaaaaacaaacaaacaaaatacaaacaaataagaactttcccagactactgtacccactctccttcaagatctgctctccttttcttttcagtaacagaatctggactctgagctgggcacatgaccattctaaataaaaactaatttcccaagcttccctcaacttgttgtggcctgtggctaaatattgacctatgggttgtaagcaaaagtaatatatataattccagaatgtgttctagaggagggaagcttcctttctcttactctttcctgctgtctggaatgtagatgtaatggctagaactggagcagccatcttggaccatgagctggaagaagcctaatttcctgagtacttagtgaagtagagcagctccactggaaattacatcccatagggcaagtagatctgttcagaaagagctgggatttggtggatcaaagtcctggaggatcaagaaaagatggatcctgaagtccatgtatacctacatgtataccagggttgaatagatacattaattctctattatagattatataaatattatgtattctatacatgtacaggaatccctctttagccatggtttcacttacccacagtcaatgcagtctgagaatattaaatggaaaattccagaaataagcaatttgtaagttttaaattgtgtaacatcctgagtcacatgatgaagtcttgcgctgtcccgctcttacctgcctgggatgtgaatcatcctttgtccagtgtttccacactgtatgtgccacctgcccattcgtaattgagtagctgtcttagttagaggtatataggatttggtgctatccgtggttttaggcatctctgggggtctttgaatgtatcccccttgggtaagggagcatctgttgtgttatagaaagctctattggacagtgctgctctagactttttaggcatatgttagagaaggtactttcatctctcactacttcctctcctctctgcccactcctccgtatcaaacacccaccagagtcatttacctggactgtttcatttggggttaagatcaagggctttaagacccaataggttgtagctacttaactagttgtatggccttggtcaaattatttatcctctttgaacctcagattctttgtctataaaatgggaataataagagcatctgcttcttagggttagtcaaaggattaaatgagataatatggttccaaagtggcagcaaggaagcaatctggcttcacaccccccaatggaaaacccaaaactaatattcaacactgaaattatcaccagcaatatccgagaactcaaatatgaggatgagacatttgctggggccacagagaagtttaaaaaactctgagcagatggtaagagaatcagacttccatatctgtaatcccctccccacaatctgccaggcaccaactgcatgaaaatttcccccaactcacagtctgtacactgtaaaaagtgagatcaaggcatagacaaccagcttctccacaatcttgggttcccttgcaggagacttgtcccagcctcaaccactagaagcatcagcagtccctagaggagaaatatccctgagaacagccagagacaaaggggagaggtgagactaccatcccagctctggaaactctgctgtgtaacttgacaaaaagagatggagacaccaaatcatagtggctgttcagcagcaccacactgtaggaggttgggtccataggtcccttggacactgaacccctagctagccttcccaaactactgggatatcccccattaaggatgaggggcactgattatttattagaatggaggcaaacgtgggtttcagcaccatctagtgctgaaaatggggcagtgacctagcaaggggggaaaaaaagaaagaaagaaataggtaaatgaaataatacatgtaaagtacaggcagtcttcactttgcatgataacactgttctgtaaacatgatatgcaagccaacacccttcaaagtgatctcaattatcagtgggaaaaattacaattgttttgtgatgtttaaaaacttttgtcaaaatattaaaaactttcttactgttggatataaatatatagagaaatgaaaaaattgtaaacctaatatttctttattatgccataatttaaaacagaaatattgagaattaatgtgttttgcttttttttttttgagacagggtctttgtcacctgagctgaagtacagtggcatgatcacagctcaccacaaccttgacctcccaggctaaagcgatcctcccacctcagccttctgagtagttgggaccataggtacataacaccacacctggctaacttttttattttttgtagagacggggtctccctatgttgctcaggctggtcttgaactcctgagctcaagcctcagccttccaaagtgctgggattacaggtgtgagccaccatgcccagcctcctttctaagttttcctttgtgctttcaatgttgtgagatatctttcagcattcctttaatgtgaattttttgcccatgtcactttctggaacatctttatccttttccttacaacttccttccttatttgtgttcataagtttacctttactaagtctctctggatgcccatctggagttgaacagtggcaatgtcaacattcccatggccaccaatttcttctgtaactccagtgatctttgatttgaacttcactgccacaataatcactttttgtttctttgcttcacttttatctttattggcaaattctatcgtccattttttacaatgttacttggagataaagaggcaacacaactacatgctttgctgtctgtgcataactaaataacagatgtccagtgaccagtcaccagcagactagaaatgaagtgatgtgctgtggtcactgaccatggcgtgcatctgttatttacatagtaattttgtggactgaaaacctggcagcaaagcttgtatttatgcaattacttacagtgaatatactgtggtaactgaaatttgaactgtattattgggggacttgtgttatataactaaacggtgctaattgaaatctgtgctgttaccatgccaagcaaggactgtgctatacttacgcaatgtctgacatgtagttagcatttaataagtagtagattgttttatttctatcattatcatgattttattatatttctacactttctattcctcctcctgagctgcaggccaaaaagtcaaccctagagtgagaatctggtgctggaggtggcagacagtcctgtgttttcagccaagagtgtaaattgcaatgtctttaatctcaattgaggactcaggccaagggccaaaggcttattgccagaggtctgagaagaggttctggggagtgctagcaagtgggcagaactcgatagcagagatcctgggcagggactgttgccaaggtgagggaaacagatggtgtctgagaggtctgtttacagattgcagggctccagccatggatcttggctgaagctatgtccaaagcatagagagggcagctggcaagagcaaggcagggctccaggctagatagaacctaacttaattgccagaacagggaactgggccaaggaagaaaaacagttaccgcatgcgggagagagggaactcaagtgtgagactcaggtgctggagcaattgctgcagttcagggagtagcaggggaaagcaagagcaccgaagctcagggcaacaggaagatgacctgcaactgaaccacaccaggcaaaagagagggaattgaggctgctatggtaattcctgccccatatgtgtgatcttggagcccagccatgggagacaaacgtggcaaagaggcttgtcagcctgacccaatgtggtaattcatgtactactacagaagacttattcctttcctcccaggcaaacttatcagctttaatagattttatctaggaccttatctaaaagttatatactcagtaaaggcagacccagttagcaagaagaaatgatgaacatctgaccttcaactagtaagaaataaacatggaataatagagactaagatacatgttttgttgacaagtgataccacaaatataaaatgcatgtgaaatgcatacatattgcatggggttgcactcaggcatgtaactaaatctaaccaaacttagttgaccacttaagggtttattttcctcacatagcaagattttccatgagtagttagttcagggctgctgtggtgattctctgccatctttagcatatgccaggctgcagaatgacagagtgccagggaccccattcatataatgcaaggatattttccatttacttctacagatctactctccacccttcaacctgttcagtgtcctgagaggctgacctgaatggattatagcacttgagcttcttgccctctgacttctagttggatttggtcaatgggagacactaccaacaggagactgtgaggctggggtaatcagcccctcgtcccttttgtgcagagcaccacaggttggctgtatcccagtgggagggccgctcttgctggccaccctctccatatcctctctccaggtcctggaaaccactctctcttgttgcccttcagagtttggggtggtaataactccctgctattgctagccccagggtactgcatcatctcttaaccatgtttccctgacagtgattacaccttttcaattagtgcctttttaaaaagtctccaccattaccctattggagggagctgtctgtatcctgccaggaccctgactgattcaactctatagtcactgtgcacaaccagtgtggccatatgcagcagcacagtgcaggcctcttatccccatggctgcaaggtggctacttcacacgcaagcttcaaggttggattttaaacaggaagaaagggcaaaagacaccaaagagctctttgccaggaaaacactagctttcaaggaagtactagacagcagatgtctgctcacgtgccactctagctgcaggacatccaaggaggagaatcttttcaaataggcattttgctgtccatatgaaatcgtgtttctattagaagggaggaagcagagcaatgaacatggggaggcaggtatccaaaggaaataaaatcagtatttcaatggggaggcagatatctctttgaaatactgattttatttcctttggatatctgcctccccatgttcattgcagcattatttatcatagtcaagatatggaatcaacttaagtatccattgatgggtgaatggataaatatattgtggtacatatatgcaatagaatattattcagccatataaaggaaatcctgctatttttgacaacgtggatgaaacttgagggcattatgctaagtgaaataagccagatacagaaaaacaaatacatacaattttacttatatttgtaatctaagaaagtcaaactcatagaagcagggagtaggtggaatggtggttgctagggtgaggggatggggaaaatggggagatgttagtcaaacagtataaactttcagttatcagatgagcaaattctggggatctagtgtagaaaatgggtggtgttggatgtgttaattaatttgattttggtaatcattacacagtgtacatgcatatcaagtcaacaccgtacatcttgaatgtattcagtctttctcagttaaatatttaaatttaaaattaaatattcaattatatattattcaataaaatcaattacatgttatagttcaatttcaattaaatattactttttttttttgagacggagtcttgctctgttgcccaggctggagtgcagtggcgcaatctcagctcactgcaaactccgcctcccgggttcaagccattctcctgcctcagcctcccgagtagttgggactacaggcgcctgccactgtgcccagctaattttttatatttttagtagagacagggtttcactgtgttagccaggatggtcttgatctcctgacctcgtgatccacccaccttggcctcccaaagtgctgggattacaggtgtgagccaccgcgcccggctaaatattacttttgtttaaaaacaacagcaataataacttccatttcttgagtccttattgagtgccttacatgcatgatgtcttttaacccacacaagagtcctattagtagtccccacttaacagatgaggaaactggaggtaagacctgtgctcacactaggtatgtctgtctccaaaggccactctggtgtcatgcatatcctctgtttcttttctcatttcttccccagggaaaatctgtgcatacagtgtggacatctaagtcatacataacaagcctatcgcatccttggagcatggcacagcaggaataaaggagaaagaagctggaatcagacagtgggggtcagggagaagatctataacattctgctaggtggatgagagattcaaaggagatgacatgatctgtgaaggaaattgcactgggcaggtgtcagctcaggctgctgtccacatgatgcctgggacatgtctgagggactagcctgctgcaagttaacagcacataattctggaagggcggtgggaaaccctgagccagaagtggttcttattttcgctcatgtgtgtgcagtgagtatttagagcataggatattgtgctgcccctgaaccttatgacttcccagaggtgaccaacgttttagctaaaaacatttagctaaatgtttgaatggaattgtgctttaaaataaggtacaacttgctgagcatggtggtgcatgactacagtcccagctactcgggaggctgaggagaaaggcccaggaattcaagtccagcctgggcaacatagcaagacacgtctctacataataataataataattaatacataaaataaggtacaagatgctgggggtaaagagagaagaggaggggcatcatgtcaagcctctccaggagaaaggacacacctgctggattgtgtgagggatttagaataggggcatataagggaacacagggcagtcaataattctacacaggcagcaaatttgatgctgaaggatgaccaatgtggatgccatgccacttaacgctactgttgcagccgcagatcctagtatttgaaatatgcctcaagaaggaaacacttaagaagtgctgaataagaattccaatcctggcttcatcgctaacttgctttgggaacttgggctttaatttgctcaaagcctcagtttgctcatctgtaaattggggcaaataacatctgttcaacttacctaccagaaatgttgtgtggctaaaaagaaatagaagatatgaaaatgctttggctatattcaaagttctatatacatggaagatattcaggatcctcccaccttcaaagttcatatctaagaaaacccctactaaatcctttagaatggaactgctcaatatagtagccactagccacattgactactgagtacttaaatgtgactagtgcaactgaggaactgaatttttaattttatttaactgtaactaattttaattgaaaaactgatactctattcaattactggaaaacttttaagtacatttggaccaacctggactcgtgaatttacttttgttcccagtgtttttttctatttttttattgataacataatagatatacatattttgagtgtgtattcaaacatttaatattaatacattcatataatttgtaaagatcaaatcagtgtaactgggatatccattaccttaaatgaatctactttttaaatggtatttataaaatctaaatatatgtgaagtgtttctgcttaaatttagtgtttgaattgagatgtgctccaagtgtacaacacacaccaaatttcaaagacttagttaaaaaaaaaacactgggaagggcaggaggaagggagagatagggagagatttgttaaaggatataaaattatagctagataggaggaataggttctagtgtagtatggccatagttaacaataatatatagcttcaaagagctagaaggaggatattgaatgtttccaacataagcatcaatatttgagattatagatatgctaattacagtgttctgatcactatacattgtatattgaaacatcaatatgtaccccatgaatatgtacaattattacatgaatatgtatcaaaacaaattaaatttaaagacaaaacaaagaacataaaacatcttcttaataatgttttatattatgtgttgaaatgataacatcttgtatatattgggtaaagtaaaatatatcattaagataaattttacctctttgtacttttttcttaatgtggctactagaaaattttaaattatagccaggtgtagtgatgtgcacctgtaatctcagctactcaggaggctgagacgggaggatcgcctgaaccttgaagttcacggctgcagtgagctgtgatcacgccactgcactccagcctgagtaacagagcaagaccctgtctctttaaaaaaaaaaaaaagtaaaattggccggatgaggtggctcacgcctgtaatcccagcactttgggaggctgaggcggcggatcacctgaggtcaggtgtttgagaccagcctggccaacatggcgaaaccccatctctactaaaaatacaaaaattagctgggtgtagtggtgggcgcctgtaatcccagctactcgggaggctgaggcaggagaatcatttgaaccggggaggcggaggttgcagtgagccgagatctcatcactgcactctagcctgggagacagagggagactccgtctcaaaaaaaaaaaaaagtaaaattacagggtggcttgcattttatttctgttggagagcaccactttagaaagagacagtgagcagggagatccttatatccttataggaaataggaagaggagccattgcagaaataaattctgtgatcccagacaaagtgctggcaccatctcccgggtttgagaacacaccgcagagatacagaacagcgcagattgctgttgaggtcagctcccagctccctgcctcattcctctctgattcctcttttgttcaggcacaaaaacactccatcctgaaacttttgtcattattgccttggtagaagaagaccacagttgttacctgggttttgatttggggacaacagcatttcaatgactaggagatttcaggagaagctagtggccatgaagattctcaaaatcagcatgaactttatttttcactggtgttctttcaaagtttgccttcgactcaacgtgtggtagaaattcaccctgaaagcatttgctcttctctggttttgtgtcttttcctccagaacagcgttgttttttgcatgttttgcacttagccagaggaagtctggcgcatccgagccggccagccgagcacatctggaagtggtttctggggccgcccctctctgccagcgcaactcctgggttcccagcggcttcgcgcagaggtggaagaaacccgagacgttccgaagtcaacgcaagcaaaggggagtgcgggtcggggaggaatattcttttggaaacgtaatattggccttggggctctccagccctttgggacttccaatgggatcttagaagcagccgaagcagcgtgagggcggcagcccagggccagccacgatttgaacgctctgccttgcagctcttctggaccgaggagcccaaagccctaccctcaccattcaccaggtaaatagagaaatttacgagcagtgtgcagtcgttccgttttatcctggccggtctgcagcagttctttattctgctacagacccaagaaagtaaatcagaggtgtcagattgccccacacaaactttgccttcagaaacttcccagtccgaactggtagcattccagcggaacccttttcggccatttccagcaaatccagtgtgcaatgtttttcacatcctgggctgcttttccagacctgggtttctcctccttctctccacaaatatgataatttactatttgtatcagattttaaacataaaaatcagcagttaggatgtggatgaatgctattatttaatgaaggtatgtcctgagccacaaattatttaactgagcatgattcatgttttcagaatctgccttaggaagctgttctgaggatctccatccccccagaaagaactggccgttgtggaaacccaagtgaggcttattgtaaatacagtagtcgtggtgtttgggttgaaaatgctttttaaacattaaaaaagatcttatgtttactttataagcaagtgtcacacattggacaagcctggtatataatttatgaaataagaaggatagttaacatgagagtaaaaaaaaaaaaacctgagagagagtgagagaaagaaaacatgatgatatctgaatgtctggatgtgctttgaaaaaaaaaatcagtcctctcgttgtttggcccctgtgcagccaaatatccaaagtgatattggttggtttttgtcttttccttttcctccaaatgttctggtgtggcacttctgtgtaatatcctttctatattacataatggaattccagttctccctttaatgcacttggaagtagactgtgcaatgcagtggtaagaacataggctctggggtcaggcttacaggactgaatctacatgctgccacttacacaccttctaagctcgactccgggtgaattgtttaactgcatgcaccctagttcctcatctgtaaaatggaaattacatgacctaatgtctatagaggacataatacaggacctgcaaagtagttaggcctcaggaaaggttagcttctctgatggtgctgatgatggcagtggtgacaaaagtgatcatgcatcctgtttttggcaacacctctgcttttgaccatggttccctctgacagtccagtggtccaagtgttcctcataccctaatatgtcatctctccagcactttgctttcttcctttcttccttcagacacctctctttcttttatttcccattctgtctttcattatttcttctttgtgcttcctctttccttgctgagaaaatgtgaggttcattaaggcacagccctcatagttttcatttctagttcccgaggaaaatgattctaaatcctttttaatttcagcattttccaaagaaagttctgagaaaacatagtcccatgggaaactctgtgaactatattaccctcttagagatcgcaaggcataatagcattttaaaggtcctgagaagtcctgtagtagagaaatcctcttaaggttgtttaacgcaatgattcccaaacagttgatcgctgaaccaccttatcacataatgtaggttaacatttctaggagcacactctgcggtgtgctattctggacacacttgttttcattttggttcctcttttggacatcctattctccaccttccctggagctcatccaaggggatgccttgtttttccttctcaagttaaggacataagattatcatgtgtgttgtactggtatatagaaaatctggcctaaattggagatcagaagtcagcaaactttttctgcaacgggcctgataataagccatatggtttctgttgcaactgttcaactctgctgttgcagtattaaaacagcagagaaacaaaaaataagcatggctacgttctaacaaaactttatttacaaaaactagtgtcaggcaggatttgaccaggggtcatagtttgctgacccctactctaaaggctttttgtgaaagaatttctcatgctagcacaggagaaagcaagacaaattctctataaactgaagactctcttgtcctgcacccctagtgctatggtctgaaggtttgtgtccccccaaaattcatatgttgaaactctaacccccaaggtgatgctactagaaagtggggccttttgggaggtggttgggtcatgagggcagcaccatcaccaatgggattagtgcccttgtaaaataggcctaagaggctgggcacagcggctcacacctgtaatcccagcactttgggaggctgaggcaggtggatcacttgaggtcgggagtttgagaccagactgaccaacatggagaaaccccgtccctactgaaaatacaaaaaattagccaggcgtggtggtgcatgcctgtaatcccagctatttggaaggctgagataggagaatcacttgaacccaggaggtggaggttgtggtgagctgagattgcaccattgcactccagcctgggcaacgagagcgaaactccatctcaaaaaaaaaaaaaaaaggcctaagagagctggttcaccccttccaccatggaggacacagctagaacgtgctatctatgagccagaaagtaggcccccaccaggcactgaatctgccagcaccttgatcttgggcttctcagcttccagaactataagaaataaagttttgttgtttagaagccacccagttcaggctggcatggtggctcatgcctgtaatcacagcactttgggagggtaaggtgggaggatctcttgaggcccagagttctaaaccagactaggcaacatagcaagactctgtctctacaaaaaaaatttttaattagctggatgtggtggtggtgcatgcctattgtcccagctatttgggagactgaggtgagaggacagcttgagcccaggaattcgaggctatagtaagctacgatcatgccaccacactccagcctaggtgatagagtaagaccctgtcaaaaaaaaaaatggagtaagacacctgttctatgtatcttggtgaatcttgagtaaacctttcattatagcaaaaagttaaaaggcaagagatattttgttagaggacagactcctgagtcctgatcttgtcctttctctttcctttagtgaattcttactcttgtcctgttaatgactttgtagcttgcatagcttaaaatgaagtgctctgttaaatgtgtctatgcatttgagaacttcagggtgcaagtcttgcagagttaactcacagagcttatgtcagttgcttgacacagtgatagcaaccatagcgatggaaagtggttggctgtagtaactatcaaggtggttaagaatgtgaactcagagccaggatgcctgcgtgtaaatattagctctgccacttattagttgtgtgacccttagcagacctcttaattctctgagcctcagttttctcacctgtgtattggaataataactttaaggagttgttgtgataatccgtgaatgaatatttgtaaaagtcgtagaacaatgcctagcacatagaattgctacgtaagtgttaaaataataatagttaatacttatgtagcaatagctttgtaatatgcagaactatcccgttttacacatagggttttgtaagtcaccccatgattacacagctaattaggattcacagtcagctctgtctaaggataaagcccatatttccactaacctacacagctctcatatttaagtcattcaacagtacttttaggaaccccctcttttatcttgctttttgattcccagtcatttcctattactccctaccatactataaccatggcagacatgattaatcaatcactttctttctttctttctttcttattttctttctttctttctttttctttctttctttctttctttctttctttctttctttctttcttatctttcttttcttttcttttttaactgaatctagtgatggcttcagatttcttctcaatctagcaatcccaacagcccataccatagccaatcagagctggcatgtaaaatgaaacacaggggcactgatttttggagtatttttctgaagagcctttcccactttgctttttgttccaaggcagagcaaattcccttagccactgccaggtctcaaaacattctttccaggtttggccacatgcctaaactctttggcatctggtaaaatggctccccatgcaaggtcttcaggggcttatttttaaacttacaggcctcttctcatgcccagaacaactctctgtactctccttttcttcctactcacaggccctagaacctcaaccttcttttctcccctctttgaagatgctactgcccagtgccttgcctgccctgcagtggctcccagctccacctctctgtctgtcctgaagacaggcctgcaggcaatttcttgttaaaggcttggctatttattaccacagagaaaccacacacacggaagtcactagggctaggaaagctcacagaggtgtaaggggcacagttctggggctctttgttgtgacagtagcaggaaggctgatgagatgaccagagccctctgcttttattcctggagtgggatcatcagcagttcccctccttctggctgagtcctttctttctggggctgaagagcagagcaacaagagcctctcgccttttctttctctctcctgattctcattgattcaacacacatttattgagttcccaccttggggcaggacaggcagatggaagtgaggaagccacagtcgctgtcctcagtggtctgtctggtccttcttttaaagatagatatgctgaaatatttagggggagaagtgtcatgatgtttacaacttccaaaaatatatatgtacatatgaagttcaattaagtaaatatgtcaacatgttagcaactggtggatctggtgaaaggtatatgagtatttattcttcagacttttcagcggtcttgaaatgtttcaagcgaaaaaaagaaaaaggaaatcaaacaaaaaattaaggctactcaagctgcatttgtgtttcaaatgaacttgatatgattatcgaacaacaaaaaagttactatggccgttaggccagtgatggattgaggaagggcagtgtacagaaattctaaaggcaggaaggccaggtgggaggttattgcagaggtgtaattagtaggactcggtgattgaaggaggaattaggagggagaagttgaagaggaatctgagaaccccagagaaggagtttctgtaggggaggtgctaatttcagttgtgaatgtaggggctttgagatacttgtgcagcaccctgaggagacagttgcacattcatccctttggtccataaatgttttctgagggcttatattgccaggcacttgtctagatgctgggtgtatggcaatgaatgaaacaaaatttcctgccttcatggggcttatagtctgtcatttggatggcagccagtacaccggtgatgacgaggcagtctgttggaagatggtaattgctgaggggatgcaatttgtgcattgttggggttagaggcttttgactaagagactgagagacatgagggggcaagccatgtagatatctgggaagaggattccaggcagcaggaatagcacgtggccaaggctctgaggcaggaggctgtctggcaaggaggccggtgtgatcacgcgataccttatggaaggatgctgtaatgactttggtttttgctctgagagagacaggaaggccttggaaggttttgaacagagcacagcacaatgcgactcctattttcacaggttcattctggctgctttgttgaaaatcagctgaagggagacaaaggcagaataatatagtcaaaggctaatgtgccagggtggagccacagaaggtggtaaaaattctggatctattttgaaagtggaactgacaagatttgctgtcagtgcacatgggaataaggaacagagaggggttaaggaaacaccaagctgatttttttgtggagcaatttaaaaaacggagtcacagccgggcacagtggctcacacctgtaatcccagcactttgggagaccaaggtgagtggatcacctgaggtcaggagttcaagaacagcctggccagcatggcgaaactgcctctctactaaaaatacaaaaactagctgggcgtggtggtgcacacatgtaatcccagctactagggaggctgaggcaggagaattgctctaacccaggaggcggaggttgcagtgagccaagattgtgccactgcattccagcttgagagacagaacaaaactccatctcaaaaataaaaataaaaactaaatggagtcacccgaactgatttggggaagattatgggaagggcatgtttcgggggaaataccagaagctcagttttggacacgtggattactataagtgcagatgccaaatggcatctggagtctggaatccatgtgagatggctggcctggagatagaaatttgggagttttcagcatataaattatatttaaagccatgagtcaggatgaagtctcctaaggagggagtttagagaaagaagagaagaaatcgctaaggtgttccaacatttagatattcaggaggtaggagcaaccagtgaaagagactgagaatgagccatcagaaaggtggaggaaaagcaggtgagccgagtcccccgggccacgtgcaggaagcatgtaaggaggagagagcgggcacatagtctgcatctcacgcacccatgcctcaaccctagtgaggaacaagtcctgtggtgcagttctttgcatgccgggaccttgttagccagaagatgttctctcagactctgccccattccagtttctcttggttccagatctctgccttttactctacctcaagcttgtccaacccgtagcccacaggccacaggcagtgctggacagctttggatgcagcccaacacaaattcatcaactttcttaaaacataatgagatttttgtgtgtgtgtgattttttttgtttagctcatcagctatgtttcatgttagtgtattttatgtgtggcccaagacaattcttctttcagtgtggtccagggaagccagaagataggacaccccaccctacacattcttaagctgtccagcatcacttccttggttctccagttctctatccctgacttcctatcagttttctacctctttataactctgatccctctcttaattccccacaatcagcttatccccaggacttcagttctgcaaaaatttcttgagaacctacttaatctactggaatgtctttgacttcaaataccagaaacactgatttacggcagcttaaacacatgggttgattctgtcacataagaagtttggaggaggtaggtattgatggcattgattcagcagttcgatgacataagagctgaccattctgtgtagctcttgacctctccctcatggtctcaaggtggctgcctagctccagccattatggccccatgcaaggcaggaggaagggggagttgacacttcatccagaaaggaaaagctttctcagatattcccagtagatttccacttaagtctctgtgcatcagatctatattatgtggctactactagctgcaaagaaggctggtaaaatctttatttggattttcctctctctcatatggaaacaggcaaaggagaaaaggatgggaagagctgttggatcagccagctatcaaggctgccacactaccaagtgccaaatgcttgccatgaactggaaatacagaaatgattaacgtagtacccgtcctgtccctggagcttgcgttctagtaaggaaacataagaatgaacggagtatcttggtttggtttggtggagaccaggagccttccctgacccccatgatctggtcaggtgcccctccttgatgctaaaacaatatcccatgcttacatctaccaaggcatctaagcacactgtattgccattatatatttactggtgtcttcccctcccttcccccaaatgtggactaactggggacttatctttgaatctctagtgcctgggtgcctggtatattcgtagaggttgagtaaatgtttgttgaatgaatcaaagaaatgtcaagggaaccccctaattaccttcttgtcctgggttgggcccttatcccatcttagctttgttgttgttgctgttgttgttgagaaagagccttgctttgtcacccaggctggagtgcagtggtgcgatctgtgtttactgcaacctccgcctccctggttcaagcaattcccctgtctcagcctcccaaggagctgggatcacaggtgcgtgccaccacatccaactaattttttcttttttgagacagagtctctttctgtcgcccaggctggagtgcaatggtgcgatcttggccgactgcaacctctgtctcgcaggttcaagcgattctcctacctcagcctcctgactagctgggattacaggcgcctgtcaccacgcccagctaatttttgtatttttagtagagacagcgttttaccatgttggccaggctggtctcgaactcctgaccccagatgatccacccacctcagcctcccaaagtgctgggattacaggggtgagccaccacgcctggccccacacccagctaatttttgtatttttagtagagacggggtttcaccatgttggccaggctggtctcgaactcctgacctcaagtgatctgcccacctaggcctcccaaggtgctgggattacaggcgtgagccaccgtgcccagccccttagcatttttagctagttaactcatatttacattctaatagcaaaatctctaacaccttgccagaaaacagtgctgactccccaatcacttttgtaatgttaaaaataaatttatttattctcacattcagtagaactctgaacttacaaatttacacccagtaaagtcacaacacagcatctaaaaagctaaaagtacctatatactcgagtctcatagtacttagaaaatgggatgcttaatttttcaatttgttaggctgggcgtggtggctcacgcctgtaatcccagcactttgggaggctgaggcgggtggatcacgaggtcaggagttcaagaccagcctggccaagatgctgaaaccccatctctactaaatatgcaaaaattagttgggcatggtggcacgcgtctgtaatcccagctactttggaggctgaggcaggagaatcgcgtaaacccgggtgccagaggttacagtgagccaagatcaagcgactgcactccagcctgggcgacagaacaagacttcgtcccaaaagaaaaaaaacatttttttttcaatttgttgttttttatttcaaagagatgtatagttaatctgactcatttgaataacagtgagtgaattgcagatactgttatcaaagatagcaattctacaggcataaataatttttttattattatactttaagttctagggtacatgtgcacaacgtgcaggtttgttacataggtatacatgggccatgttagtttgctgcacccattaacttgtcatttacattagctatttctcttaatgctatccctccccctgctcccaccccatgacaggccctggtgtctgatgttccctgtcctatgtcctagtgttcttattgtttaattcccacccatgagtgagagaacatgcagtgtttggttttctgtccttgtgatagtttgctcagaatgatgatttccagcttcatccatgtccctgcaaaggatgtgagctcaccttttttatggctgcatagtattccatggtgtatatgtgccacattttcttaattcagtctatcattgatggacatttgggttggttccaagtctttgctattgtgaatagtgcagcaataaacatacgtgtgcatgtgtctttaaagcagcatgatttataatcctttgggtatatacccagtaataggatggctgggtcaaatggtatttctagttctagatccttgaggcatcaccacactgtcttccacaatggttgaaccagtttacactcccaccaacagtgttaaagcattcctatttctccacatcctctccagcatctgttgtttcctgactttttaatgatcgccattctaactggtgtgagatggtatctcattgtggttttgatttgcatttctctgatggccagtgacgatgagcattttttcatgtgtctgttggctgcataaatgtcttcttttgagaagtgtctgttcatatccttcgcccactttttgatggggttgtttgtttttttcttgtaaatttgtttaagttctttgtagattctggatatcagccctttgtcagatgggtagattgcaaaaattttctcccattgtgtaggttgcctattcactctgatggtagtttcttttgctgtgcagaagctctttagtttaattagatcccatttgtgtattttggcttttgttgccattgcttttggtgtttcagacatgaagtccttgcccatgcctatgtcctgaatggtattgcctaggttttcttctagagtttttatggttttaggtctaacatttaagtctttaatccatcttgaattaatttttgtataaggtgtaaggaagggatccagtttcagctttctatgtatggctagccagttttcccatcaccatttaataaatagggaatcctttccctatttcttgtttttgtcagatttgtcaaatatcagattattgtagatgtgtggtgatatttctgaggcctctgttctgttgcattggtctgtatctctgttttggcatcagtaccatgctattttggttactgtagccttttagtatagtttgaagtcaggtagcgtgatgcctccagctttgttcttttggcttaggattgtcttggcgatgtgggctcttttttgattcatatgaactttaaagtatttttttccaattctgtgaagaaagtcattggtagcttgatggggatggcattgaatctataagttaccttgggcagtatggccattttcacgatattaattcttcctattcacgaacatggaatgttcttccatttgtttgtgtcctcttttatttcgttgagcagtggtttgtagttctccttgaagagatccttcacatcccttgtaagttggattcctaggtattttattctctttgaagcaattgtgaatgggagttcactcatgatttggctctctgtttgtctgttattggtgtataggaatgcttgtgatttttgcacattgattttgtatcctgagactttgctgaagttgcttatcagcttaaggagattatgggctgagacgatggggttttctaaatgcacaatcatgtcatctgcaaacagggacagtttgacttcctcttttcctaaatgaataccctttatttctttctcctgcctgattgccctggccagaacttccaacactatgttgaataggagtggtgagagagggcatccctgtcttgtgccagttttcaaagggaatgctttcagtttttgcccattcagtatgatattggctgtgggtttgtcataaatagctcttattattttgagacacgttccatcagtacctagtttattgagagtttttagcatgaaaggctgttgaattttgtggaaggccttttctgcatctattgaaataatcatgtggtttttgttgttggttctgtttatgtgatggattacgtttattgatttgcatgtgttgaaccagccttgtatcccagggatgaggccaacttgatcgtggtggataagctttttgatgtgctgctggattcagtttgccagtattttattgaggatttcgcactgatgttcataagggatattggtctaaaattctctttttgtgctgtgtctctgccagactttggtatcaggatgatgctggcctcataaaatgagttagggaggattccctcttcctctattgattggaatagtttcagaaggaatggtaccagctcctttttgtacttctggtagaatttggctgtgaatccatctggtcctggacattttttggttggtagactattaattattgcctcaatttcagagcctgttattggtctattcagagattcaacttcttcctggtatagtcttgggagggtgtatgcatccaggaatttatccatttcttctatattttctagtttatttgcatagaggtgttcatagtattctctgatggtactatcggtggtgatatctcctttgtcattttttattgcgtctgtttgattcttctcccttttcttctttattattcttgctagcagtctattttgttgaccttttcaaaaaaccagctcctggattcattgattttttgaagggttttttgtgtctctatctccttcagttctgctctgatcttagttatttcttgccttctgttagcttttgaatgtgtttgctcttgcttctctagttattttaattgtgatgttagggtgtcgattttagatctttcctgttttctcttgtgggcatttagtgctataaatttccctctacacactgctttaaatgtgtcccagagattctggtatgttgtgtctttgttctcattggtttcaaagaacatctttatttctgccttcatttcgctatttacccagtagtccttcaggagcaggttgttcggtttccatgtagttgtgcggttttgagtgagtttcttaatcctgagttctaatttgattgcaatgtggtctgagagacagtttgttgtgatttctgttcttttacatttgctgaagagtgttttacttccaactctgtggtcagttttggaataagtgcagtgtggtgctgagaaaaatgtatattctgttgatttgtggtggagagttctgtagatgtctattgaggtccacttggtgcagagctgagctcaagtcttggatattcttgttaaccttctgtctcattgatttgtctaatattgacagtggggtgttaaagtctcccattattattgtgtgggagtctaagtctctttgtaggtctctaaggacttgctttatgaatctgggtgctcctgtattgggtgcatatatacttaggaaagttagctcttcttgttgaattgatccctttaccatgacgtaatggccttctttgtctgttttgatctttgttggtttaaaatctgttttatccgagactaggattgcagcccctgctttttttttgctttccatttgcttggtagatcttcctccatccctttattttgagcctgtatgtgtctctgcacatgagatgggtctcctgaatacagcacactgatgggtcttgactctttatccaatttgccagtctgtgtcttttaattgggacatatagtccatttacatttaaggttaatattgttatgtgtgaatttgatcctgtcattatgatgttagttggttattttgcccattagttgatgcagtgttttcctagcatcgatggtctttacaatttggcatgtttttgcagtggttgatactggtttttcctttccatgtttagtgctcccttcaggagctcttgtaaggcaagcctggtggtgacaaaatctctcagcatctgcttgtctgtaaaggattttatttctccttcacttagtttggctggatatgaaattcttggttgaaaattcttttctttaagaatgttgaatattgccccccactctcttctagcttgtagagtttctgctgagagatctgctgttagtctgatgggcttccctttgtgggtaacctgacctttctttgtggctgcccttaacattttttccttcatttcaaccttggtgaatctgacaattatatatcttggggttgctcctctcgaggaatatctttgcggtgctctctgtatttcctgaatttgaatgttggcctgccttgctaggttggggaagttctcctggataatatcctgaagagtgttttccaacttgattctattctccccgtcactttcaggtacaccaatcaaatgtagatttggtcttttcacatagtcccatatttcttgtaggttttgttcatttctttttactcttttttcttttaacttctcttctcactttatttcattaatttgatctccaattgctgataccctttcttccacctgatcgaattggctattgaagcttgtgcatgcatcacatagttctcgtgccatggttttcagctccatcaggtcatttaaggtcctctgtacactgtttgttctagtttgccatttgtataatcttttttcaaggtttttagcttccttataatgggttcaaacatcctcctgtagcttggagaagtttgttattaccaaccttctgaagcctacttctgtcagctcgtcaaagtcattctccgtccagctttgttccattgctggcgaggagctgtgatcctttggaggagaagaggcgctctggtttttagaattttcagcttttctgctctggtttctccccatctttgtgattttatctacctttggtctttgatgttggtgacctacaactgagattttggtgtggatgtcctttttgttggtgttgatgctattctttattgtttgttagttttccttctaacagtcaggtcccttagctgtaggtctgttggagtttgctggaggtccactccagaccctgtttgcctcggtatcaccagcggaggctgcagaacagcaaatattgcagaacagcaaatattgctgcctgatccttcctctggaagcttcgtcccagaggggcacccacctgtatgatgtatcagttggcccctactgggaggtgtctcccagttaggctacatgggggtcagggacccactgagggaagcagtctgtctgttctcagagctcaaacaccatgctgggagaaccactgctctcttcagagctgtcagacagggatgtttaagtctgcagaagtttctgctgccttttgttcagctatgccctgcccccagaagtggagtctacagaggcagctggctttgcggagctgtggtgggctctgcccagttcaagcttccccacccactttgtttacccactcaaacctcagcaatggtggacgcccttccacctgccaggctgctgcctcgcaggtcgatctcagactgctgcgctagcagtgagcaaggctccatgggcatgggccccaccaagccatgcacaggatgtaatctcctggtgtgctgtttgctaagaccactggaaaagtgcagtatttgggtgggagtgtcccgtttttccaggtaaagtctgtcacagcttcccttggctaggaaagggaaatcccccgaccctttgggcttctcaggtgaggcaatgccctgccctgcttcggctcaccctctgtgggctgcacccactgtccaaccagtcccaatgagatgaacgaggtacctcagttggaaatgcagaaatcacccatcttctgcatcaatcacgctgggagctgcagaccagagctgttcctattcagccatcttggaatggaatccaggcatacataatttttaaggaagtaagcatgttcttgtaaatattgtctgaataattaaaatgacataaagttattgataagaacattttatcaaatattagttctcaaataagagttttttgtttgctttcttcagctttattgaggtataattaacaaataaaaaatgtatatattcagccaaccctggtagctcaagcctgtaatctcagtgctttgggagaccaaggtgggaggattgatagaacccaggagctcaaggttacaatgagctatgattgcactactacactccagcctgggtgacaatcctgtctctgaaaaaaaatatatacatatatatatatatatatacacacacacacacatatatacacacacacacacatatatatatattttcaaggagtacaatgttttaatatacacattgtgaaatgattaccacaatcaagctaattaacaaatccatcaccctcacgtagttgccttttgcgtatgtgcagtgagaactcttaagatctaccctcttagtagatttcaagtatacaatacattattagtaataacagtcaccatgctgtgcattaggtctccagaacttgctcatcttataacggcaagcttgtaccctttgaccgacatttccccatttccccacctctctgtccctggtaaccacccttctactctctgtttctgtaagttcaactttgtagatttctcatataagtgaacatgctgtattcatttttctttacctggcttatttcacttagcataatgtcctccaggctcacccatattgtcacaaatggcatgattttcttcttttctaaggtgaaataatattttattttgtgcatatatatgtctacatacacacacatactcatatatataccacatttctttatccactcatccatttatggacacaggttaattccatatcttggctattctgaatagtgctgcgggctgggtgcggtggctcacacctgtaatcccagcactttgggaggctgaggtgggcagatcacctgaggtcaggagttggagaccagcctggccaacatggtgaaaccctgtctctactaaaaatatacaaaaattagccgggcatggtgatgtgcacctgtatttctagctacttgggaggctgaggcaggagaatcgcttgaaccccggaagcggaggttgcagtgagccaagattgtgccactgcattccagcccaggtgacgatataacgaatcactgtctcaaaaaaaaaaaaaaatagtgctgcaatgaacctgagagtgtagatctagctttgatactgattttctttcctttggatatataccctaaagtaggatagctgcatcatatggtagctctattttgaattttttgagagacctccatattgttttccataatggctgttccaaattacattcccactagcaatgtacaagggttcccttttctctgcatcatcaccaacacttgttatcttttgactttttgataatagccattctaacagatgtgaagtgatatcctattgtggtttggatttgaatatccctgattattagtgatgtttagtatcttttcatatacctcttggccatttgtgtgctttctttagagaaatgtctattctggtcctttgcctatttttttttttttttttttttttttgctattgcacatcactcctttattatactgatatggaaaaaggatttagtacagttatgctcagatgaacactggacccatgtggcagggtcaagcaactagaacatgattcagaaatcagtgaaagatacacttggacaggaccaagaggcatttcactgccatgaaacaaggcaggaagggattctaatacacaaaccaggaagcactcctgcccctcagaggtcaaggagctgatcctatattggtatgaggaatggcttattttctgatgaccacatgtgggactatttcaaccgccacaagaaaccccagaagggttattgttttgtattatttatatatactatacttttttaataaaagtaaattaacacataacgaaattcaggattgatcccaacctagagccagatcctctggggtcagggaggaaacagttgtcacatcaccacgcaggttacattcgtcttccactggaatgactagagcccccaggcagtaggcagtgacctgactgcagaagagcagaggacagactccgctcatggggacagacaggctctgttgcttctcctcactggtcatggcttagcatggttcctccccaaagtccttagtaaacaaagcactcgcaaaaacccaagtcactacttttaaactctgttggataaggggagcttttccatagcttagactgagaacctgtgctctagaactgctattctgactagattgtatgaagggagtgggtgcaggcgacaaaatggctaaaatgaaaatgggagccactggtccccatctgcagctacaactcaagatgtctacagatgtggtcagtgtgacatgtgcaggtgggaggggcagagggacaagatgggcagggagggtgctcctggggacagtatcttccccgccggccttcacttcttggccttgccctgggcagccacagcttccatggctttgcgcaccgtctcctcatcccccagaaactgcatgggcttgataggcttcaagttcttgtccaattcatagacaatgggaataccagtcggcaggttcagctccatgatagcctcttcagagagaccctccagatgcttgacaatgccccggaggctgttgccatgggctgcaatcagtacacgtttcccctccttgatctggggaactatttcttcattccagaagggcagagctctggcaatagtatccttcagactctcacaggagggtagctgatcttctgtgaggtctgcatacctgcgatccttactgatgttgctgtagaaaggatggtcgggctccatcggaggtggtgggacatcataggagcgcctccagatcttcacctgggcctcacaatgctttgcagcagtttctgctttattgagaccggttagacccccatagtgccgctcattgaggcgccaagtcctcaccactggcagccacatctgatcaatggcatctagcactgtccagagggtccggatcgctctcttctgcactgaggtgaagcagatgtcaaactcatagccagcatctcgtagcgcctgcccgccgcgcttcgcctcctcgtggcccgccgggctcaggtcggcgtcgtaccagccgctgaagcggttctccaggttccatgcgctctcgccgtgccggatcagcaccagtttgtaggcggccatggcggcgggctggggatgcggcaccgactgggattagcagattccggagtcctttgcctatttttaaatcaagttatttgtttttttgctattgagttgtatgagtttcttatatattttggatattaacttcttatcaggtatatggtttgtaaataatcgctcccattccacaggttgcttttttattttattgattgctcctttgcagtgcagaaactttttagtttgatgtagtcccacttgtttgtttttgtttttgttaactgtgcttttggtgtcatattcaaaaaatcattgccaagaccaatgccacagagctttccccctgttttcttctagttttacagtttcacatcttacacatttaattatgttattattaaattaataaataataaaaatgaataattacttatttaatatgtaattcattttgagctggttttgtgtatgataaagatccaatttttttgttgttaatatccagttttcccagcaccacttactaaagagactatcctttccccattgtgtattctttgtgccttatggaagaatagttgaccatatatgcgtggatttatttctgggccctctattctgtcccattggtctatgttccattgatctatgtgtctgtttttatgtcagtaccatactttttggattactataactttgtaaatataatttaaaattaggaaatgtgatgccttcagttttgttcctgctcaaaattgcttcagttatttgggggcttttgcggttccatatgcattttaggattttttttttctatttttgtgaaaaatgtcattggaattttgaaagggactacattaaatctgtagattgctttgggtgttatagacattttgacaatgttgattctttcaacccccatcacttttttgagggcataactatataaagttctagaatgttagatctaatagaattgtctgcttcagtcataataatgaggaaactgagacggagagagatggagttatttccctagaatcacacgatcataatggcttgtataagtggggttccaactgtttgccaagtactgttgtaagtacttaatgcatgtaaatgtattactgcatttaatcctcataaagccttatattaccttcatttcctcaactttttatttagaaattgttttaatttatagaaaagttgcaagaagagtataatggctcaaccaatttagccacattagcattgtctcagtacctctcactctctctctttctacacacaaacaaccctgaacctcttgacctttcacccctaaattaatgtatgtgtctcctactatcaatgatatactcctacataaccataccacatttattctctcaggaaatttaacattaatgccataatatttccccaatttcccaaaaataaactttgtagctctttttaaacatttggttcaggatgcagtcaaggtttacacttttttttttgagatggagtctcactctgtcaccaggctggagtacagtggtgcaatctcggctcactgcaacctcagccttccaggttcaagcgattctcctgcctcagcctccgaagtagctgggactacaggtgcacgccaccatgcccagctaatttttgtgtttttagtagagatggtgtttcactatgttggccaggatggtctcgatctcttgacctcatgatccacctgcctcagcctcccaaagtgctgggattacaggcgtgagccactgagcccagccaaggttcacactttccatttcattgttacattatcaagcttatagagttcccaacgtggtttttttttttcctttcatgatattgacatatttgaagagaccagggcagttcgtcttcagaatgatccatgatttggatttgaccatgacgttatccatgatagaatcaggttaaatatcactggcaggaacatattgatatttgtcacacctcaaggcacaggatttcaatttgtttcattttgttgatcttaagtgtgattactttgagaatgtgaattttctgtaccccaacaacattttaccccctatcactttagcattcattgaggttttttgcctgaattacttattaacatgttgattgtaaaatggtattacagacattttataagtgaggaatcttaagtttccaagggaaggggttcttatatggttcttatacattgtgcagctaggatttgaacccaggtggtctgactccaaggcccacagtttaatacactaattgtactggaaaaggatttccacatgattttccacttgactttagtgccctcagtcagaaactgtgtcttgtccacttgggatttttttgttttttgaaacccaggaagtgccaccatcagagatgagatgaaattgtaaaaaggaaggataggatgaaattcaggcatgccaaatctttatgcaattatacacacacacacacgcacatgcacacacacacatcattttttaaagcaaactttctgttgaaactgcatgcttctcaaggacaccactcctgccatatggcttaaggtttcctacaataatcagcttcgggaacttaccttcttggctcattactgctgtgccttgcaattggcatgcgattatctgcatcctaaagcttcttgtttcatcttaaagagatttcagagttggcaacacactggacggggaaagatgaaccccctgttcagatgaatcagcatttactattcctctgcctctggagtggtctcatagttacagtaaccgagcactcaggaaagagctgaccagcattgcctgtgagctgtaaagcttcatcaacacacggtgaaatctgttatctggaccccaattctcctaacctctggtgtagccgcaagggccctttgagagctcagcactttgtggttaagggctttgaagtcagagagctctaatttttaatcccagccccatcatttacaagatttatgattttgagcaagttactgaacctctccgagccacaatgtcctcatttgaaaaatggagatagtaatacatccacttgaaaggtgttagaattaaaggagataatgtacctaaatagcctggagctgcgtgcaaattaaattcgcaataaatgatagctatgattattatctgacccctacaaactgctccccatattcacacaccattctggccacagcaaatttatttgtaaagacttttgtttgtaagaaactgaacctcatttcaaaacagtttaaggaaaaattgtgaagttactggttttcataactaggatgtccaggaagtggatggcctgagggacttagagctcagcttccttctggtctttgccccgttctctcctgtgataccagatggcttctttcatggagtgggaggaggagccacatggccaaagaccattctaggcttccatcatccccgaaagttagatgcatacatatcacctaaaatcctaaatggataaaaggtacctgaaaccctatctcagaaaaatcctaagtagtgtgctgttttgacccatttcttttccaggtgcaaaaggggaagaggagaagggtcattgccatgcactcaaagctcttgggtgttcagtctatagcccgggaaaataaaaggaacattgtagctggttgtttacagtgaattaaagagttgaatcaaatctctgttgaagagttttcctagatgactgccagcaaattctcataacactttggttcatgaaactgtggggacctatgatatccttcctttctcaattacctcctcgggctatctctgtcatgttgttagtttctaaaggttattattcctggtttgcagtctgcagcctcccgtcaaatgtcaagttcagaagttccttttaaagaccatagttaagaaggatcaacttaattttaaaacaaactttgagttttcaagacaaattgtttttcatggcaaattaactttttttgtgtgagatagaggaagtcagttgccaactcctggggtaattggcaaaatgtcacaaacaagtgaatgaccataaaaatgtgacaatatttaactttagattttacagtaaaatgaatgttgtcatctaaaatccttatctaatggttaaattttattttttcatcaaacctgtcctatcctatgctttgcttaatgcctaccacttctcctaatgaatatccaaggtattgtattaagcatatagatagatacattgtaaattgggaaaaccgggaaacaaagtcttaacaggtatatttcgagaatagagggagggtgtcttagccttcttgatttcagagcacaaataaaatactccagaatataaagcaaagatcgaattagaatttggggaaatgtttggttgaaagtttttcatggtagatcaacccttttcttgcctgcttggtcctgatagtactctgagaacattattgaattttttttttttttttttgagacagagtcttgctctgtcgcccaagctggagggcagtggtgtgatctcggctcactgcaacccccttctcgcaggttcaagtgattcttgtgcctcagcctcccgagtagctgagattacaggtgtggcccaccacgtccagccaatttttgaatttttagtagagatggggtttcaccatattgtccaggctggtcttgcattcctggcctgaagtgatccgccagcctcagcctcccaaagtgctggaattacagttgtgagccaccatacctggccacattattgaatctttatttgatgatgtagctcactttttagtcactgatgactaatcatatctgtaattcttcctgtagaaagtataggagataataaaaaacctgtgtggatcacttgctcccttctttgggacacatgtcatcctctaggttcaaactccttgccagatttgaagtcccctttgaataccctgaaattggaacaaaatattaaagaaaaaaatcagttccacagaaggaataacaaatggtctcaacaaatggctttctcaacaaatggtcttggaacaactggataaccatatgctaaaagattaagtttaatctacatttcatgatatatacaaaaattaactctgaatgtaaatattaagtccaaaactataaaattctcccagaaaacataggagaaagtcatcatgaccttaggttaggccaaaatttattagatatgataccaaaagcatgatctataaaagaaaaaaaggccaggtgtggtggctgatgcctgtaatcccagcactttgagaagtcaaggcaggcagatcacttgagctcaggagttcaagaccagcctgggcaacatggcaaaaccccatctctacaaaaaatacaaaaattagccaggtgcagtggtgtgcacctgtagtcccagctgcttgggaggctgaggtaggagaatcgtttgagcctgggaggtggaggttgcagtgggccaagattataccactgtacttgagcctgggtgatggagtaaaaccctgtttcaaaaaaaaagaaaaaaataaaatgaatttgacatcatcaaaattaaatacttttgctctgcaaaatttattgttaagagactgaaaagacaagtcacataccaggggaaagtatttgcaaatcgcgtaacacagggcttttttttttttttttttttttgacaaagtctcactctgttgtctaggctggagtgcagtggcacaatctcggctcactgcaacctccacctcccaggttcaggcaattctcctgcctcagcctcccgagtagctgggattgcagacctgcaccaccacgcctggttaatttttgtgttttagtagagaaagggtttcaccatgttggccaggctggtcttacactcctgacatcaagtgatctgccagcctcaacctctcaaagtgctgggattacaggcatgagccacagcactgaggcctaacacaggacttgtatgcggaatatataaacaactcccaaaactcaaaaataagaaaataattctataaaaatgcacaaaagatttaaacagacatttcgccacatgtggatggtaaataaacacacaaaaagatgctcaacgtgagtaatcattagggaaatgcaaattaaaatcacaatgcaattcacccattataacagctaaaataaaaaaaataccggcaataccaagtgctgacaagaacacagagcaactggaactttctcaccatgctagtgggaatacaaaatgaaaatgtttccactcaggaaaaaagattgtcagtttctttctttttcttttccttttttttcagacaaggtctctctctgtcaccggggctggagtgcagtggtgcgaccatggctcactgcagcctcgacctccaggctcaaacaatcctcccacctcagcctcctgaatagctgggaccacaggtgcccaccaccatgtctggctaaatttttttctctaactccccacatttgttttttgagggtttttttgtttgttttgttttgctttcatacagacaggggtctcactatgttgccagggctggtctcgaactcctgagctcaagtggtcctcccatcttggcttcccaaagtgcagggattataggcatgagccacggcagccagcctagattggcaatttcttatagagttaaatatatatctacccaaaagacccagcaataccacttctaggtagttaccctctattcacacaaaaacctgtaaacaagtgtttacagaagtattattcataatcacaaaacaatggaaacaacccaaatgtccttcagtgggtgaatggataaactgtggtatatccattcaacggaataccattcagcaataaaaaggtacaaactattggtaaaggcaatagctagtatgaatctcaaaaacattatgctaattgaaagaagaaagtctcgcaaaatattacatcctgtaggattccatttatatgacattctggaaaagacaaaactacagagacagagaacctatcagtggttgccaagggctgggtgttgggcagggcctgactacaaagtggcggtgcaagggaattctttgagtgttggcattgttctctaccccatttgtggtggtcgttacaagaatctatgcatgtgtaaaagtccatagaactatagaaaaaaaaggaaattctaatgtatgtaaatttttaaaaacttaaaaatcagcttgtcaaattttgaagctgacatggtaatattcctttagtaaatgtgtcatggaaaagaagcctatttaaaatgaaaacagacatactgaatgtttattatacagaaccatttgtgttcccctgggtgaagcactctttctgattcttcaatgcagtctaaagaatttagaaaatactacctaataaaaaagaaatagtatgcatagcaattttttaaaattttattttattttaagttttgggatacatgtgcagaatgtgcaggtttgttacatagttaagtgtgtgccatggtggtttgctgcatctatcaacccatcacctaggtattaagccccacgtgcattagctatttatcctgatgctctccctccccctgatgcatagcaatttttaagaacatcaagaaagaaactcacagtaggaaatacgtgtaaatccagaagactggaaaaaaatttgcttgtcaacatgtatcaaataccttggcagaaaaatagttctcatgggccaattctttatgctctgaagcagcagctggtctcttttgttaaaagaagttgttcttggaatacatctagttaatatgcctcttagaatttgccctgcatttttcttatgcaaaggactttatgtaaaaagttggcctgatagaacatgagaatggttgatgatgtgacagttatagttcttgctgcttagcaaaatataatgcatcgtgtgtgtgtgtgcatgtgtgtgtgtgtgtgcatgtgtgtgtgtgtgtgtgtgtagaatctcctgtgcttacttatatatatgaatagataatacattagtatgatttgacattctgtagatgccaaagctgctatttattagtcagaacactcgtgtggggctgtgccagccatttatagctggtacccattttgattgatcagtgccaagggccatatgagttattaaatatgttcaatataagtcctgtaagactatcaactgaaaaaaatctccctttttctaccagctgacctctatattttctgtaatcttcaacacagagacaaaaaggccttttaatattgggttacttgaagttgggtagaggtgtgtattttaattactttaatcgtgtataacaatgtgaaacaggcatatctcatcgcaaatctgtccctgacagtcctccagcctttcttccagggatctctttctttccatttgtgttcccttctccttgcagtcactctgaaagcctgccctctcctgatatttatctgggaccagataaacatcctactgtgggatgagataaactttctcatcccacagtgaccatcccctggaatattattgctgtgacttggggctacaaaaagacacacgacaaatatggcagctcttctgaaaggagcagtttttctttttttcttttcttttcttctttctttctttctttttttttctttctttctttctttcccttcttcttcttcttcttcttcttcttcttctttttcttcttcttcttcttcttcttcttcttcttcttcttcctcttcctcttcctcttcctcttcttcctcttcttcttcttcttcttcttcttcttcttcttcttcttcttcttcttcttcttcttcttcttcttcttcttcttcttcttcttctttcttcttctccttctccttctccttccttcctttctctctttcttttcttttctttcttctctgtcttctttctttttcttttttaaaacagggttttgctctgtctcccagctggagtgcagcagccatggctcactgcagcctcaacctcctgggctcaagtgatcctccttcctcaacctcccgagtagctgggactacaggcatgcaccatgatgcctgctaatttttgtatttttttgtagagattgttgcagggggggtcttataatgttgcccaggcttgtctccaactcctgggctcaagcatctgcccacctcggcctccaaaagtgagccaccacgcccagtaaaacacttaaaatgtcactttaggtcctgtgggaagagcagcgtggaggtgggctgaggttagaaggtgcagagcgtggaagaagattgtgagctgagtattggacatctgttcttgaatagtccctgggcctgccataggaaaggaagttctccagggtaagtgacttggacttttccttttcctctaataacattttttcttgggctgtggccgaaccttaggattcggttcatcccttattcagaccaggttagcttttccctgctctcacctagccatcccacctaggcacagaagaccttgctttcataacagatagctttctccctgaggggggaactctgccagcagttaaaggagtgattcctttccactacattcttgcacagttcccatgaatttgaaggtaaaacaaaaaacatgaaagatactttgagctcattgtgagcaatgttgagtattcactctcctttaccatcagaattcccttgggaatgtttgaaaaacagtgctttagggctttaacaaagttaaacactgatggagggggtttaatgcacttaaaataaaatccaaactcctcttcaggcacagtagtatccggccccttggtacctctctgacctcttccatccagtctctcctttggtccactatgatccagccagtttgagtttcttgcagttcctagaatacttagagctctttccagccccagggcctttgcacttgctgttccctctgcctgggatgctcctctgcatgttctgcccttgactggctcttgctcttctttccctccaatgccatctcctcaatgaagtttttcctgatttctcctcctgatgcactccctacccttgttcgtctttatcccaacatctcctttgcttccttcatagcacttaccataatctaatacttttatgtgtcacattttaatatctgtttcccccactggaccaaaagcttcaggaggatagggaccagtactgttttgtttttcggtgcatcactgggaagtggcacagtgctgggcttttagtaggatctcaatatgtaaatactgaatgaatgattgaattgagtataatgcatgcccctccaagggattcttgaagatgtaaaatctgccttatcgaggaacgaagttatgatagtagaaagatggcatagggttgatattttagatcagggagatctagtgtgatacttccagtttctgccatctgctctgctgacccagaaggctgacagagctctttttacaagaggttaaaaaaaattctgggctgggcactgtggctcacatctataatcccagcactttgggaggctaagatggatggattgcttgaggctaggagttcgagaccagcctgggcaacatggcaaaaccccatctctactaaaaacaaaaaaaatttagctgggtgtggtggtgcatgcctgtaggtccagctacttgggaggctgaggaaggaagatcgcttgaacctgggagggggagattgcagtgagccaagatcgcaccactgcattccagcctgggtgatggagcgagactctatcaccaaaaaagaaagaaagaacttctgaagacaaaagattagcttttgaggacccttagtaaggtttgttcaaccagaggcattgcttttgaagacatgggctagtatttattttgtttccaaaattttagatttggagcagtaaaaaatgatcacacacttcacgatatatcagtctttcagggaaggcatagtccttaacacttgttgatgagttttaagttgattctcctttaaacagattttttttcctttaatccacaggttacagttcttatccgcgtgaatacacatggctctgttacgaaaaagtaagatttcaacttttgaaaataatgatttaaaaacatatttgggaggatggttttgaggctggggcttggctcttttcttctttcttggattgtgtttgattttcatggatagttttcccacaggcactttttggcatcatcatttccagatgattcccatggagagttgttcagtattttagtcagaagtggacttatcggctgggcgcactggctcacgcctgtaatcctagcactttgggaggctgaggtgggcgggtcagttgagctcgggagttcgagaccagcctgggtaacatggagagaccccatctctacaaaaaatacaaaaattagccaggcatggtggcggacacctgtagtctcagctactcgggaggctgaggcagggggatcacttgagcctgggaggcagaggctgcagtgagctgagattgcaccactgcatgccagcctgggagacagagtgagaccctgtctcaaacacacaaaaaaaaaaaaaaaaaaagaagaagaagtggaagtgaacttacagcagggatcatatatttctataaaacttgcaaaaataatgcattttctcgttcggaataaatattcatgttcatagctaatttagcatttgtaatttgtaattttgcgttcttagtcttaaagagtcatctcgaatcttcatacccatcagaacctggatttgcctctgattttagatccagtagtttgtgaatttgaggagaaacatagtaacctaattctgtgaccctcagggtagagttgccagattcagcaaacaaagactcagaacaggacaaccagttaaatttgaacttcagataaacaacaaataattttttagtataagtatgtcccaaatattgcatgagacatacttgcctgggtaatttttgtatttttagtagagatgggttttcaccatgttagccaggctagtcttgaactcctgacctcaagtgatccacccgcctcagcctcccaaagtgctgggattacaggtgtgaggcactgcgcccggccgtggcaggtgaatattaatcgggcctgttgataaactgtagaattttgtccattttctgtccattttctgcttctctgtagttttgttttaaatggagtctagtatctgattgtccctggctgaatctgataatccattaaggcagggaggaactgggtgtcagcaaaatagaatcacagcctcaggatgtagctttggagggcatccacgaagactcttttacaaatgggaagacaaaggcatagaggccaaaaaatagatgcatatgaagtcaatagattaagtctcttgatgcataaaaataataaaaaataatacaggccaggtgcggtggctcatgcctgtattcccagcactttgggaggccgaggcaggtggattgcttgagtccaggagttcgagaccagccttagcaacatggtgaaaccccgtttctactaaaaaatacaaaaaattagccaggtgtggtgatatgtgtctatagtcccagctacttcggaggctgaggtaggagaatcacctgagcctgcaaggttgaggttacagtgagctgagatcacactgctgcactccagccagggcaactgaggtgagaccctgtctcaaaaaagaaaaaaaaagataaaataataataacaatgatgcataaccatttgtaaagtctttattgggcctgcattgccttggttaactctcaaaacagtagtgcgaggtaatgcttattattacaatcttcattcagcagataagcacaccaagctcagagaggttaagatacccctcggccatacagctaggaggtggtagaaaagagatttgagtctgacttcaaattcacaccctcttcccttctaccaacttttcccaaactttaggtaggtgtgcactacacatgccaacatgccatcttctcaatttttcatcagctgtgttccttctgtcctaaacatttcttaatattttctttaggccaggcacagtggctcatgcctgtaattccagcactttgggagaccaaggtgggaggatcacttgtggtcagaagttcaagatcagcctggccaacatggtgaaaccctgtctctactaaaaatacaaaaattagccaggcatggtggtgggggcctgtaatcccagctactcgggaggctgaggcaggagaatcgcttgaatccaggaggcagaggttgcagtgagccaaggctgtgccattgcactccagcctggacaacaagagtgaaactccatctcaaaaccaattttgttttctttgactaattttaaaaatttataagtgtacttcataatagaaagtttttatccttactgcaaatgaaaacagaatgatttcctatcattaaaaaaaaaaggtagctttaaacacatatacaattaggagaatgtgattcaactctgggtagcttttgttgtgttcctgcacataaaatcagaaagattgactttctcatatgctgattaaatattaatgctatgaacatgaacttcctcagtcatttcatgcacaaccagtgctatatgttccatactcaagaaaacactgttttacaccactctacttctcaacagatctcaagggccaacatcactggaacaaacagagctggaggcttggaggcattgaggtcttctgtttaccagggcaagaatttctttctttcttcctttctttctttctctctttatttttctttctttctttctttctttctttctttctttctttctttctttctttctttcttttctttctctttctttctttccttccttccttccttccttccttccttccttctttctttctttctttctttctttctttctttctttctttctttctttctttctttctttctttctctctccctttctttctttctttcttttctttctctctctctctctttctttctttctttctctccttctttcttttttgacagagtctccctttgtcacccagactggagtgcagtggcatgatctcggctcactgcaacctctgcctcccaggtttaagtgattctcttgcctcaacctcctgaatagctgggactacaggcatgcgcaacacctggctaatttttgtatttttagtagagatggggttttgctatgttggccaggctggtctcaaactcctggcctccagtgatccacctgccttggcctcccaaagtgctgggattacaggtgtgagccaccacacccggcctgcacatcatccttgaccaagggttgaattaactgaaaagcagctgtgtcataatggctaagaacatgtatttataattactactggctcataagaagaatcacataaattcaacaaaataaaagccacatacggcagacccacagctagtatcatactaaatggggaaaaactgaaagcctttcctcttacatctggaacacgacaaggatggctgcgtttcaccactgttattcaacatagtagtggaagccctagctagagcaatcagacaagcaaaaaaaataaagggcatccaaattggaaaggaagaactcaaattatcctgtttgcagatgatacgtttttgttttgttttgttttggaaggaaggtcttgctctattgcccagtggtgtgatcttggctcactgcaacctccacctcccaggttcaagcaattctcatgcctcagcctcccaaatagctgggattacaggcatgcaccatcacgcccagctaatttttgtataatttagtagagatagggtttcaccatattgcccaggctggccttgaactcctggcctcatgtgatctgcccacctcagcctcccaaagtgctgggattacaggtgtgagccactacaactggccaatataatcttatatttggaaaattctaaagactccagcaaaaaactattagaactgatatacaaattcagtaaagatgcaagacccctgagcaacaatagtgttccaggttaattctttctgtttgtttgtttttgtatttgagacagggtctggctctgtcacccaggctggagtaattttggctcactgcagcctccacctcccaggctcaagccatcctcctatctcagcctccttagtagctgagactacaggtgcatgccaccacgcccagctaatttgtgtgtgtgtgtgtgtgtgtgtgtgtgtgtgtgtgtgtgtgtttgttgttgttgagacagggtcccactctgttgcccaggctggtctcgaaactcctgagctcaggtgatccacctgccttggcctcccaaagtactgggattacaggcatgagctaccacacctggccaggttaattctttattctatatgctgtctgcttatagaaaggtctcagataccactcctctgtgtcatggaaggcacctactcgcactaccattctaaactttgtcacgtgatttcaggttcataggttcaatgttaatgtgtttccatttctatttcagttaatcaggtgctgctgttccttctgatcgtgaccctctgtgtgattctgtataagaaagttcataaggggactgtgcccaagaatgacgcaggtgagcagacatggaattcattgagttgggatacccaggaatgtggtttgaatatgttcctctaggtcctttcaatagctgggttcagggacaagtgacagtttggtcaactcccaaggacctgctagtagaatatccgccctagaccaccttttcagtcgtgccctaggatggtcggtgctattcaaactttagcatgtgtgagagtcacatggagagcttgttaaaacacagcactgggcccacccgtgaggtgtaggatcagtaggtatggtgtggggcctcaagacttgcatttccgataagctcctggttgaggctgatgctgtaggttcttggaccacagggtgagtgcactgctccacactccatctctttggagcttctcaatgactttgcttatggaaaccaccctctttctcctctccctgctggttcattcccatcagtgcaagtcagcctcataactctcaacttgaaaatggcccttcattggccctgtggtctctcccagctgcactgagaaccatgtttccctcctcgggggtgaattgcctgagatggcaccttcaaaactccaatgcacacacaaagtcaacctccataaaaatcaggaagcactgtttattacatttttaattaatttacttttttttttgagacagaatctcactctgttgccccagctcaaatacagtggcacaatagcagctccctgcagcctcgacctccagggctcaagcaatcctccggcctcagcaccccaggaagttggaactacaggtgtgtgccaccacgcccagctaattttttgtagaaatgggttttgccatgctgctcaggttcatcttgaactcctgggctcaagctgtcctcctaccttggcctcccaaagtgctgggattacaggcatgagctccatgcccagctaatttactttttatataaatcaagcaaatacacacttacgggctggcgatggtggctcatacttgtaatccagcactttgggaggctgaggcgggaggatcacttgagtccaggtgtttgagaccagcccagcctaggcaacaaagcaagaccccatctgcatgcacacaaaaaattacctgggcatggtggggcatgcctatagtcccagctacttgggagctggaatgagaggatcacttgagcctaggaggtctaagcagcagtgagccctgatagtgccactgcactccagcttggatgacagagtgagactctgaatacagttatttggtgtgttacatacatttattccacagttttgttttttttttcagtcagacacttagggactggaaacacaacagtgaacaaaacaatatccctattcccaggaagctggcatttctttctgattatattttgtaatttaaaaattcatttaaaaataattaaaaacatgtataatctgatctaaatgaacatggaatctgcaaagagaatgattttcatacaaagacatatatacaaatgttcttagggtataattcatagtagccccaaactggaaacaattcacatgtacatcaactcgtgagggatacaaaaaatgtaatttatctcacacaatgaaatacttttcgacagtaaaaaggaacaaatgactgatacaagctgcaatatggatgaacctgaaaaaaaactatgctaaataaaagaagtcagacctgaaagaccatatattgtatgattccatctatatgaaatttctagaaaaggaaaatctatggagacacagagcagatcagtggttgcctagagctgggagtgggaatggactgactgcagaccaggcagctcaatggaactttctaaaattggatcttggtgatggttgtgcaattctataaatttactaaacatcattgtactgtacgcttacaatgggtaaatttttaaaaatctgtattcgtttgcttgggctgccataacaaaatagcacagactaggtggctagaccatagaaatgtattttctctggttctggaggctggaagtccaggatcaaggtgtgagcaggttttgtttctcctgaggcctctctccttggcatgcagatggccgccttcttgctgtgtcctcacgtggccttttctctgtgctgcattcctggctgtgaccctctgtgtgattctcctcttttcctccttttattaggataccagtcttactgggataaggcctaccaaatggcttcattttaacttatttgcctttttaaaggcaattaagtgcatggacatcctgagatgctggaagctaagacgttaacaaacggactctggaggacacaattcagtccatagcagtatctacacctcaataaactgttctaaaagagagagagagagaaggaagtcacataaagacaaatgtcatctgaactgactccactcttcatgcttcaatccctgctcataaaccaacacattcactcagctaatcccaccacagactcccttcttcaggaaaataagtggataggttttaaaacagctgttaaaacagctccaaagaaatgcacatcctgactgcctaatcagacctatacagagaaacaaagcatttggaccgcatgaatggatccattatcacatgtttatccattcagtgttaaaattttttaaaatcgatgttataaaataccattcaaacgaatgtagcattggcatggaagaatgcttgtggtatgttaaatgggaaaagcaagttgcagaagagactgaaaagtatgattccattttggtttttaaataataagtgtttaaggtatatatatatatatatatatattttttttttttttttttttgagacagagtttcgctcttgttgcccaggctggagtgcaatggtgccatctcggctcaccactacctctgcctctgggttcaagtgattctcctgcctcagcctcccgagtggctgggattacaggcatgcgccaccatgcctggctaattttgtatttttaggagagatggggtttctccatgttggtcaagctggtctcaaacgcctgacctcagatgatctgcccaccttagtgtcccaaagtgctgggattacagatgtgagccactgcgcccggcccaggtatatattctttagtattaccattaagaagggtttaaggggcacacaccacactggttgtgttatatattgttataaagcagaggtctacttttggagtgggagtgagaggtctgcagaaaacagtcacaatttaccaaatactcttctgtttgggctgaaattttttcaataattatgtattattttttataatttgaaaaacattaattcaaagaactagtgttctaagttgatgtccagaggccctgtgaagtcctacgttcaagtaaaacatggcggtattctctgtaatatccccattgtgacactccatgtaatctcccgatacttctcttgtgactagtgtgctggtcactcgcagctgtcccacttggggagaggtaagctgatacacttggctaaaacaatccttatttgaaatggaattctgagtcatggcattaggaaagcagacatttcctttcttctaggaataggcgtggcttgatcagagctgcttatggaatggacgaaggcagtatcatttctgttccattctgccagcattgtgatgtttactatttttgttaggcaccaaatagtttcccatagccaacattttaatgctttggctcaggcaccagttggtacaatgaatccaaataatggagcagataattcctaaagaaactgcaaggatggagcattgatgaagaaggtacagttgataagcctttctgccacatttctccagtgtgcatttgtccttcattctgtccagggggaactttttggcagagagcagtatttttggcttaagttagtgctcagtttctctacctggcagaggcccctaaggagtgtggcagtgtcatgtgttggcagcagagctggacactcaatgtttgacctttttctggagtgtcccctcttttatgaggacactttccttttaccttgtgcttcccacagtctgctgaaggcctccgtctgactctggcagccaggcacagccccagcttttttacccttccctcttattcctcaagggccctgttttctgagactcattcatcaattccatttagttcattccagcaaactttcattaagcacttccaaagtgccagactcagtggggataatataatgagcttacagtctagtggaggagacagacacataaatagattcttccaggcattgtggcaagtgctcaaatagagatatctaatattcacccatctattcagatcgtattgaaaatctactatgtgccaggcactgggacagctgcagaggatacagagatgaacaaaatacctgccctcacagagctcctagtgtaataggagaaagaggaaagacatgcaaccaaataaattccaacgcaattaataaattcaaccataggcaaggccacagcatagagaaggtgcgtgttaatttatgtgtagggaggtattaaaggcttcccagaggatctgatgtcagtactgcatttggaatgaatatgtaagggttagccatgcagaaaaggatattgaaatcattccaggcattgggaaggaacatcatgtgcaaaggcactgagataagagtagtgttcagggaaccacgagggctttggtgttgctaaaatagaaggaggtgaggctggagaagtgagcaggggctggatcatgaggggtcttgtgtgccaggcaaagaaatgtggctttaccttttaggaaccaatgaggaactttcagcagcaaagaaacgtcaaattctcattttttggcagatcagttcacagccagcaggtaacatatcacatgatacctccataagattacaacttagtccaaaaggaataatccttaagaaactttttttttggtttgtttataaaaataattcatggtttgtattagtccgttttcatgctgctgataaagacatacctaagactgaggaaaaaaagaggtttaattggacttacagttccacatggctggggaggcctcagaatcatgtgggaggtgaaaggcacttcttacatggcagcagcaaaagaaaatgagagatacaaaagtgaaaatccttgataaaaccatcagatctcatgagacttattcactaccatgagaacagtatgggagaaaccatccccatgattcacatcatctcccactgggtccctcccacaacatgtgggaaatatgggagtacaattcaagatgagatttgggtggggacacagagccaaaccatatcattctgcccctggtccctccaaatctcatgtcctcacatttcaaaaccaatcatgccttctcaacagtcccccaaagtcttgactcatttcagcattaactcaaaactccacaatccaaagtcccatctgaaacaaggcaagttccttctgcctatgagcctgtaaaatcaaaagcaagctagttacttcctcttcctagatacagtgggggtacaggtatttggtaaatacagccattccaaatgggagaaattggccaaaacaaaggggttacccctgtgcttgtccaaaatccagcggggcagtcaaattttaaagctccaaaatgatctcctttgactccaggtctcgcatccaggtcatgctgatgcaagacgtgggttcccatggtcttgggcagctctaccctgtggctttgcaggatacagcctccctcccagctgctttcatgggctggcattgagtgtctgtagcttttccagcaacggtgcaagctgtcagtggatctaccattctggggtctggaggatggtggccctcttctcacagctccactaggcagtgccccagtagggactctgcgtgggggctctgaccccacatttcccttctgcactgccctagcagaggtcctccatgaggcccccgcccctgcagcaaacttctgcctgggcatccagacatttccatacatcttctgaaatgtaggtggaggttcccaaaccccaattttttacttctgtgcactcacaggctcaacaccacgtggaagctgccaaggcttggggcttgcaccctctgaagccatggcgcaagccctatgttggcccctttcagccatggctggagtggctgggacacagggcaccacgtccctaggctgcatgcagcacaggaccctgggcccagaccacaaaaccattttctcctaggcctccgggcctgtgatggcaggggcagctgtgaagccctctgatatgccctggagacattttccccattgtcttggggattaatgtttggctccttgttacttatgcaaatttctgcagccagcttgaatttttccttagaaaatgttattttttttttctatcacattgtcaggctgcaaattttctgaactcttatgctctgcttcccttataaaactgaatgcctttaacagcacccaagccacctcttgaatgctttgctgcttagaaatttcttctgccagatatcctaaattatctctctcaagttcaaagttccacaaatccctagggcagggcaaaatgcccctggtctttttgctaaaacataacaaaagtcacctttgttccagttcccaacaagttcctcatctacatctgaggccacctcaccctgaaccttattgtccatgtctctaactggcttttggtcaaagccattcaacaagtctctaggaagttccaacctttcctacattttcctgtcttcttctgacccctccaaactcttccaacctctgtttgtcacccagttccaaagttgcttccatatttgttggtatcttttcaacaacgtcccactctactggtaccaatttactgtattagtccgttttcatgctgctgataaagacatacctgagactgggaagaaaaagagttttaatcggacttacagttccacatggctggagaagcctcagaatcatggcaggaggcgaaaggcacttcttacatggcagcagcaagagaaagtgagagatgcaaaagcagaaacccctgataaaactaccagatctcatgagacttattcactaccatgagaacagtatggggaaaaccacccccatgattcagattatctcccactgggtccctcccacaacatgtgggaattatgggagtataattcatgatgagattttggtgaggacacagagccataccatatcatggttactttagtcaatttggaaagtataagaaatacaaataaaatcaaaatcactcctaattccataaatagacataggtccatttgcaaatatgtatgtatcaaatagtgatcaaatactagagagaattttgtattcttttcctccttaacagtgttttatgagcattctctcatgtcagtaaatatattgtgaaaacaaaattattctagtggtggaaatttcagatgcagtagcaagctggtagaaaagacatagaaggagaaagaggaggccattcaatgtgtcttaaattacacaaaatgcagtacctggtagttaatttcaagaaatgcttattgaatgaaatatcagctagaactaccctggacctcagggatagaggttttccaaaaaggatctggaaagagaagggggagggggagagagcaggtggagagagcggggggagagagagagagagagagagagagagagagagctttaagtataaatcagatgagtactttatagtggatactgaatactctgcttatggatcattattcttctccatggctgaaagttgtattgcggtactaaagtatgatgttatggctttggtattttatagcatagccaggctcaaaagaataattaattatttatcttgtgcattagtcatgttctttcatttacctccttcctcttgctgtcaacgtttgagaaacttgactagaatggggataggagagggaaaatcacaaccagtatcttatagcagtgtaggcaaagtaaatattctgattcagggaagagttgaggactgttggacaaatgaggcttttcagttctttgtatgttttttaagtgtgtgtgtgttttaggctagccaactggctcctgtaagatagctccaaaataatagattttgtgttatgatcaaaagggctcacagccttatgtgctagaatccaacactatgaccccagattttgagaaaagcaaagctttttcttgtaaatcgtctaacaaggacacaggagcccagctcaaatctgtctccctgtgctggctttaaggcagtaattttattagaaaaggctcaggggtggattctgggattagtaggtgattgatggaagaggagaggaggtctaaaaggtcctgaggcatgcacagttatctcttcatgccacctcatgggtctcatgtgcaaatctgggaggagttagtttgaaatacagggtggaaatccaagctgtgacatcagcaagcttgttctgcacaaacttcagttgaccagattggttccaactgatttcagccagtttcttttatttatttatttatctatttattatactttaagttttagggtacatgtgcacaatgtgcaggtttgttacatatgtatacacgtgccatgttggtgtgctgtacacattaactcgtcatttacatcaggtatatctcctaatgctatcccttccccctccccccaccccacacctggtatgtgatgttccccttcctgtgtccaagtgttctcattgttcaattcccacctatgaatgagaacatgcagtgtttggttttttatccctgcgatagtttgctgagaatgatggtttccagcttcatccatgtccctacaaaggacatgaactcatccttttttatggctgcatagtgttccatggtgtatatgtgccacattttcttaatccagtctatcattgatggacatttgggttggttccaagtctttgctattgtgattagtgctgcagtaaacatacgtgtgcatgtgtctttaaagcagcatgatttataatcctctgggtatatacccagtaatgggatggctgggtcaaatggtatttctagttctagatccttgaggaatcaccacactgtcttccacaatggttgaaccagtttacagttccaccaacagtgtaaaagtgttcctatttctccacatcctctccaggacctgttgtttcctgaccttttaatgatcaccattctaactggtgtgagatggtatctcattgtggttttgatttgcatttctctgatggccagtgatggtgagcattttttcatgtgtctgttggttgcataaatgtcttcttttgagaagtgtctgttcatatccttctcccacttgttgatggggttgtttgtttttttcttgtaaatttgtttgagttctttgtcgattctggctattagccctttgtcagatgagtagattgcaaaaattttctcccattctgtaggttgcctgttcactctgatggtagtttcttttgccgtgcagaagctctttagtttaattagatcccatttgtcaattttggcttttgttgccattgcttttagtgtattagacatgaagtccttgcccatgcctatgtcctgaatggtattgcctaggttttcttctagggtttttatggttttaggtctaacatttcagtctttaatacatcttgaattaatttttgtataaggtgtaaggaaggggtccagttttagctttctacatatggctagccagttttcccatcaccatttattaaatagggagtcctttccctgtttcttgtttttgtcaggtttgtcaaagatcagatggttgtagatgtgtggtgttatttctggggcctctgttctgttccattggtctatatctctgttttggtaccagtaccatgctattttgattactgtagccttgtagtatagtttgaagtcaggtagcgtgatgcctccagctttgttcttttggcttaggattgacttggcgatgcgggctcttttttggttccatatgaactttaaagtatttttttccaattctgtgaagaaagtcattggtagcttgatggggatggcattgaatctataaattaccttgggcagtgtggccattttcacgatattgattcttcctatccatgagcatggaatgttcttccatttgtttgtgtcctcttttatttcgatgaggcagtggtttgtagttctccttgaagagatccttcacatctctcgtaagttggattcctaggtattttattctctttgaagcaattgtgaatgggagttcactcatgatttggctctctgtttgtctgttattggtgtataagaatgcttgtgatttttgcacattgattttatatcctgagactttgctgaagttgcttatcagcttgaggagattatgggctgagacggtcgggttttctaaatatacaatcatgtcatctgcaaacagggacagtttgacttcctcttttcctaaatgaataccctttatttctttctcctgcctgattgccctggccagaacttccaacactgtgttgaataggagtggtgagagagggcatccctgtcttgtgccagttttcaaagggaatgctttcagcttttgcccattcagtatgatattggctgtgggtttgtcataaataggtcttattattttgagatacgtcccatcaatgcctaatttattgagaatttttagcatgaagggctgtcgaattttgtcaaaggccttttctgcttctattgatataatcatggggtttttgtctttggttctatttatatgctggattacatttattgatttgtgtatgttgaaccagccttgcatcccagggatgaagcgcacttgattatggtgaataagctttttgatgtgctgctggattcagtttgccagtatttttttgaggatttttgcatcagtgttcatcagggatataatctcagaagcagaaagagtttcatcatttcagcattttattcttctaatctatcatcctgcaaactcgagaatttctattagtcattggtttctttaactctttgggggtatggtttcaatagcgacataaacaaaatagaagtttatttcctctctcaagtataagtctgatgtatcagttccacaattatccagatcaagattccttctatattatggttttggtgacctcaacaagtagcttccatcttgtggtctaagctggcaactctaactcccaccatcatatcaacagtccagctaatgggaaaggggaaaggcaagggggtgagtgagcattcctttgaagggtagacccagcagtggcacacattacttaaaccaacatcccattggtcagaacttgatcatatagagctgcacgggagttggtaaaatagtctttgtggttggctatgtaccagctaaaattccaaagttcttttctaagggaagacagaatgactagatattggagaacaatcagcagtctcttccacactatgccatcttcccccaggagtatggaagatgcattaaactggctctactgtgaaattctttcatgttccaagacaccagtttttatgtttccagatgatgaatccgagactcctgaagaactggaagaagagattcctgtggtgatttgtgctgcagcagggaggatgggtgccactatggctgccatcaatagcatctacagcaacactgacgccaacatcttgttctatgtagtgggactccggaatactctgactcgaatacggtaagttatgtcttacagactttggcactttctgtttccttcccctctctccttccctccctccctccctccctacctcttcttcttcttttctttctttcttgccttctctccctttctctctttctctccctctctctttctgtctctctctctctctctgtctttctctctttctctctttctttctgataggatcttgctctgttgctcagactggattgtgcggtggcgcaatcacagctcactgcagccttgacctccctggctcaagcaatccttctgtttccacctcccaagtagctgagactacaagtgcatgctaccacacccagctcattttctaatttttttgtggagagcgagtctctctttgttgcttaggtttgtcttgaaatcctgggttcaagcaatcctccctcctcagcctcccaaaatgctgggattacaggtgtgagccaccacacctggcctctactttcttatatttccttaaatagatttcctttctttttggattaagaaaaaataaacagaaaattaaaatttgaacatattataaaaatgaaagataattgtaaaatcttggtttggagagtgtctctctgagcccagaaatcatccagaaaaatggacagatttgactgcatcacatttaaaaactttacaatgatgaaaaatacaagtgaagctattcatacaatagattaggaccaagtatttttaacatgtattatagacaaaaaattaccatccaaaatatagaattgttacaaaaattttaaaaacatggttaaaaaatgggcataggatataaccagataattcacagaggaaaaaaatacaaatggccaataaacatgaaaaggtgttgtaggctgggtgaggtggctcactcctatatttccaacactttgggaagccaaggaaaaaggatgacttgggatcaggctcgagaccagcctgggcaacataacaagacctctgtctctactaaaaattttagaaattagctgagggtggtgatacatagcgggaggctgaggtgggaggatcccttgagcccaggagtttgaggctgctgtaagctatgatcgcatcacttaactccagcctgggcaacagagtgagaccttgtttcagctaaaaataaataaataaggctgggcgcagtggctaactcctgtaatcctacctgaagtcaagaatttgagaccagcctggtcaatatggcgaaaccccgtctctactaaagatacaaaaatttgctgagcatgttagcacattcctgtaatcctagctactggggaggctgaggccagagaatggcttaaacccaggaggtggaggttgcagtgagctgagatcgtgccactgcgcttcagcctgggtgacagagtgagactgcatctccaaaaataaaaaataataaataaaaaataaataaataaagtttttctgtgttattaataggaaaatgtgaattgaaacatttttgcattgttgaaaatgaaaataaaaatgaaaacatatatgtcacttcagtgacaatcttcactcatcaggttggcaaaaattaaacagaacaacattacccagtgcaggaaaatgggcatgcttattccttatttatacaatgtgcattttctaagttggtaagacatttggcaaggtcaacatggcaatatctatcaaaaggttgtatgcatatataatttgattcacatgccttttcctcttccaggaatctgtgctacaaaaattctagtacatattaccaaaatacgtgtacaacaatgctagtttcagcattatgtgaattagtgaaaacatttcaaagtgctgaaatgtccaccaatggaagaatatttaaatgaactgtgaaatatgatccagatgttaacgaaagaaggcactctgtctaagcagacataggagattcccaaggcatattgttaagtggaaaaaactagctgcagtataactcgtatagtatgatctactttaggaaattcaaaacccctaactgtaagtgtgtacatgtacatgtatgtgtttctgtgaagaaaaagaactggaaagctatcagattgttaacactatctcttgggaggacagaggaatcagggagggtgctgatgaaaggaagttcagggtgtttcagtattatttgatcattcaaaaggagaatatatttgcatactgcttttataattaaatgtttttgtagtggtgccatcaggaggtactgagatctgtaaaggtgtttgcctataatctaaatggcccttggctgccctgggttttgatgtcttgtgtatgctttctggattttctgtctcatttctcactctccttatcatactattgctcatcattcacttagcctgttgttaacagcccattaactatccatgggtatgaaaactagataaccaaatccaaaaggatggcatgtataaggtttctgggcaagggtttgtccttaacaaaaggcatgaacctcatgactttctgactttggccaggggctatttcccagttcttgctgtccagtctactccctgcccccttttacatactttaaagttttttttttcattgaagtagaatcccaaaacagaaaattgtataaatccagtgtgcagtttactggatcatcacaaagtaaacacactcatgtaacatccagcatgttctcactaacacttagtataaaatcaatctttttaagtttgccattttgattagtgtccagtggtatctagaaatttgaagtttcattatttctaatgtcattgaacacttttcccacacactttgtaaccatttggaagtaagtgttcaagtctcttgcctattttgctgttagtctatctttttttaattgatatgaccaattattttttcagattttgcagatctaaattttgttcacatttaattcttttgttgatttttagtcaacaacaaatactaccctaggtggctttagtcattcgacattttattttgagattatttctaccaagaacctcattatgaattggatacaagataaaaattctgcaagaccaagaaaacagaaggggagagggagggggaagagaagaaggggaacgaagacagatggggaagatcaagggaccaaatcaaagagacaaaggtaaattcaaatcagccttggagtcaaaacagcagagtaaaaatgacttcgatcaaagctgaaggttcagaatgtcctgtttcataatatttcagagctgttaccacgtggcgaagatagtaccagcaaccacagatgctgctatataagaaagaatacttttcattcttcctgtttcctggggaaattatttggatctggggagagatttggttattactattttgcttcatttcctttgcagaaagagttacgtgattgaggggaaaaaaagatttaaagtcagaccagatggggagaaaagtcagagggatttattggactaaactctactaaatttacgcacattttaattttaactttctagggaggcaacagattgaccttggggcaataggcaaatggaggaaagaattgaagggtatactagaggtttttttggtcatctttttagaaaatggattgaacattccaaactgagagaaataaactttaaaatcgtggaattcaacccgatggtcctcaaagggaagatcagaccagactcatcgaggcctgaattgctccagcctgtaagtagggaccacacaggtgctggggacagtccttggtgagacctttgttcagtaaaggagtgctagtcaccgggatgcatgtggaatattatttttgaagccatgtggagttgatctccaccaaactccgcttatgtataatttataagccagctgctacagaaaggatttaagatggtttatagaagcacaatgaagttattaaagaagaagtgaagcattaaaaaaatgtagaatgcatttatgggtgtgaatatgtctgtgggggtgggagctggaggagggccaggtagctgaggccaggaaaaagagtcccaaacccaccagctgttgggatatttaactgtgattgtacgttaaagctgcctcggagtgtccgacagctaagaaaaaacagtagtatgatggattatatacttcatagtattgactaagataatatattcaggagacaccatctcttttcctagcattggaaatcttaaggtattttactgcaagagttcttacaaaagggaccctctcctgcataaaaagtggtgtttttggctggacgtgctggctcgtgcttgtaatcccagcactttgggaggctgagcggggaggattgcttgagctcagaagtttgagaccagcttgggcaacatattgagaccctgtttatacttaaaaaagttttatttagtggccaagcgtggttgctcatgcctgtaatcccaacactttgggaggccgaggcaggcggatcgtgaggtcaggagttcgagaccagcctggccaacatagtgaaaccccatctctactaaaaatacaaaaattagctgggcatggtggcaggcacctgtagccccggctactcgggagtctgaggcaggataatcgcttgaacccgggaggtggaggttgcagtgagccaagattgcactattgcactccagcctaggcaacagagtgagactccgtctcaaaaaaaaaaatttttttttaattagctaggcatggtggcatacccctgtagtcctagctacctactcaggaggctgaggtgggaggattgtttgagtctgggagttcgaggctgtagtgagctgtgatcatgccactgcactccagcctgggcaacagagagagaccctgtctcaaaaaagaaaaaaaaaaaaaagagtggtgtttttgatagcagttctacagaaactgcagccaccttctacatatgattgttacttaaattcatccctgaaaatttacttaattctgagccctctgtctgtgatatgatcttcccccaattccagatgttgtcagagtacaagccatgacttcggaggaagcaatgttgtcagtaatgaaacttcgaagttcctacccacaggtcatgctgctcctttttctggttcaaggagctaaaaggttgagcttgctgttggaatgacacacgtgtgtgtgtgtgtgtgtgtgtgtgtgtgtgtgtgtgtgtgtatttaaggctgatttaattgacaattatcaaaattactgaatacagagaaaggcaggcgatttgtgccctaaaagtgactaacgagcctctgtgactcccactacagcagttcgcagagatgaaagtggcaacagcctcggcactagggggtttgtatctaggagaacggccgatccgtcagcgctggcttcagccccaggcctcagataagttgggcactgggaagctcagatgagacatcttgctagctcctgttttattccgctccaaacctggagctgagctgaggccatggtcaaagccgactctccagtacccccagaagacactaagccatatgcctctcccccaccatcatttcttttgtcgttttaacagctgaactttgttcgattttatctccctctacttatccaccaacacgagaaagtcatctatttggacgatgatgtaattgtacaaggtactctcgctaactgccaagaacacttggaaaagaagcagctgataagtagaataactgtctctcttcatttttcaaataactaattgtgcagcaagttttgactgcttatttaagttgtgagtacagtattgttgtaaatgtggaagtattttggaaacgggttgatacttactgagacaatccagttgacactctgattgtcaaaaccagcaataaatagcttggtagcctttcctttccctgtatgcctataatgtacggaaataaagtgtcacggatgacattcttaggagtgagctaagttttggtgtttaaatgttgtgttctatctcttccactacaaacaggatacgcattggtgtggtatctacttagcaacagaaataaagaaattagatcagtgccagtttgaactcatcatccagtggctttctaaatctgtaggcaagactcttaataaataaatagtcaagccacttgaaatcagggatccaatactcttctcccatagcaaaatcaagagctgtttaagctctaaggctctatctagcccaaaaacaaatgctataatgttttacttggtggtgtttctaaattcaggtgatatccaagaactgtatgacaccaccttggccctgggccacgcggcggctttctcagatgactgcgatttgccctctgctcaggacataaacagactcgtgggacttcaggtgggcatatgctgtctcagaaatcctcccttcactctacaactctggccccttctcccccctctgcaagtcaaaatgagtgtaacctccacctcaaaaaccttatgggccagtctggactgcagggaggtggaacagtacaggggtctgggactttggttcatatcttagctccatgccttaccaactctggggcaactttctttagccctgcaaggtcccaccttccttacctgaaacatgggaacaatcatgtctactttgttgtgtctttgtgagcagtaatgaaataacatggtgtccaagtgtccagcatgaaataaaagctccagaaatgatcattgttacctaggttgctcatcaccatgctctctgtcagagatgatgttttctgtaaaagagacttgctgaaccattggttctattttcagagttttgaccatcacttttatcccccttccagtagaagaaaatattgattttgttaagggtaaagatctccttaccctgatggaactgaggaaagttgaacctacatgcaatgctgaaaccgaaggggtagctttgaaatatgaggtgttattaagagttaaatgctgtttttcaaaaaagcttctagcaaataattttatgtatgtggcattttaaggcacttcaaggcataggctctgggaccagattcaattttgtcaaaatctgggcactatcacttggtagttttatgacctcgggcaagttacttagccagttgtttctacctcatttgccaaacagaggtaataatagtacttcctttgtagttatcgtgagaattaaattagttaacacatataaagctattacatgagagtaatgaggtagtacatgtaaagttcttagaaaagggcctggtgtatagaaagtactcaagtatttccatgactcctgtgtgaggtttgagagcatcacattaaggaattatagatgataacagtctatatgggtgaaagaatgtgtatgtcctgccctgtacaacattcattcaacaatgacttattgagtgcttactctgtgcctgacactgttttaggtactagtaatatagtgagcaaaacgaaaactcctgcttttgtgtatttcacattctagtgggaacagacagacagtaaacaagtaaaatatttaacagaggattggggtggaggcagggctgtattttaaatacagtaatcagggaaggctccactgagattgtgctgtttgaacctaaacttgaaagaattgagggaaccacctgtgcagatggttagaggggaaaccctccaggaagcgggaagaacaagtgtaaagatcttgaggcaggggtgagtctggttcattaaaggtggtcgctgttgctgagggatcaagaggagaataacaggagttggaaaggtattggagggtcagatgatatagggtatggcaggccattttaggaaatctggctgtttctgtgaatgagatgggaagctattggaggagcttagaggagatgagtgacctagagacagagtggggtggaaaatagtggaagcaaggatactggttaggaggaacttgcagaaatccattgagtggcaattatggcctgaacaggaaggtagcagtgtggtagtagtggcaagagaagtggttggcttccagcattttgaagatgggacctacaccatttgctgaaatatttggatgagaagagagtgagaaaaaaggagtcaaggaggacctaatgaccccaggttttttgcccaagtaactagaaggatagagttgccactgactgaggtggggcaggtgcagggaagcaggtttgggataggattgggatcaattttgggatgtaagttggagctgcctttactaagcatctgaaaggagacatttggatggcagatgtagcaggagttggaagtccagaggagaggtcagggctgtcagatgggtggtatttagagccatgagactggacaaggctgtttatggagttattgctagagaaaggcactagtgctgcactcagacttagggcattcagcatttagaggttggagaaatgagggaaaccagcaaaacaaaacaaaaacaacaaactacccagtggccagtgacacaggaggaaacccaaagatactgcacaagggtttcaagaaaatgatcattttccagaaacaaaagattcgctggtcaaaagcatgcacatcctgttcccttacagaacacatatatgggctatctggactaccggaagaaggccatcaaggaccttggcatcagccccagcacctgctctttcaatcctggtgtgattgttgccaacatgacagaatggaagcaccagcgcatcaccaagcaattggagaaatggatgcaaaagaatgtggagtacgtgaaggcttctctaccattttttccatgcttggaaacaaaatcattcaattaattttccacacatagttcaagggttagaaatatttcacagtcatctcaggtcagattttcttacagaggcaatgttaagaaagaaaagggggcagtcaattaaaacctttcctcaaaagatataaatcagaggaatcaagatcctgtggagcgaggagtccctgattatacattttcctagtaagctgttgaaaaatgtgacttgaatcttttccaccaaacaatcttcatttatcttagttgagtttcccctcctaacatagatttttttattaaggattattatataaagtcaattttgctttttaaggtttatttttataatttataatttttcgttatcggagttttaaaatagagaagataaaaataagtctaatacaagcactattatcccatcattgtattgcctagcagtcttgtgtatctggatattttaataccatcataaccttgaatttgcaagtaaagttattctaaataatgtaggattcgaatttgatctcctgtgtctactatttaaaaccctgggagttaaaatggcaaaatattaacactgttactctaggtgatgtatataggagttcatggtattcttactattttgtgtatgtttgacaattttcaaaatgaaaatttgggggagaatgaaaggccataagtcttagtacatagtgagataatgtcttacatcatttacaatatcagattcgactttatctgagtttgtgggggctccaggccaaatgttgtttttctatttcatttcttagggaaaacctctatagcagctccctgggaggaggggtggccacctccccaatgctgattgtgtttcatgggaaatattccacaattaaccccctgtggcacataaggcacctgggtaagtatttcagaaaaactgtttagaaaaacgcaaatgtccattttatttttgtatttttgagacagagtctcgctctgctgcccaggctggagtgcaatggcgtgatctcggctcactggaacctccgcttcctgggttcaagcaattcacctgcctcagcatctcgagtagctgggattacaggcatgtgccatcacgcccagctaatttctgtatttttagtacagatggggtttcaccatgttggccaggctggtctcaaactcctgaccttaggtgatccacccatttcggcctcccaaagtgctaggattacggcataagccaccatgcccggccgcaaatgtgcattttatagacccagtgagcaccatagcgaggagagggtgctacatacagcaccaggttgttcaattgaaatcctccaggtgaccttggacaaatgacttgaccctcagtgctcagattcagcaagtgcagctgatattctgagctacctgaggagcgtgtttctggagatttatggaaagccatcaaattcatgcttagcatatagtatgtgcttagtaaacatgaactattataaagagaactttcggccgggcgtggtggctcacgcttgtaatcccagcactttgggaggctgaggagggtggataacctgaggttaggagttcaagaccaacctgaccaacgtggtgaaacccgtctctgctaaaaatataaaaattcgctgggcatgggggcaggcacctgcaatcccagctactcgggaggctgaggcaggagaatcgcttggacctggaaggcagaggttgcagtgagctacgattgcgccactgcactccagcctgggcgacaggaccgaaactctatctcaaaaaaaaaaaaaaaaaagagagagagagagagagaactttcactgtcaaaacttcaaaaccttattgaactgtcaagccacacttttattttctcttgcagtaacttacagtggacaaaaccaaataaattagcataatggcttaggatgaattcagaaagctgccattaaaatttatcctttaaaaagcagttgactctgtactctgtgagttctctaagtcttttactcactacacaagtgtagggtttagagtatgaactggaatcccaactatgatttggggcaggttacggaatacatgtaaattgcttagcatagagcctagcatagaggacacattcacatccactctaacacatggccacaatccctgatccaaaaccgctgggccagacatgtttggaagtttagaaagggtttggattttaaaaaggtaatgtggtgctgagtgggatctaggttttactgccaaagaagttattaaaaaaccttttgttttcagacctttggggattatcttagaattgtaggcaatggatatgcacttatatttaccaagtgtccattacattgccaagaactggactaggttctgttaaggaaggtgaatattatttctaattctcacaacaaccctgcaaggtgttatgtcccataatcttttttttttttttttttttttaaaggacgtaattgtggaggctgagttcctgtatgctctcgatgattctgtgggttgcttctgcatcattcccagaatcctctgattttcctgagcatgtatatgcacaaaagagtgccacagggaagttagtgttgtgtctgatttgatttatagtcatgttgggttcaacattaggtcaaatatcaacctttccatgtgcagatcccatcaaagtagaaggtctatttttaaatatgtgtaggaacagttatgcagagcttagatcaataaggttacggcattttatgatcttgagacagactcagaattacattttatgaaacatgcaacttaggccaggcatgatggctcatgcctataatcccagtactttgggaggttgaagcgggtggatcacttgaggtcaggagttcaagaccagcctggccaacatggtgaaaccccatctctactaaaaatatgaaaaattagctgggcatggtggcacacacctgtaatcccagttattcgggaggctgatgcaggagaatagcctaaacctgggaggcagagattgaactgagcagaaatcatgccactgcactccagtctgggtgacagagctagactccatctcaaaagaaaaaaaagagaaatatccactttactgacaagtaggaagggacatactcttcccaaaggaaagatgtcgtttttctttgtaggacagagcttccatctgtgctgaaggttttggaatcagggatggtgtgcaaagtaaatctacacaaaaatcatttgaaaaatgaggtttcaggatgttctggaggcagaagggcaacataacactaatgggcattaagtttgggtctaaacaggcaggcttaagattttttaaatttacaaaatatatttagctaaaagcaatttcatcacccaaactgcaagcccctctgaggtagttctgcatagcccttcagttacgaagctgagaggtgaggatgtcctacttagtagagacttttcatgggaaggtgcctcttcccaaatgaatatttcctttgcatagactctgatgattgataattattccagttatgctgcgatagtttcaaacaactagtttctcttctgcagctgccgtcacagctatgtttattagtaacagaagccaggttgtgttgttgttaacgtcatacaatagaataacataaccctagcaaatcaaccctctcgtaattcaatggactttcagctgtttaaagaatatatatatcaaattccttttcatggaaagaaagtcgaacactatagagatttttaaaaaattgtacattcacgccaccttaatgtagttctagaataggtattctaaagagtattctaagcaatggcactgttagggtaaatgcatagtctctcgaagtcatgacttatgaggggagtaatgttcaggtggagatagatagctgtttgtttaaaaagtagatcttagtcacattttatatttagacaagactgttcaaaagcaaatgttgccatttttcattaaggaggtgaaatgcagagaaaaaagaacccctataaactcttgggtgggagggaaattaatagaacttcttgggggacaatgcggcaatctctatcaaaattgaaaaggcacacaaccttcaatctagcaattccacctacaatattttatcctacatatatatatatatatatatatatatatatatatatatatatatatatatatatatttgtacacatacactagacatacatagagggctgctcattgctgtgtttatgctaataataggatagaaacaatctaaatgtccttaataaggaacttggtcaataaatagtatcattctatacagtcactaaaaataatttggtaaatccacatgtactgctgtggaaagtttcccaagacagtaattttaaaaggcaatgtccacataaagaaacaaaataatttttttttaaaggcaaggtagcagtatgctctattttgtcttctgtctttaaatatacatatacatgcatacaggtcaaacaatgctataacactactagaaggattcacaagagactaacagtggttgatttggagacctggggtgggtagaaaattcactgtataacctttttatttgtttacctttttttaaactatgaacttgtattcaatttataatacaaaaatgttattctctaacaagcctattattttttctctatacacaatgaaggctggaatccagatgccagatattcggagcattttctgcaggaagctaaattactccactggaatggaagacataaaccttgggacttccctagtgttcacaacgacttatgggaaagctggtttgttcctgaccctgcagggatatttaaactcaatcaccatagctgatataactctacccttaaaatattccctgtatagaaatgtggaattgtccctttgtagccaactataacattgttctttatgaatattacctttgatacatatgatccacaatataaaaaccaaaaactactgtgtgcaaattataccttggaccatataggcattgattaacttctttaagtacatgtgataactatggaaatcaagattatgtgactgaaaaacataaaggaagagacccatctagataacagcaatcaacctgcttaattctgaatgacaattatatccacaaatttttaaaacttctacatgtatttttcacatgaagatctccttaacaggttgccaaccttttcttttataaaactattacatttaaaatatggacgtctgaaaaataaaatattcatcatttttatga

SEQ ID NO: 43 - DNA, 37876 bp, Homo sapiens
aatgctacttgtaaacaaggctagaaagggtggagaatgaaatgagatggggggtggggaaacaaaccctttagttacaatatcttagggaaatgaatctacaataagacaaatttcaaatcaagttgctccactatactgcataagcagtttagaatcttaagcagatgcaaaaagaataaagcaaatgggaggaaaaaaaaggccgataaagtttctggctacaatacaagagacatatcattaccatatgatctaatgtgggtgtcagccggattgtgttcattgagggaaaccttattttttaactgtgctatggagtagaagcaggaggttttcaacctagtcacagagcagcacctaccccctcctcctttccacacctgcaaactcttttacttgggctgaatatttagtgtaattacatctcagctttgagggctcctgtggcaaattcccggattaaaaggtatggttttcaataattgtcctgaactctgctacagactaataaaacttcggtcaagttgcgagcaaaagggattatttggtgagaaaaagaaaaggaaaaaaaaaactgttaaacttttatagtttttatgcaacattttaaacaagtattatttgaaaacagaagttaaatatttgataaaatgattgaatgcattgttttatttctttctcttctgtttttgcaaagatgcttcttaaaaaactgtaacctaacaccatgactctctatattaatgtttttgtgtttgtattaatgaatgtttagctcttcaagagatggtaaccgaaaagtattctgaagtagcatatctgtaattgacctatatatttaaaaaatgtatttttctcctgaatttttgattgctttaaggacttttaaaagcccagaagaactgaactctggtgattagctgaaaatacctaatgtatatttcttcaaccccagaaatgaacagaaattatcaccagagaagtgaaaataaacattgaaaatatttatgttattaaatgcctaagatactaaaaacgctgtataatttcttaaatgtaaagtgtcccagtcagtatcttcactgcaagtgaaattttaagatacattcactataaaatgaggatgtgggttaattttctaattttaaaacagggtaacacagtgaccactgattaagtgggctcccagtgatgtaaatacctgtggcttttttttttcctgttgctgtttctaaccagaaaagagccaaatgcctcctatagtaacccttgtttgtggataaatgccgcctttattctttattttaaaattacatatattataattgaagtttttaatcatctagtgctgtaggattttaattttgttttgcatttatagcttcacttatctcttgagggttaaattttgactttgaaagtgacaccagaggcatagataacataatgcaaatgttgatctggatgacatacttcatttaatgggcttaactagttttaggaaccagaaattattatttttggtaaaacatttgtaaactatggcaactagcttcagtggagtagtgatattacattagtaattagcatcttggacattgtcatgcatttttagactacttaaaacagtttcagtataatttaaacagcatatcatctcaataacaatctctttggttactacttggacagctgctctttgctctttatatttctgattaattaaggaaagaaggaaatgacgaaaggaattatcagtattgacagcccacattaaatgttttaagatgctgggtcttgaagtaccatgacactaatttaaaacagatgattttatggaagattttgcacaaagtttctggacatgcaattattttttcacagtacagtcagggttaaatgcacacacacacatacactctctctctgtcacacacacatgaacacacacacatacattctctctctctcacacacacacacacacgagcaaatgaaaatgaaataaaggtcggtgattgaagttataagctgcctgtctatattcagcttcaatcaaaaagaatattgtttggagaatttgtaccattttaacaggagtaaacaaacataaattataatactatttctctcagctaatactcaacattttctttttgtgggttgttagtgaaacaaccaggcatgttctgctctggagaaaagatttcaaagtgacatctgcattaactgtcgttgctatttattaaatctgcaatgactttgcttcatttttcttttaaacttgtaagacattaaatatgcaaggctagcaagcttgtggtaaaccataaacattgcatttttaatgggaaacagatacaaaaccactccctcagatacaatccaaaggaacaggctgccaaaacaaaagtcttctcttaaagggatactcagtaactgaatgagagtgggctgctagaagaagcttaatgttgaacttaaagtggcagtgtgaataataatctttatgatattttgttaaatgaaaagccacaagcctgtattcaacatgtgctgccttagacacatatcagtagtaaatataaactaagaacaaacatgtaagaaactgaaaaacatttgtttcttctctagagaatctaggcaaaaattcccagaagataccttaaggttagatcatacaaagatctttcttttctcttctcttctttctttctctctctctctctctttctttcactttcttcctttctttctttttctctttctttctttccttttctttcttccttctttctttctttcttccttccttctttctttcttcttttttttaatatgctacaattggataatgactcaaaacagctgtaagattctacttacgaacgtacagctttaatatggattcgtctaagtgtacaattcaaggtagagatgatgggactaaatatctgctatgatgggactaaatatctactatgttttggagatatcagaatggtttcaatgcaatttaaaaaatatttcatctcccaaatgactttgctgctatataatcaagtacttttgttattcagatttattacgattttgtcactcagatttatttagtgcacttcagttgatttaacaacatagattcgtgcttgtggaatgaatggataaatatggaatacatttatcaaaacaatacttgtttttttacaaaatgccctgttagcaaaatgagatcatatatacatcacataaaaatcagaattttccatatgtgtttattagcttattaaacataatgtttgagaaactaggaaattgatttattttttaaagccgatcttgcttataccaagttgaggttttcaatctgctttttttatatcagaaattcgatactgaaaaaaagctaattttgtgttttaaaaaatcagactgattgcttggaacaaatggaataaatcgtcttgtcaataaagtgatggtcaattgagtcatttgtgtgcaaaatattgtgcaaggcccgggtacagaacaaggaataataagacacgccctgaaggagtacatcgtctagtgagggacagaccaagcacgcaaaacaaattgcaatataatgtgataagttctttaaaagaggtaagagcaacgtgctttgggagcagagaagagggagaaagcagcatcttgcctggatgagccaggggacacagaagagaagcccactatctcatttaatctttacaactctcttgcaaggtcggtattctacatggcaagtagctttgattgtcagggttcaggtgaggactgggaatggagtgacaatgaaaaggaatgtggctagagctattaattcataccaatttatgagtggtctgacatacagcacagggactgtggacagtattgataagccataggaagttaataaatggtttatagtagaaattaataagacaaaattgaatttttagacgatgactcaggcagcaaaatggaagatggactgaaatagaggaaatatgcaaggcagagatgaattagaagctcttgtagtagtttagggagagatgagaagggcctggatcaaaataattgtggtaggatggagagatgtgactggcttccagagatatttctgaagcagaaattggagatctcctatgtggatagagataattttatctgaccatgtgttaagtgagcattgaaaagcccaacatgatttattaccatgacaattttgcaaatgatttggatatatagtatatcatcttagtttagacccaaaattcaaacaagcagatttaaataatactcagatttctcatcctaagtaaatagctgtgcaaatgatactataatgtacctgattgtctttcaatacatttttaatgctctgcttcctgataacaaatgaaatattattttgcatcttttctctgtgctcactgtattgtggcatattatataagaaacgacacacagattaggcagtgctactcttcttaaatctctcatttgtttcctaggttccctggttgtgaaaatacatgagataaatcatgaaggccactatcatcctccttctgcttgcacaagtttcctgggctggaccgtttcaacagagaggcttatttgactttatgctagaagatgaggcttctgggataggcccagaagttcctgatgaccgcgacttcgagccctccctaggcccagtgtgccccttccgctgtcaatgccatcttcgagtggtccagtgttctgatttgggtgagtgggatgcagtttctctttacctaccttacttgttttattcttgggaatggcaactctgagagtttagcattttcagttttaatctctctaaatttgagagacagtgccacctaatgaggagtaaaggaagcagaacaggatagaaagaaaagtagcgttgttgttctctctttctctctctctctccctctctgtccctcttccttttttcctccattactttgcaatcttggacaaatcatttttaaaaatatttctgagctttatatcccttcttctacaaaataaaattttgaattaaaaaagtcttatgttctaaaatttcagagtaatggtttaatcttaattctataatatgcttttataaaatattagatattaagaaaatcaggtcagtctctctactattcacttagcccagacaacagagtttcaacattactaaattgtaaaataatcagttatcaaaagcaaaacacatcaaattttatgacaaaatcttatctttcaagtatcaaaatactcccttaatctctgagtcttagttttgtctttacttttgacattttgtaatccagctgcttatattctttagaaagtttcaaaggaaatatttatcactaaggtatggtgtaaatattcaatataattgtgttacatatatctttagcctaacaccctaaagacagtttgatttatcatcttttcagaaaaatttggtctggaaattccaagagcattacacttagaagataaatctccagaaagattgaagctcagtggatgggccaaaggggaatgaactcagtttacatggcagctcattcacattcctccttttgaaggggtgtattttcttactggagatgaaaagaaaaaaaaatctttatatcatgattccgccatgtgtacttccttctggaagaaattccatactatgatcaggcacttctttcagaagtcctatatttactcagaacatgctttctagcagtagtttgcagaagaaaaatgcaacttctacaattggaataaactgcctataggaacccagaaaaaatataaagtatattcagtagtaacgactgaaaaacacttgaaatagcttcttcaacacatatattgtatagctatttaaaacccaaatacaaatgttatatgaagactttcaaaaggccgcaggataattccaatggatctatttgttcagtcattcagaagctatatcgggaacccatcatggatgagctctgctctaggcatggggagaaaggatgaggaagacaaatatggccctagttcttgtggatcttatgttctagtggtggtgactattactttttgaattgtgtatttgccacaggggagattggattactcttcagaaattttataagcatctagagatgacctgcattattgccttgggcaggaaaataacagggttgaaaaaaatctgaacaaagaaatcaccatttgatggatatacacaggataatcttttctgaagttactaaaatggcgaagttcccaaaaaatgtaatgcgaattaaatttcactttgcctctgagaaaaagttaaaagaatttattattactctcgctacatgtattatcaaaaatgaagggttgatatttttaaggaaagaagagttggccagtcactttagtgaagttttattttttcgtaaatatagtttgcctttgcttccatgaaaaaatagctcataaaccttgaccctgatgaaagcactgggccagttttccaattctctgttatgtaaaaaggcataagtcaattgttcaaagtgaaacaacaacaacaacaacaaaatgtagtcttaggaagcagcaagttcactgacttgggatctttatgacagttttgttgttgccattgatattgttttgtttattttttgttttcagatgagaaagttttctacatgttatcttttttctaggagctcaaagtgtacatcattcctttattatagctaggtttactgactcatatactaaggaagtagctaaaattataaaaataatttgtttttaaaaccatatttaactaagggaactaagtaagttccaatgagcagtggtctcatgcaaggtattttcaatattttaaaatttacagatgaatatttaaatatattataaaagttttaatcagctatctctaagaaaatacatttcttaaagggaaatgaaattcacttgactttaaataaaacaaatgaactcatttcatgtttttaactattatctaactcttccttactttatgatgctggcaagctgttgagagccttgacatctccatctgcagaaaaatcacagtcttagaaatcctattaatcgtgtgaggtacctgggtcatagtagcagcttcatgcagtgttaaaattatatgatgattatatgcagtaacagatgaagaaaaaaagaaagaaagcaggagaaatgcaccacctcattcattgtaaatgcagtatagttgattttttaatttgttttatgtcctctagtgatctaagcatgaagcttgaattattataataaagaaaataaatgcaatgcagttggggatggcaaatgttaatgcttatctgtatcaaagactaacactgtcttcaggattatccttggtggattatccttggcagacacttaatgagcagagagaagctacaatgttgaaggacaaaagtcctttgtcatcttattatcgaaataatgtttaatacaaataaactttttaaattaaaatgtttgactactttttaccactaagaaatattcttggcaaagttaaacaacatcaaaattttaaacaattctttcaaagctaagaagtaaaaacctatgaaattaaaattatgtaattactctgcaggataatttgatgcctctggaaaaatgcatggactgttttagtccctaattctaatttatcacagtagtattaacacgtgcttttttttttttttaagaggatgagggattgagacagtaaacatgaattcctcatagatattggccaagttgtttcattgaacttgttgcaacttaccttgtaattggaaccacaattttatgagacccatatcttgtcttcttttatctatcatgttaagaaataaaccagttccctcttaattatagcatttatttcaaaaagcaatgttaaaaataaatgtagagttagcaaattcagaagtctttcagttactttataataataaatccacaatgtaactcattcttctaaaaatcaaaaaaatttaaaacgttctgattttgatgggattttctattttatatgcttggcatcctgaagaagacagcttcccttacttaggtactctttggcttagccattcatctttggatcaagtgtcaccaggtagtataatttggtatggacttaacacctcattactgaaatgcaaatcagtcctgacaagtcaaataagaacaagtattgtcttttgactagtctccaaaattaaaataataattcttgatgtatttcttataaacaaatttcagaagagttaaaatgcctcttaaaactatttaatagtggaaagaacttgggctgtgcagttaaacacctctgatctcaaattctgctttgctgtttactacctgtaaccttgaaactttcaaaactttgtttcctcatttgataaatggaaatatatcttatttcactgggtaagaatagaaaaatatatgcacaaatgtttattatagtaacttacatttcacttaccatttcaggcaaagttggctaagaacatgaggctgtttctgatatttccttttatttttatgtattaatgagaataataggtataggccatatacttattagagactctcaatgacttatacttattattctcaattcatattatatcatattatactcattgaaaataagccatatacttattagagacttatttagagtcttattagagacttattaagagtctctaataagtatatgggttgtcaagctagacacaaaatagtaccatctctctccacctctctaaagaggaccacatcatctccaaatgtaaatagacaagaacaaaaaaaattgtgcatttactaggcaattgaatgttctccaaaccaatattcctttgaacaaaatgagtttgtttgatttgagaacaatgaagtatttggctattttataatcataagtgattcatacccccacacacttagccctctagaaatggtgccagaagatgaaacacatttaattttgccatatagaagcattgcaaataactactggtttctaataatgtaccttataatgcaaataatgttttaatttttaaaaatatcagaaaaagtacaaccttttaaattatgtagttgcttcttcttcataatcatttttcttgaactggtgaaaaattttgtcagaagttaccacttgggacatattgtactacagcttctcgcttggctggagaaactggttttccagaagcagaccttatacaagaggtaaatgaaccattagacttctcccatgaaatcaacccagaaaaataaattaggactattttgtagaggaacagacagaatgctagaggctcagttgcctttatcatttatgtctggctctgcagcagcaggggtgtgaggtgctcctcattcagagtttcgaatgcaccaaaagggtgtttccaaaacatgatatgggaaggaggctgtgcacagagtatgaccactggattgcctaaattgacattgggtaggagtggagtatgggtgatcttcagatgaagcaagagtaatgctcaatgtgacctggttaaacaagtctcctgaatccaggggttaaagatggagaggaggaagagagggagtcaagaaggtcaaagggagcgtctgtctccctgacctgaatgacaactaacatagcccttgtttccttcttggtccccaggagggagagagaggcagctgtgtgggatcaaggcattttgtgagattgcagctgtgattcattttcctttggaagaacatccctagctccaggggatatggtgggaattggttagctaaaatatcaattccctgggtaaaagaggaaaaccatgagaccctctaatcttaacttttctccttcaaaagagtggaaaaagattacatagttcctcaaaaattaaaaaaaaaatgagtctgcaattcagtcttaataaaaagagaaagcccttagcatatatactgtaacagtaaagactcagttactcttgacttagtctgtggactgctttaacttctgtagcttgcctacttctgccttttttactgtaatctacatttgctttgattattctataataatcaattatatatacatatctgtgattatacaatatcttttatctttttatatatctattttattttttttcactagaaaagaagtattgcaataatttatcttcgtacaacctctacacaacaaactgccttatactttgtagactctttacacatcactgaacgattgatgaatgaatacacgaacatatgcatggcttggttcttgaattaatgcttggatgaatattctacaatattcttgactctagcaagctgcaaagagaagggaacatgcctgattgagaaacaaaagtgatttctcagtgcatccttgctccttccctttaaggacaactgtaaaaccaggaagcttagaaattccttgagtttgactggaaagagaatagaattaaagagaagaatcatctatgtatgaagcctggtctaactgataacgcagtcagattgccatttttaagatggaaaaaggggaacatgcttgccttgagcagaaaagtttttggtggggctggagctcctaaatattattttggtcatttgcccaaaaactgaagtacaccaccaatgtcccaattatgaagttgaatacagaattataaaaaaaaattgttgaaagtcaataagaataaatcttagaatttggactcctgccacatggcagaaaaaaagcatgatgttttaagacaacctggcctttgtccaacatgatgtttaccagattgctgacattttctagcataacaatactattcatcattgggataaccaaaagaagggaaataaaaaaaaaaagaagtctatttcttactagtctttattcagaaatgatttttttggtaatatcttaagtagtatcttatttgctttaataaataacttgattttaaagaagataaacctccttacaaaaactgggagagcaaatgtctaatccaggctaccttgaaaatagtgtgttttagtggaaaatttagaattatgttaaataaggctgctcaatgaaaaataaatgtaggaaaccactatgctcctgttactacagctgagtgaattttaccccaaaacatggtggcttaaaaaaaaatttaatttgctcacaacttgaggtatggaaaatttgggaagggctctgaagggctgttctcacttggggtcactcttgcatttgtagtcaaatgttacccgggatttataatcttaagaaggctagcctgggctggacacctgttcactctcataactgacagttgctgctgctgtcgcccacaagcttggctgttgtatcctctggattgcctcagacagcctctcttttttcctatggcccctggctgtcccagagcaagcatcccagaattgggtagcagctgtacaaccttttctgacctagtctcaaatgttatggtgtttcaggctattgattcctagaggcatcacaaggccatcctgaattcaaagggaagagagaggaattagatgctacctcctaatggtattgggataaatgcatattgtagaagagcatgcaggatagaaaatttaatgtatgccatctttgaaaaatataatcatctacatatttacttacatttatatacatttctaatgagaagtttgagcataattatgtattatgtagagaaagcccacagatattacatgtcccccatgaaggtcattatttaatgattacaaactacattaagatgttaaataattataattaaattaatttacaaattaacttcatagttacttaattcttctacttaagattgtgagaaaagtattaagtcgtaccttaatgactttgttttcattatggaacattttttggacataaattgaacctggctaattgatacatataatttaaaatgctaacattttactttttatatcattttatgaataaccataaaattcatcagtatcaataggaattatttagttaaaaatcacatacaattaatacaatcataggcttaaaggcagaatttaaatttgtttatttaaaagttaaaaaaattaaggtaggataactgtttcatagaatactatctgtttttatattttttgaagattaggtttagttcaaataagctttttgcaattatcaaaaataatctctggtcctcgtgtatttctaccacaatttacttccggcttggtgttttcagatgaggaaatggagcctgaggaatgctaacttacagattccggtcatctctccttaacagccaagttgattttaacccgagccattctgactctaatgatgtacaaacaaagagtaatattttatagatttgcaaaagagtgtagcatttgctaccattaaaatagggttaaattgaccaggagcagtttttgaggagtctaattactcattggggatcatgtgcttcctaaactgaaggcttatccaaaagccctgaacttggtagacaagcaccccaaaggccctgaacttcatgggaacaatgatgaatgcagaaagaccaggaaataactgtcaagacaaaaacatttcaggaccaagatctttagatgaacaccttgtgcttgacatacctgaaaaacagatttcagcctctaggataatatgcatagtaattgtacagaaaagaaagagttacagatgaataatcagaaagattattcagaaggataatgagagcaacaccctctattttgcttattaataataatcataggtagcaatacttgagacgctgctatgcactatggtaggagattattttgtagcatagcttattgaattctcacaaaaattctgtgaaagacttaagaaaactgaggacagagggtttaaacaatatgtcttctaattttctttttcttttttttttttttttagacagagtcttgctctgtcacccaggctggagtgcagtggcgcgatctcggctcactgcaagctccgcctcccgggttcacgccattctcctgcctcagcctcctgagtagctgggactacaggcacccaccaccacgcccggctaattttttgtatttttcagtagagacggggtttcaccgtgttagccaggatggtctcgatctcctgatctcgtgatccacccgcctcggcttcccaaagtgctgggattacaggcgtgagtcaccgcgcccggcctcaatatgtcttctaatcttaaagataaagaagaggaaccagaattgaaattcacataacagtcttataaaaaaatgttattataggagcatgtttaaatatgaaaattctgcagaataaaatgaccccattgggtacccaccacagagcttcaaccagtgtcaactaatgccgttatttttctatctccacccacttccatatcattttgaagcaaattccagatatatgattttatctaacaatacacttaccagtatgtttctctgaaaaataaagctctcaaataaaatagccatagtttatagcttatttatatgagtcaggatccagatgaagtacatacattgctttttttaaaaatagcttctgttttttggtttttttttttttttttttttttgacaggatctccccctgttgcctaggctggagtgcagtggcatgatcacagctcactgtagcctcaacctccccaggctcaggggatcctccttcccgagtagatgggactacaggcttgtgccaccatgctcagctaattttttgtaaagatggggtcttgctatgttgcccaggctggtcttgaactcagaggctcaagcaatccacctgtctgagattccaaaagttctggaattagaggcaagagccacagcacccagctaaaacatctcttaactctcctttacactacagattcacaatttcttcattttcttttggaatttagaggattaatcagattcaggattaattgtttgtttttgaaaatacaaatctatgaatggggatttgtttcttcatttagaagcttctaactgatgcttttccaggagaaatatatgccatgtagagaaactcttactgctggagtagtcactctattagacagaaaaatcagtcttcttgagatatgtatgtgacaaaaggtgcttcacaaatatggcaaagacactgaagaaagtaagagcaattttcaggtgcagataatgggaatgacatatttgatagtaagtagcattcatttataaaatattcctggaaacaggaaaaaatataattattataaccagttgtatcctaatacttctgaggaaaataaaaactcctatgatagcaggttatagggagatggttataacagaacatggcagaaatgatctcaaagccatactcataaacttttcatcatgggacagcaaggcagatagactttaaaattaattaatcagaaaggcacttcttgttttcaaagcagccagagcaaaatgctgatgagaaacagtaattagtcctccttactcaggaaaaaaataaataaactaacaaaacaaacaaagaccctgaaatgcaggacagtatagtttaaacttatacatctatggcctgtaagaagtttagaggtgcaagattactgttatacaggggtggtcagcatgaatattacagaggagagggataacggatatgcttcaagggattgttagaatggaaatagaaataaatgaataagtggagttttacataaaatatgcattgcatgaacaaaaattgagtagctaggaatgagtgtaatatgctcacggaatagctgtagatcagcattagaaaatatgcacaatgatcacatgcataaatggcacaccacggctaggcacggtggctcacacctgtaatcccagcactttgggaggccgaggctggtggatcatgaggtcaggagatcgagaccatcctggctaacacggtgaaactccatctttactaaaaatacaaaaaattagccaggcactggtggcaaacgcctgtagtcccagctactgaggcaggagaatcgcttgaatcgggaggcggaggttaaagtgagctgagatgatgccattgcattccaggctgagcgacagagcaagactcttgtctcaaacaaaaaaacaaaaacaaaaacaaaaacaaaaaacatagttctggagtgaggactcaaactatcctggttcttgatctactttagccatgaggcaccttagataagctatttaacttctttgggtttctgtttccttacctatgaaatgagaagattagactgccttaaaattctctgatttctgggataagtaaaattttgaatgttgaacgagttaatttctcattaaagtcaataccaaacctaacaaaagaagagcctgccatctgctatcataatcattttttaaagaaggtgtatttaaaagtagaaatggaagtgaaggcaggaaatggtctcagatggtctcagaaattgtgtgtgtgtgtgtgtgtgtgtgtgtctgtctgtctgtgtgtgtgtgtctgagataatttacattaaaactaaccacactgcttttattgttttttttttattttgatatggattgctaaaaacctcatcatagagtctacctaatcagcatttgggaaccatagattagctgatatttaaggacccttccctttgtgacattcagagaactcataataactagagtaaattcttcattatactctgtctcttgtctttgagcaagctagttaacactccaatgccttatctaccccttacaggtacagcatattactgggtctgatgtcagaacaattatttcaggggatacagataggtatgccagaaaaaaaagtcatgctggaagccaggagagttgtcatctaatccacattttgtcattcctaactagataagcttgttcatgttatgaaactttttaaaataattgaaagtatgagattaccatactgccttacctatctcattgggttattgtaaggtaaataataacatattttcatttttaaaaataaactctaaaactaaattattaataaaaaatatgtgaaatccccccaataaacataaatttactaattcagagcaggttgtagaactataattttaatcattgaaatgactctccaagaactaaactacaagaattagaatcctgaggatggtattccttttttctgaatctctagaaataagatgtatataaattaccttaagtagttcctagtgttataaaattttaggatgacaacataagtgaaagtgtcagccatccagacacatcattctttccctacacatttgaaattttatctgcagtttcgcattgacaaaatgttgagagtcactagaatttaagttcgccaatgaataaaagcaagcgtaagtggaaattaggactgtgatgaaggtgcccaagaaggaatgataaaatgtagtaactacgttccaaatgaaaagaagtttgtcttttctgggttggagaacaccaattaacaaagatttggcagaaatctaccattcctaattgcatgaaattagcaaattgacatttccgaaaatggcagtgattacaactgtacagtgtcattaagcaacctcctacaaggtagctgttctggtgttttaccgttcatcactgaaaacacttaactcttgttatttctatgggaactgtgtctataagagttacacatttatgtaacatatttatgtaagttcagaattacttgtattttgatacttaaacttataaagataggtggtcactgaattaagaacaagattccacctgcaaccccaactatcaatggagcagtgatattataaataaaaaaatatttggaaaagactcagaaataggtagcttcaggtacgttttctgtaactttcatggaagaaatgaagacagtcaaagtatggctaccatggtggtttacaagtatgtttacataaaactcaaaattgaaaagtgattttctcgacatagcggttattataccctgttgtaattttattttaattgaaaacagtaaactgaattatatttttatgaagtcacgggcaatatctgccttggtcctgctatattcccaggatctaataaattcatggtgcccaagaggtattcaataaaggcttgttgaatttatgaaaaaataatcttcagtacttcaagtttcagatatgatggagagattgcttctaccaaaggctaaaaaatatttctgatttgtgttatgcagtcttaaaatacagaaatgatcacattaatttgagttaatagaatatcaaatttttacttgatgtcctacttcaatatgaaacaatgaaaaaaagaaaggcaaaaggccttatttaataattttctctattatgattcatgatgatttattcaaaaataactgccttttgtataattctggttcatccttatatgactagctgaatgactactaaaatattttttaataccaggaccatttggtaattcaatgaatttacatttacaaactaaaaacaataatacactcagctagaccaaaatctaaagtccaaaagtaatgcttcataaaattaatttcagatatgtcatactacccaatttatttcattctaactagccatatatctattggtcataaaatatcaactgaaatggatattgttttggcattccaatgaaaactaaaagaaccgttatcccaaaatgttggataaattttcaagatcctgccacaagttgattatatgtttatatgattttaactgtagatctgtgacagggttaggtgtatcaaaaagatctttattactgatgatttggctagagtaattattgacacggtatttatgtaaaaatgtataaatttgccaatcactcgtgctgactacttatcaaaataactacttttcaatacaacaacaaagaggtaaaacatatagatttgagccacaccctaatgcaacacaaatgttcccctaatgcagaggaataattccatgaggaaaatatcatgttgagtttattattaaatacaaaaagtcatttgacttggttgcaaaagataaagcaaaaattttaccctacaatgaatgtaattcttagaagaagaaaaatatgttgttactgttaagatgatcatcataacattaatttcttggtaaatatatgctgtgtgattctgtagccacatgtcctttctactcacagcacactcctattactcttatgctaggtctggacaaagtgccaaaggatcttccccctgacacaactctgctagacctgcaaaacaacaaaataaccgaaatcaaagatggagactttaagaacctgaagaaccttcacgtaagaactatttttttttaactcacaataagataagactcaaggtatttttcaaaacactacctagataaggccaagagtactatgtaccaacaaagaagcacattagtgtttattaacttcaccttttttttttttttttactttttttttattaattctgccccaaacactgtttttctttttctttttttttttttttttgaattatgcttcttttttttttaattttttttttattatactctaagttttagggtacatgtgcacattgtgcaggttagttacatatgtatacatgtgccatgctggtgcgctgcacccactaacgtgtcatctagcattaggtatatctcccaatgctatcccttccccttcccccgaccccaccacagtccccagagtgtgatattccccttcctgtgtccatgtgatctcattgttcaattcccacgtatgagtgagaatatgcggtgtttggttttttgttcttgcgatagtttacctttttagcagtggtagggaagcaaagcatcatatttattaaccactaacaatttacctgacttttttaatacatataccccatatatcttaggtattttcttcataaaaatactttagatcttaattctctctcacgttttcaggaataaaaattgtctttcaaattaaattgtattttaatagtggaacaaaacacaaaatggattgatcctagtattattttatttctttgtttcttttgtttgttttcatgcattttctaagagaggtgtgaatgatgttctaaagtctcaaagattggaatcaagtgaaaaaaagataattattcatatttcatttagcgaaatataattctatcttcatatatatgtttcttgctttatctttaggattatgcatgctgtgtccttatctgtatgtttattttgattttctcttatctctctactctatcataatgttcagtctatcagtcaggatttcatcagaaaagagatgccactcacaaaggggtttcatggaggagactttattgaaacctctatttgcaaaggggcatgggaacccaacaaggcactgtgaagcacccagtcccacaaaggtctagaagaatttgagggtctcagagccatgggagagctgggtagttccacctcttaatttcctgcctgtgtcttgtgtggttgcatctacttcagaccaaaagacaagggcatttgattaatgcattccccagaggtcagcttcccaggacttgaagaagggccaaaaaagggcaaagaatgaatattgtggtagttgggagagaatatgctatacaagggaaatgaccaacccaataaaatagaggtaagccttgctaagagaaccttctgtaacagtaaatgcattgtttgttcacacagaacaccagaatcactataaaatgcattttctcacccagttctctatctgtagaatgagtgtgatgtggtcttccatcaaaatatgagtgcacattaaatataaataaggcagacttcaatgtccaaaatatatactctggaaatctcactgtgtctacttccattctggtagaccactctgaagcattgagtctggttcttggcattttaagaaaggcattcaagaacatctagagaaggatgaccatggagataaagaatctggaaattaggtctcataggcaccgtggatggagaggtggatgtctaaactcagtgttgagggtcactagtggcacatttgaagggccatgttgaagaaaaagaatggtatttacttgtttcaactacaagatgacagaatcctcctagtgagtagaagttttacagaagcagatttttattcaatattaaaaataaaaattaaagaatcagaattttcagacaatacagagacttacctagtgatttgttacctgcctgtggagattagagttcacagcttcgtataatgaatgtcataggaatacattcttaatgttgggagcataaacataccaaactctaatttcatatctacttatttattctagtcattatagaaaataattgaggaagatatgtcatgagaataggcactacttactaaagtataaatataaatcatctgatatacattagaataaaaatatagatacaaaggaaataatataaaatagaataaactggtcataattattacagagttactataatgaagataccatttagttataaactttacaatagccaagatgggaaaagcagtaaacatttagccattagaagaaaatataccagatttttttaaaggaagaaaaatttttttctaaaattttaagactctacaaggaaccattttaaaaaatgcagaaaggccgggtgcagtggctcatgcctgtaatcccaggactttgggaggtcaaggcgggtggatcacaaggttaagagatcaagaccatcctggccaacatggtgaaaccctgtctctactgaaaataaaaaaattagctgggcatggtggcgcgctcctgtagtcccagctactcgggagtctgaggcaggagaatcgcttgaacccaggatggggaggttgcagtgagtcgagatcacgccactgcactgcagccctggtgacagagtgagactccatctcaaaaaaaaaaaaaaattggtagataaaacagtgccatgatcaatttattgacgtgtccaacaatataagcacaatatgatatgagtagtgagtgttatggacttaaagtaaaagaaaaaattaggcatcattatttatccaattaccagacacagttttgagagaatatgcgaggaaggagttttagacgatcagcagaagtttgaaggactttctgtacaagaagaaagcaaaggcagaagaaaataagaaacagacaaataaaaatacgagttggctagagtgaaagaaacagctgaagcaatggaggataaggacaagctggaggttccgacctttgggtctctttccgctgatgagaaccttattcaccaactccccctcacttcaccttaaggtttcaccgggaatgagctgatggggaaaccagcaaggttttcagtgactatttaagctactgttggcataagtttaaaaaggagaccataaaaaatgaatattattaaatttagattactaaaatatttttaaaacttttatttggataagtttgccttatagctactgttttaaaggatgaaacattcttactgtcatctcaacttcctgtacatttaagtatacttggaatattttttaaaaaaaccctttatatccttaagtaagtgacatctagtgtccatgacattctcattaaatctggcatttgtaataatgtgttgtttcttttcctaagactccttctgtttttaggcagccatcatcttgacaatctctttctttctacttcaaagtatacatcagatgaataaagagagttcattagagccttcaaccattcagaggatgttaagcagctatttttctcttactgtttcattcatgatcctttctatccttgttattttgcaaataaacatcataatttcacctagcaaagccacacttaaggaaggagagaaatgaaaatttagcaaggattaaaatagaaagaatttaacagaatcatgttccctgtatgtgcttcattatgagtggtgtgtgttacataagagtaattttatacctatatatagtgggaaaaactatataattgttctataaaataatggaaaattaagtgtggtaatgacaacatttaatatattttctttgaattgaagcttaataagttgagtaaggaaaatttttttaattaaaaatcagcaaaaattgtcaaagactgaacaaaagcaaacacttgtttagcaattactatatatactaggcactattcttagtaccttatatacattaacttatttaattcttataactattcttatgaggtagtcacacttgatatctcctttaaatgggcacagaaaggttaagttacatgctcatagtcacaggccaaataagacccagagcttgagattctaaactcagaattctggcttgagtatgtgcactaataattgcctataaatgtaacagtcaccaaaaaagcctttagaacaatatttggtacagtgtaagacctacataaatggctttggagaaaaaaatcatattaaaagtcaggttttaaaaacatttaacataatacagatttttcagatcatgtttaatacatctaattatatcacactttcaaaatggtcttctatggataggaattgaatatctcctttgcgattttcattaggcatccacaattttggatgtcttgtaatgatatatgtcacctcactccactcagctggctctggcttttccctgattttttgtttgttaatgtcaatttttttatgaccttaactcccacaagtttttgaacttttgattattaatcgcagtgtgttagaattgtgtatcaatcaaccaatgcatctttcaggattagttaaatgattatgttacttaataagaagttttaattcatcgagtaatgtgaactatatgaggatatacatatattaattaatcagctattacctttagaaaacattcttgcatttctgagactaaaaatactcgctttcctattataggtccccttttgcccctccacattttcatatatgcgaaacatatactataattgaaaatgcaaaattagaccttaataagttattttaagttccttataattagttaataaagtggcttgaaataataaaaccatgtggttttgttagacatacagataattgaaaaagaataaaatagtccaaaaataggcctagcaattgttataagcataataataatgaattagaggtaatttcttatataaggagaactcagaaataaaaatcaaataattacccaaaatattaacgtatttgtcatataaaacctttacacataaaaaaaggcaaaaaaaaatcaggagaaaaatatgttaaggctctctgtgtcatattgaccatatctttattttctaaatcaattattaacctatattaaaatttaataaacatgagaagtattggtgatcaagcaatctcctctctccaaaaaatacaataaatggtaggaaaataaaaaaaaaatagtttaacctttttaaatgacaaggaaatacaaagaaaagcaatgagctacaacatgatattattttggccatactcttaagaaacataatatcaaatattgcaaggctacgggaaaattttagttccttgcattgctggtgatagcataaattggtatcatccttttgtagcggaatccatgttcatgatcaatgaagatggacttttaagttaaaaagctgactgcgggatggatgtctgtggcattgattattttcaggtatctagggtcatttcaattgttagcagtatttattatttaaaaattacatagatatatacacgtacatatacatacatacatgtctgtgtgtgtagagtgcatgtatgtttatgtatatattatatatcttattacatttcccttctcttcattcctgattttcaggtcctcatattataactttttttttttttgagacaatctttcccagtcaccaaggctggagtgcagtcgtgtgatctcagctcactgcaacctctgcctcccaggttcaagtgatcctcctgtctcagcctcccaagtagccgggactaccggcacccaccaccacgcccagctaatttttgtatttttgatacagacgggatttcgccatgctggccaggcttgtctcgaactcctggcctcaagtgatcctcccacctcagcctcccaaagtgctgggattacaggcatgagccaccgcacctggcctatacacttcttaagtaaagaaataatacttacttaatttttttctgatttcttgcaattttttagatttctctgctatccctatgaatggaatgaacaaacatgcccttgttttacatgtatgtggaaggttttggatttaaagagatgtttttcttcactatctacaggcattgattcttgtcaacaataaaattagcaaagttagtcctggagcatttacacctttggtgaagttggaacgactttatctgtccaagaatcagctgaaggaattgccagaaaaaatgcccaaaactcttcaggagctgcgtgcccatgagaatgagatcaccaaagtgcgaaaagttactttcaatggactgaaccagatgattgtcataggtacagacatttttataactttaagaccaaaactcaagtttttatcttaagagatttcaactgggttttaagtgcaggaaggtaaattagctacaagctacatgcctggagcctatgtgatttataagaacagggccaagagaaattgggattttgaatctggaccttacagtgatgtttttatgtatgtccttgagtatctgagaatatggagaaaaccctagggctgaagttaccctaccacacacacaatatgcaaagatgagtttaaatagtgcttaactacagatattttgagatacctttccgttttggggacctgttgtattctaaacactcataaatcatttgctttaaaaatatgttatggctgggcgcggtggctcatgcctgtaatcccagcactttgggaggccgaagcaggcggatcacgaggtcaggagatcgagaccatcctggctaacatggtgaaaccccatctctactaaaaatacaaaaaattagccgggcgtggtggtgggggcctgtagtaccagctactcgggaggctgaggcaggagaatggcgtgaacccgggaggcggagcttgcagtgagccgagatggccccactgcactccagcctgggtgacagagtgagactacgtctcaaaaaaaaaaaaatttctctaaacatatagtaaaaattgtaattttattattggcttataaaatgctagattgaaattctttaacaaaattttaaaataccttaggaaaataataaataacgtaagatgggaattgtaaacttgctttagttgatttctgggcaaacctgtgtatgcatcttaaataattttattggtattgctttcactaatagtctttttcataagtcattattattcataagtcattgtctgtttggcttttgttttaataagggaaatttttatcctattttgctattctcctgaggagcatgctctttaacttcacttttgttttttagtcaagttgatattaatccctatttctttataggttgcttgctgaaacagatactacagtgactagtaatatcctaaaatttcctctaaaagccttgcacttattacatttgtagaactgggcaccaatccgctgaagagctcaggaattgaaaatggggctttccagggaatgaagaagctctcctacatccgcattgctgataccaatatcaccagcattcctcaaggtgatagaagattctccaaaacattttgaaaaatttaaattcaaaggctttaattaaaaaaaaaaaatcttgtggaaactggaattgtcacctaagaggccaaccttatttccagcaaattctctattactgctagtgtttcatccagtgtttatatttccagcaaattctctattactgctagtgttatatccagtgattcagtctggatgaccacggggccatccaggctcactgtagagatgggtagactcctgttaatgtctagtttaagacacaacttaatgcacagtgattttataatattgtaaaatcacaaagaaaaagtacatttatttaaaaaatagcatgccttggtgtttgtaaaaaaaaaaaaaaagatatatgggagtacctctgaaattgatccaatttttatcttgagtctgcaatagcttagggaatttttttttcctttttaagacactccagttattaatatctgaatgatagtggtagttgtgtgttgtgaagagtgtagattttggagtcagtttgcttgagcccaaattaccataaagtggttcaaagactttgaaaaagttattcatttgtcctctatctctttatctgtcaagtggaaataatactgctatccacttcattgagttgttttaaagttaaataaataattagagaaatatttagcatatagataagtagggaattaatataactctctattatgcattaaaaatgttctgaacaatcagtatgtgtaggcgatgtaccaaacacttaagacagggcagggaacaggatatgctacatgcctttaggagcttactctctaaaaccaagccagacaaatacacagcaatgaccacatagccacaagggtaagttcattgttccaagggattcccaggagaggcacaaaagccagtctttgtgaattacaaaaggcatcaaaccaccaataataaattcctctaacttgcacatcgtccctactctgggtttttcagtctcacagaagccctctatattatctagttttcccctcagtctgtccctttctcaacttagatgccttgttcttgagtgcgtacaaaatgtagacatttggccacagaaaacaccagttgtcctttattgttcttttacagaaatttcaactcctgagagtacatattccataggatgctttcttaccaccccttgccctcctcctagtcttttgaatacagagcatgcttttgacttccttagtagcaactactggcatagatagatacatagatgataaagactgatttataattcataaagcactttcatgttgagtctccaattttttgcatgtaacaagtaatcttttgctatccccagtgcaggaatgaaatatttatatctcagatagatataaattggggattgatatagatagatagatagatagatagatagatagatagatcttattaaaattcttgctgaaatttatttcatgcagccagatgacttacatttagcacaatctcagactttgctgtccctcttaatgcatgctccaaaatatccttcactgataccttttatcatttcatgatctcttttcctttactttgctatgtcttctatctatcccaggtattctttcctcatcatttatagcttgcttttatttactaccgcttaatagaaaagttaagtaactacaatttattaagcatgtatttagttccgggtatcatgccaaatgcttgtcatggagtcttctatatgattcttacaacgtccctatatagtagggttataattcctgtttcataaaagtggaaaatgaggcttaaacaggtaaagaaaattgtaattaagttcttagagctaggaagcggcagagatggaattgtgtggtgctgatgtcagaactcgtgtgtttaactatttcactctgttggcatattaagtcctcctttctattcatcgttatgcttatctaatacatgattccaccttgcttaggctgggatacctatgcctgaatatcagcaacctcctggtgatattttctcccatcactcatggaaatggaaaggcagtagaaagtagtgtagagactataaaaatcatacacttagatcaacctgggtgagagacctaactcagtcatttagttgtactgtgactttaggataattattctgcatttctataacctcaggtttgttagatgttacatggagctattaataaccctgtctactaggattattgtgaggattactctatagaagtaaggcttgtattgtacacgcaagtacttggcccaatgtaaacctcaatatattttatcttaaaaaaggaaaagaaaaaagaaaatttaaaataaatgaacaaacaaataaataaaataactggagtatgggttctttaactcaatgccacagttgcagaagctaatgatgcactttacaaatttgtctatctcaaacctattgcaaggttttctcccatagtcaaacttcttcttagctataactttacatttgggaaactgacatcccaaaaagggagacactttgaaactaagtaaggccgatggttgtgatagcaattggtgtactggaggcactgcattaaaaaatatacattttgcattactttgtaattactttgtaactttgagtcttatttatttaactgtgaaaagggattagtgaccaataatttatgttttgagaggcttaaaggatttgaagtaggaaaagtgccaaggtcaatgttcggtgcgtaacagacatacaataaatagatgttccttttcctagcagctctaacacaaaatatgctaccataggaaactaagaatcattttcaagtcaaatatggactaaactattttattaaatggacaatattgacagaattcagtgtgatgtgataaaaattttagacaaaatgaaacctgtggtttttcaattctgtgtctttatagacaaatagccaagactttctgccaatcagatgttctttctacacttaaccaatttgctattttctctgtatctattgctattaagtggaacaatatgttattttaaaagctgtataaaatataatacagcctcagatgctaggaggaaatgaaaataaaatatttaaacttttatatttataatactcgatctttggaaatcacagccatgcaagtactatctagaggtttagtgggtactttggatgtaaaattattaccccaggtgctccacatatggcagatcacttgattatagacctctccactccttctgcataaacattctggatttaataggcataagtaaatgttagctgtttctacacagacattttgcagaggtatttgatgcttttatggaaaagtcaattaaggctaagaccagcacagtatatcagtgttaatttttaatgatgctcattaatgaaatagacaattaagtttgtacatgggtttaatttatacgtaatctcttcattatggttcgaatagtgactttcccactttataattactatcttttatcaacgtcagttttagcccattaacaaaggtggaagagaataatgagactcagcgttgacttcagttcttctattccaagaacaaaaattgactacatgatagaaatcatccaggtttttgttaaagtcaacctaagagaaaaatagcaagggcttccactacttccaaaagcacacattattataaaagggatgaaaaaaaaagataaaagtaaagctgattctttgaaactgtgtgtcttttagaaaattgatggcatatgtcttctttaagtttgtccacattctgtacttataatgtttatctgctaatttaacatctttaattccacattccaggtcttcctccttcccttacggaattacatcttgatggcaacaaaatcagcagagttgatgcagctagcctgaaaggactgaataatttggctaagtaataatattctttcatgacattctatcagaacaatggctaggtatattagtgcttatatgataagaattataaacatgatgattgatttttgagtgtactacatttcactgctgttgttgtttctataatctcaaacttcagcatatccaattatttcttgagaagaagccaatgaaatagtgcccttactaaaaccaccaagatcagcttcatattttattaatactatactgtttatagattagttatattttatacacaaagtgtgtgattaaatcaatatgtgcatttaatatgttctaacttatttgcatcaaacagaaagttaagtaaattataacacagttgctagaatttgaaaatccattaaaatgaaatctaccaagacagagaaatattgagcatcacacaaattactattttaataattatgagattctctaaccccctcttctctgaaaagtttaaaataaaatatctctgggcatttaatgtagatcaacaaaagaaaagcttttgttgttgttgtttttgctggcccttcttaatgattttttttaaaataagtgatactagtacttgtcctggtttcaaacataacttcaatctggcaaacgttttcacttgtcttcaaggaacactatgttctttttgatctgtacatattgctgactgtccctacagagaagcacactatcatgccagatttactcattcctgttgttatatataaatttcatggtggataaataaatataaaatatatctttgaatgtgtatatatatatatatgcatgtgtgtgtgtataatcaactcctttactaggtaaaatattctttgatgggaaaagtggtttttgatccatgagacctctgtccctcacaatgcctagcataatatcatgcacataagttttcaagaatatttgtttattaaatatacaaataaatgtttgaataagtgaacagtttttaaaaataaactattaggaatattatgttccaatattatggttgaccataatttgatgttggaacttaggatattataaggaataggagactatgtccaatcacgttctgtcagatgaatctcaaagacagtaactttgagccgagaccttaacaataaatggactttgtccaggctcagagaggttggagaaagcactccaagaactgggaagagtaagtgcaaaaacaaaaaatgtcctttcctatagacttgattaactacacaatgcttgtaagaaaggcatccatgtgtggtgtttgctttcatttctgctttctgttgcaggttgggattgagtttcaacagcatctctgctgttgacaatggctctctggccaacacgcctcatctgagggagcttcacttggacaacaacaagcttaccagagtacctggtgggctggcagagcataagtacatccaggtaatgcaaagccactgcttatgtgaggaatatccaaaaagcaagacccccaccctgcttatgggatgctgggaagcaggaagctcttcttagaagttttttttccagagtgtcttagttagaatttctatgacaaaataccataaaaaaaattaaatcatgaagcacaatttacattagctagatttcaataaagtttttgatttagaagtatggagatgaaacttaaagtcttctgtaatgctgatatttttttcagtaggggtggtgatgttggtgccatagtgagtagggggagtttgaagccacaagtaaaataaaaattctttttttttactgtcactaattttaattttcaaattattcaagaattgactggaaagagcttctttggtctagctcctgattctttttgacatggcctcatcatttttctttatttcctctaaaaaaaaaatgagatacgtttgcagaatgtgcaggtttgttatataggtatacgtgtgccatggtggtttgctggccctactgacccatcctctaagttcgcccgctcaccccctaccccctgttgtgtgttttgttaccctctctgtgtccgtgtgttctcagcattcaacttccatttatgcgtgagaacatgcagtatttggttttctgttcctgtgttagtttgctgaggatgatggcttctagtttcatccatgtccttgtaaaggacatgatcccattcctttttatggctgcatagtattccacggtgtatatgtaccacatttcctttatccagtctatcattgatgtgcatttggattggttccatgtttttgctattgtaaaatagtgctgcaataaacattatgtgtgcatatgtctttatagtagaatgatttatatttctttgggtatatacccagtaatgggattgctgggtcaaatggtatttctggttctacatccttgaggaattgctacactgtctttcacaatggttgaactaatttatgctctcaccaacaatgtaaaagcactcctatttctccacagcctcatcagcatctactgtttcctgactttttaataatcaccatactgactggcatgagataatatctcatctccagccacagggaatcattaatctattttatcatttttgtttgtttcatagaccatagttttgtgtagattccaggaatactttaacatctagaaattttataattttaactcctgtatttggttttataatctaattttgagataatcctagtatatgatatgagtctaattcattttctgtatgtgatagcaattgtcccaatgtcatttgttggaaataatattctttctccaatgaattgtcttgtcactgttgaaaatcactcgatcataaatgtaagggtttatttctggactttcaattctattacatttatctatatgtctagtcatatgacagtattatacccttcaattactgtagcttttgattacgttttgaaattagaaaatgtaggttctccaactttgttcttttttttcaaagttattttggctattctggttcctttgcattccatatcaattttaggatctactttttcatttctggaaaaatattcttgtaaggctttgaaaggtattgttttgaatctacagatcattgggaagaattactatcttaataatattgagccttccaagtcacaaacaagggttatttatatcttcttttctttttctcaacagtttttgtcatttttagcatacatgccttgcaattcttttactacattcattgtttttcattctttttgatgctgttttgaattgttaatttttttatttgtttgctgctaatgtataaacatacaattgatgtttatatattgagctatcctggtactatgccaaatttgtttttagttgcagtaatttttgtgagttcctttggatattctatattcaggatatattatttaaaaatagacagctttagttattttatttggattcttttaggtctccccctcccccacaacccaccctttgcattggctggaatcgccagtgcaatgttgaacaaaggtgatgaaattagacatctttgccttatttgctagtttaggaggagggagcattcattttaccattagttacgatgttagccacaggtcttctatagatgctctttatcaagttgaggaagttcccttctatttctgatttactgaaaacatttattatgaatttttttcttacatgtttttcctgcttctattgagataatcatgcgagttttggcctttatatttttgatatagtgtattacattgatattactttgattgattttcataagttaaaccaattttacaaccctgagataaatcatgtttggtcctatagcatgaaatcattttatatgttgtgaaatgtagcttcctaacattttgtgaaagattttttgtccatattcataagaggtatttgattacatttttttttcttatgatgaattttgtctggctttggtcttagaaaatattgaccccatagaatgagtttggaatctacttttattttgttctacacagactaatacttacgtcttgatattttgttctctcactttcaatattaaccataaattgctcaccaaacaccccttcctttacttgctaatcactactggaatatagaggatggtaaatgacaacaagaaacttccaaaatatgagaaccataaaccatacatataagtgttgctttcactttaatattccttgtttctgtttttatatgacatctactaattcgcttttcagcccttacaaaaacaaagccgttttcaccagcacatgaatgtgaatgtcctagtgggtagaacaatatttcaaattttttttttttttttttttttttttttgagtcggagcgtctcgctctgtcacctaggctggactgcatacaatggcacaatctcggctcactgcaacctccgcctctcgggttcaagaaattctcctgcctcagcctcccgagtagctgggattacaggcacgtgccgccatgccatgctaatttttgtatttttagtagaaacggggtttcatcatgttggtgaggctggtcttgaacacctgacctcatgatccatccgcctcggcctcccaaagtgctgagattacagacataagccaccacgcccaggctttcaagttatgttttaagggagtacttcataggttttatagctcacttaagatcttgttggtggcaggacgcagtggctcatgccagtaatcccagcactttgggaggctgaggtgggcggatcacgatgtcaggagatcgagaccatcctggctaacatggtgaaaccccctctctactaaaaatacaaaaaattagccgggcgtggtggtgggcgcctgtagtcccagctactcgggaggctgaggcaggagaatggcgtgaacccgggaggcggagcttgcagtgagccgagattgcgacaccgcacttcagcctggataacagcgcgagactccgtctcagaaaaaaaaaaaaaaaagaccttgttgtcttagtgttatattctaaccttgcttgtatgatttcagagaagttgcttcttgacctacagaactcatatcctcaaagtgaactgtaaactcatttctaacattctttgtataattccggtttttagggaccctaagaaaatctatggccaaattaccattatcttaaacatgattgtaaaacataattcagaaaaaaaactctgattaattatattgcactgtattcaagtaaaacgtattacgtaaaatatgtatttgttaaaacttcctaggtctattctaaatgctgtgatgtttaaatatttaagaatttcttggagtttgtgattctttatttcaattccagtactttatgctctctttttctttttcactacacagcactttctcattctatatcattttgttaaaaggtgtatatattttttgtcctgaaaacataatatttcatgtagacccaatatagtcatgtagacctgatatatgaaataacatttattcattcaacacatatttattgaacacctggtctgttctagtactggagatacagccataaacaagcagaaccattcttgtctcatggagcttttactctagaggagagaaacaaacaatatcaaataagcataatatgctacatattgataatgctatgaagaaaaacatgtaacgtaattctgccccagagaatggcagaatgggatggtcagggaaggtctctctggtaagaaaaaacgacttacatgaggcaacaagccttgaagacaccttagagattattccaggttgagtaaacggtgttgataacttaagaagagatcatgctttgtgcattagaagagcagcaagtagaccagatgactggcttttacagtaagagaaaaggaggtcagagtagaaggatgtcagatcatgtaggatttgtaggcccctttgagaactttagattttattattctgcatgagattggaaaccactggagttctgaggcaaagaacatataatttggtttactttctaaagcaattgctctgagagcttaaaaaaagaataaaatttaggaaggcaaaaggggaagcaggaataataatcagggcaacttcaatcatttggaaggaaacaatggtgacttggacaaggttgtcggagtagaggtggagagaactagattaagtgtacattttgaaggctgagctagcaagatttgttgttgattatgtagagagcataagagaattggagctcaaggataatgacaatgtatatagcctgagcatctgaaatgattggcatgcaatttactgagatggggaagacaagactaaagaagggaaaagcaaattttcaaaaggaagggagaaatcaaaagtttaatctgagaagtagtcagttattcaaagtggggcctgtcgtggtggcttacgcctgtaatccaagcacttcaggaggctgaggtggccggatcacttgaggtcagaagttctagaccagcctggccaacatggtgaaaacccaactctactaaaaacaaaaattagccgggcatggtgtgtgtgcctgtagtcccggctactcagtaggctgaggcaggagaatagcttcaacctgtgaggcagaggctgcaatgcactgaggtcatgccactgcactccagcctgggtgacaaagcaagattccatctcaaaaaaaaaaaaaaaaaaaaaaagtgaaggattaaaaaataataaaaaaaataaaatgtttacctgaagggcctcaacatatttagagaataataattattttctatcgtttcatgttgtaggttgtctaccttcataacaacaatatctctgtagttggatcaagtgacttctgcccacctggacacaacaccaaaaaggcttcttattcgggtgtgagtcttttcagcaacccggtccagtactgggagatacagccatccaccttcagatgtgtctacgtgcgctctgccattcaactcggaaactataagtaattctcaagaaagccctcatttttataacctggcaaaatcttgttaatgtcattgctaaaaaataaataaaagctagatactggaaacctaactgcaatgtggatgttttacccacatgacttattatgcataaagccaaatttccagtttaagtaattgcctacaataaaaagaaattttgcctgccattttcagaatcatcttttgaagctttctgttgatgttaactgagctactagagatattcttatttcactaaatgtaaaatttggagtaaatatatatgtcaatatttagtaaagcttttcttttttaatttccaggaaaaaataaaaagagtatgagtcttctgtaattcattgagcagttagctcatttgagataaagtcaaatgccaaacactagctctgtattaatccccatcattactggtaaagcctcatttgaatgtgtgaattcaatacaggctatgtaaaatttttactaatgtcattattttgaaaaaataaatttaaaaatacattcaaaattactattgtatacaagcttaattgttaatattccctaaacacaattttatgaagggagaagacattggtttgttgacaataacagtacatcttttcaagttctcagctatttcttctacctctccctatcttacatttgagtatggtaacttatgtcatctatgttgaatgtaagcttataaagcacaaagcatacatttcctgactggtctagagaactgatgtttcaatttacccctctgctaaataaatattaaaactatcatgtgacttcatgtaa

SEQ ID NO: 44 - DNA, 4845 bp, Homo sapiens
aaaaggaagttatctggactcaagagggtcacagcaccctcctgaaaactgcagcttccttctcaccttgaagaataatcctagaaaactcacaaaatgtgtgatgcttttgtaggtacctggaaacttgtctccagtgaaaactttgatgattatatgaaagaagtaggtaaggaaatgcgttgtggaatgactggatttataatattttcttttgggaaaaagagtttacagctgtgtttatagcaatgtctggaagccctggccagaaatgaaaaatgctgctttctatagagaggctgcacacatagcaagtgataatcatttgtttctagagaaattctgaaccaaagctacaactaatgtttcctaaaggtgtaccaatataaaaaggtgtctaaatggaatgtttattgtctttagaaatgataagatttgactttatttgaaaaacttgggtatccttggtttacttagctctttgcctgtttctctttcatccccttttgcatgtaaattaagcaataacttggaaaaaagttagtatgcaataattttcatttcaaactgaaagcactctagttcccttaatgcaaggttctttttcagtaaccgtatgttagccaattattttcttgtctcaatgttaatctattaaaatatgtggttgttttatgatagacaaaaattttaatttcagaaaatatgtttcttaaatggcttaaatacttcctttgactagaaatgacatagtatgccatagaattatcaaccaatttaaaaggagaatgttacgcatataacatacctcttctttgatagtagaggtttttaattttttagacgctgttaactgtcagcatgtcattggatgaatgtctctcagataactatggaggtaaatcagaaaagacaacttctcactcaggcagcttctactttgaaaacctttctccctcaaccccatgcatgacagtccaataaagtcagaactggggttagcaaactggggaggaattttatgcaatcttagggtttagaatgtaatcattaaatcgcaaaacacttaaccctcctgtaaattatacagtatatatttttttgcttgtctgtaactatgtttcttgtttttagatgatagggaaattggtgacttcagcatgagagagactttctagaataaactagagtgattcaataaactaattaatatgcactgatgcagaaaagccaggatttggggccatttaactatttatttttagaaaaatgttatacttttaatatttatattttctaataatactgtgtttttaaattataaagggctgattataattaaagtcaataaaacaccttctgcatgaaattagctgctgtaattgaggatgagtgggcaggtattgtcttcatcatcaaataaaagcaaaatcaagcaaatggagactggtttttcccaaggtcagtcattctagaatcacactcagttttgcctgcattcacgaagtggactcacttcatacatttaatgttatattttgtaactgagccaggacatgaagacacacctgtggccatttttcagacagacagccaaatcggagcctcagcattacttattttgcgccatatatctctcccagttcttcccaatttctaacctttggttgcctttagtcaaagaaagagcttagatttacatgcacatgtttaaaaaattcagcaaatctatgactgccataaactctgcatgacatacacagtgtcagcaagttactgctatgttaggctgtaaattattcattccataccttgcacaagaaaatatattcccctttttaagaaagaaaagttcacaacttaggtgactggaaatcaaagtattggcttctaacctattttaaactaagaaatagtgatttattaaatgttaaagttttcacaatttgatgactagtcccttttaaatatcccctataaattattagcaatgatatcaccattctaaaatgttataaatgtaggaaacattttgccttttgtagaaattcatgaaaatcttcatttcatggtggagtaatttgagaaagaagcacagaaaagtagacttggcaacaaatgctatgaaatgtgacttttgtatactcaaaacagacgaacctttaactaaataactctacattaacccccaaaattctgttgaaaattctgtctttgtgccttcttaaatgtaatattgagtatctaagatggaatggtcaagtagcctcaagtattttattaagagagaaaaataacagtggctaacattttaaatatatatcttcccaaccacttaacctttatacatatttttgttgaaaataaacaatgggtctcctgagaagttgtatccagaccagagaaagggaagtttaaagaataggcctacacctattgtttctcagaggttgtgtttttgttttctttgtgggttttcttttttttttttttttaagtattggcctgattttatctgcaggagctgtttaaattaggcctttaagaaactctctgtgcctttttcctcctgcacatgcacctgtgtgcacacacacattctctgacttggataagtacgtgagagaaaatgtaaatctgacatcttttcttttcctaactgtaggagtgggctttgccaccaggaaagtggctggcatggccaaacctaacatgatcatcagtgtgaatggggatgtgatcaccattaaatctgaaagtacctttaaaaatactgagatttccttcatactgggccaggaatttgacgaagtcactgcagatgacaggaaagtcaaggtgagaaataaggaagtggcacagagtacatgcctggtttctaaatcaccactgctataagaaatcattttatgataaaaggaggaacaccattttatcataagccaaagatccctgaactcctacatctaaactgtgtttccttagatatagagttggtgaatttttccccattttattaagttgtcctcatgttaaaaaagtattattatttttagagacatgttctcactctgtcaaacaggctgcggtgacatggcacaatcatagctcactacagcctcgaattcctgggttcaagtgtttctcccacttcagcctcctgagtagctggtaatacagctgtgtgccatcacacccagctaatttcttaatttttttgtagagacagagttttactatgttgcccaggctggtctcgaactcctggcctcaagcaatcctcctgccttggcctccctaaatgctggaattacagttgtgagccaccacacctggcctgtctccaaattaacaaaaaaattattaacataatttatttgagtcatacaatacatagagtatttcaagtgaattaaaatactataacaatgtaagagaatgtttataaaaatggaagaaagaaatagaaaaaccacccatactactaccatcgcaatgtaaatttctttttcatattccttcacagtaatttttccaattatgtaatttgtataacactctggacataacgtatccataagtggttatgttgttgtttttgagactcattttttttcttgttgcaatatattcttgtcatttagaattactaatgacctcaaaatattcctttgaacaaaggcactctattttaaatttttttctgcctccctctgcacattgtcattacattttcttatgcctacagagcaccataaccttagatgggggtgtcctggtacatgtgcagaaatgggatggaaaatcaaccaccataaagagaaaacgagaggatgataaactggtggtggtgagtatcttctagctacttaattctggatcttactgctaggttatctcatgatcactattccacttaaggaaacagattttccttttgattatctgaaacaaaaagaggattttattggaattatgcttccactctggcatttgcccttcatgcttttgagttcaacaaaggcatgctgtcttctaggaagcattctctgcctgcttccaggcatcctaaggctgtctccagtggtacctccaccatattgtattacctatctctgcttatgtttctcagtcaccatacagattttaaggcacctggaggggaaaacttgtattttcctggtctttatatctccctatcttattacaatatatgggttacatatataggagtccagaaatgaatatctttggaatgaatattgttttattcccaacattcagagagacaataaataaatccatggtttaatccagtgattgaccaagaattgttttttgtgtctaggaatgcgtcatgaaaggcgtcacttccacgagagtttatgagagagcataagccaagggacgttgacctggactgaagttcgcattgaactctacaacattctgtgggatatattgttcaaaaagatattgttgttttccatgatttagcaagcaactaattttctcccaagctgattttattcaatatggttacgttggttaaataaactttttttagatttagaaggtgatgtaatgatgtattcattgtgcttatgatgtattcttagtcataactgagtgaaggaaatgggaaatttgcattatttctttgttctgatatgaataataacatatttcataataattcaaggtaaaaagggatatctatggatttccctaggtaggagataacaagtatgtaccattactgaatattaaatccttctttaccatagctacagttaagtaggtgtatctcagaaacctaaggtagttttaaatgtagtgaaattg

SEQ ID NO: 45 - DNA, 98898 bp, Homo sapiens
atgaattcctatacaagaggctcccgcaggcccagcgccaaagctgcctcccctgcagcctcggtgacttcccgggtctctccctccggccctggtgtcccgggtgagcccagcacacgttgggattttggttgtttgttggcctggcccgactgtccctgtctctgagggcagagtcgggtcccatcccgggacacgcctggggttagccaccgacctgcagcctcccggccgagggtgcggggttggcggtaaggcctgccccagtgccccccagcagccgggcctccgactgcaggcccgggtccccgctcctccgcgcggagtcgggcggggataacctttgatcccgagccctcccctcgagagggggtggggggaggaggggatcgggtttcacggagtgttgggggataggactgggggcatccggcccgaaggcgccccctctgtgccccctccggggaagtctgggatccaggccctcgcccccagccgtgggcgcgcgcccctcgcagccggggtccggggagggagggtcccggcagggggcgccggggagggaggaccaggagacccgcggccccgcctccgccgcgccctcctcccgggcgggataattgaacggcgcggccctggcccagcgttggctgccgaggctcggccggagcgtggagcccgcgccgctgccccaggaccgcgcccgcgcctttgtccgccgccgcccaccgcccgtcgcccgccgcccatggagcgcgccgcgccgtcgcgccgggtcccgcttccgctgctgctgctcggcggccttgcgctgctggcggccggaggtaggggcgtcccgggtccgccgccccagcttagggtcccgaccccctcggcctcgcgctccctgcgagtttcggaaccacggggactcggagtccgtgcgttgccctgcgcggcgcccccggactgtcagcgccgaggcctcggcgacgcccccctcccccacggccagctccggtcctcatctcctccccggcctggggacttgtttcaaaaccggattcccccacccctcaaacacaccgtcctaccccagtcctagcaaatccagccggctccgggggccgcatcccgggccctgggggttcaggggcgctagctgggctgggggacgctggctgggggttaccgagcccagggcgccttgcacttgacgctggaagcgccctcggctatctttcctcaccgcttcccgcctccacccccaggtaggagctgttgtacccagcttgcggatgtgaaacttgagcctggagggtgggaagcagtcttttccccaggagacactagcggtcctgggataggggctggagaggaagaaatgagaaagccagggagcagcctggaggtttttggggcgtagctgggaggatggaggggatgcggacctggccacctcctccctgcctccctcccgggacagagggcccaaggcagtggttctgccgggctcggtgctcagcggggactggggactggtcacttccaccaacggcaagggggatggagttttccaagagcagatctgatcgatggcccagaccttaggccccaactctgggactgacagctccgggacagtgcccacccagcccgcgcttttctcccctctaaccctcaaggcctggtccctggggggactgccacgaggtcctctgatcagagcagctgctgggcggcagagctatgacctgtgacctctctgctgacccgtggcttctcagagccactagccaggcccggcactcctggcgtctttgtttctccagtggcccaggtccaggggagtgccctagaccaccctcagaatccgagtcttaatccctggtttagttgagttccttttaacctctggtgaccgcctttgttagtcaaaaggtcgcttgtcccaactaatgctcactgggggattccaggaagggggctgaagggggctggagggggaggggaggctgggagctgagctctacagagctttcttgactggctggctgcagcagagccctgtggagctctgattgttcaggcggtgctgggcacggcctgggcacctcgtggggttggagatggtgtggggaggcgcagagctcagtgttggcaccaggagccttcgcagcccctgggggctccctggaggctctttagaagagatggagcttgatgtaaggggagcgcgggaagagggcattccagcaagcagcaggccgggtggctgccagctggagggaaaaccccgaggggccctgggtgatgggtgggtgggacatccgagactcctgttagaaaaggaaggagcctcagaggccccgattgtgtcgatgaggaagctgagggcctgagagaaggcgtggtaaaactctccctggccccggagtctctgcgttccctctcactgttcttttctgtctgcggtttgcgaacaatttctccctatgtgtgtgtgactgaatgaacaccccaggacttgcgggcccagtgtggctcactgctgagccacagagaagtttgtaattggaagggtttaaaaaagcctcctaattgcacacttcgataaaagcagctggatgtcctgtgggccttttgtttcttttggggagaagtctctttgagtttcaacaggtttaatttggtacagtttgggaaggggcttttgaagactgcctggcccctatctgcagctgtgaggcccccgaagccctgtatgtaaggccacaagtggcaccgcccctgctctcagagagctgtggggccgcagatggtgagcctgttagctgatctgcagaaactcctttggcgacggccgcttaaatggagaagggcgctgatctttcttgccaaacggccgagaggagccgcctgtctgtcctgtgtctgtccgtcccgttgggctttactgagagctgggtgggagggagtggagaggaggaggtgttaggaaaagacgattgtgttttctccaaggctttcttggcctctggctgcagccgggcagcgtttccgactgattaaaagaaagttgggagggagaacaaaggccagggaggacttggcttgaaaacgtgtggtctgtgccgccactcctggaagtttcccagtcaggaggtgggggccagggcactgaatgcatgaagatgagactctgtgccatgggggtcagggctggggcctctcctgcagcacccacagctctggctcacgccccgctcctggccctgctgagtgccccccaactcagggctgcatttgccacccctgttaggtgtgtagggcaggagtaggggcacgcggctgactcatcttcaggtcctggagggctccacgggccttgtgagactagaaatcagtttgcatcagaaaaagccatgagatggtttggtggttttctcatttataaaatgaagggaacaaaaacctacttaggttgtcttgaggattaagagagagaacataggatagtgtctaccatggcagctatattattattattattattttattttatttttgagacggagtttcgctcttgtcgcccaggctggagtgcaatggcatgatctcgactcactgcaacctccgcctcccgagttgaagcgattctcctgcttcagcctccccagcagctgggattgcaggcgcccatcacgcccagctaatttttgtacttttagtagagatggggtttcaccatcttggccaggctagtctcgaactcctgacctcaggtgatccacctacctcggcctcccaaagtgctggaattacaggtgtgagccaccgtgccggctggcagccctgttattaatgttagctattattcctgttgtccccttctctaggaagtgttggcaccaggagccttcgcagcccttgggggctccctggcggctccttggaggagatgaggcttgatgtgaggggagcgcgggaagagcgcaattctgccaataccccagaattgttttccccaagatgcctctgcacattctactactactgaatttcccagccaggcgctgagcagaaggccccatggggctataggactggtagtcgtcagtgccaaacccgtgtcaggaaaggtggtgttcttagccattcagtcattcattcactaagggacagctcagtgccagacactgctctataacttgtggatgtggcaggaaaggagagagacccagtttttccccctcatgcaactaggagatccagaaaaatgaactgagccctactggcagagtcagggaagacttcccggaggaagcggcatgcaaactgggaacctaaggaggaaaaggcagtggctaagtctgtgggtagggctgggaggatgggggaaagggtgttcctggcaggggaaatggcagggccaaatacctggaaggaagagaaaacacgagacttccagggaaaccccctccttctacccacttccagttccttccagttccaccccctcctcaccactgggggagactgtgctgtctagagacttctccagcagcttccctgacctggtgagactttaagcccgggctctgagcactgggcacctggtcagggccgccttccaggtgaagtttattagaacagttctaagagggcatgtagttattttgccagcatattttatacaacaagattttccttttgcagaatagcaaatcataacaatttgatgaatgaatcctttcgtaggccccatatggttccagtttccttgtgatgatctcacatgtggccctataagtaaacagggtgggaggggggaaccactgtgtcaacttccctgggataggagaccccctcaggctggaggggagctcaggactggctaagtcatctgccacaagtcacccagcgaggagcggggctggggctgggcctagagctgggctgggccccacctcctttaaccccacagtggtcctaactagaggctggggtgggagggagcgaggcaccagtcgccatagcttcctacaggttatttgcgggttactacactgtgcggagccaacatgagaagggggttaggaagctgtgtgttggtcccaattctgaaagtgtctggagagatcttgatgacacccacaaactctctgcctctgtttccttcactataagatgtgagtgtcctctgggtaattattataggtgaaatgctttacatttagtaaccaatgtcgtcatctcagcagccctacgaaataggtgatccagtgttgttttgaacctatttttattttttattattatttttgagacggggtctcactctgccggccaggctggagggcagtagtgtgatctcggctcactgtaacctccacctcctgtattcaaaccattctcctgcctcagtctcctgagtagctgcgactacaggcatgcgccaccacacctggctaatttttgtatttttagtagagatgtagtttcaccatgttggccagactggtcttgaactcctgacctcaagtgatccacctgtctcggcctcccaaagtgttgggattacaggcgtgagccactgcgcctggccctgtttttcattttggatcctgttacccactggagtgaaaaggtcctgtgagttttgctacctaggtatgaagcccggcttcttgttttggcctagaactcctctatggacctgcacagtgccatttctgagagtcactgatgcgtgtgataggttgaggatggaaatccaacacctgtgcacccagcatggtctccccacagcacggggactcgagcaccttcctgccccacccctgccccagttcacctgtgttacctagctataccctcaccctagccctgcaaaggaggtgctgtcattgtccccctcatcaatgaggggacatggaggcccagagagtccaggtagcaagactgtgggtgcatagctgctaagtgacagcagcaggacttgagcttgggcagcttggccctgacgtcatacccctcaccagcacactggacagcctcgcgtatctttttttttgagacggagtcttgcactgtctggggtgtgatcttggctcactgcaacctctgcctcccaggttcaagcaatcctcctgcctcagcctcccaagtagctgggattacaggtgcccgccaccacgcctggctaattttttgtattcttagtagagacggggtttcactatgttggccagagtggtctctaactcctgacctcgtgatctgctcaccttggcctcccaaagtgctggaattacaggcgtgagccaccgcgcccagccagcctcacgcacctttagaagacttgaatctttaagtctagttcagggggggatgcctgtttcctttggagtgtgatggtggggtgtgtatgagctttacagtcagagctggatctgaagcctgcctctgcagaggctgcatggcctcgggcaacttggtgattctctctttgcccccactttatagaatacctaggatcatgtgagatcatttgtgcgttcattcattcacggacatttattgaatgactgcttagggcaggcatgggggcaggaggcagaatgagacagtgtctggctcagactcatggcactaagtacagagttaattatttgtgctaagtgctgggaagctcagagtacaaagagaccatgcaagaaagaaaacatatttgtcccatgtgcatgcgtgtatatgtgcatatgtgtgtgcattggcggtagttagggaggacttcctggaggaagggacctttgagctggtgtggcatgaacaagctggcctgaggagagcaagcgtcctgggaccctccagcctttgaagctccaggttccaaatgccaggtgcagaggatgcatgacaggtggccagaggggtgagaggaacaccaggggagatgcgtcctggaagcccaggaggcccttggagcagggtgggatgttgcagaaggatgaggatgcccctctgtgcactgggctgatgtaggaagttgctgccggggccagagctgcctggagggaactgtggggagaatgcttctcgccttcccagagaggtaccttctgctccttctctcttgctgcctcctcccggctggttcaccatccaagacccctgtcatctccatgacagatgctgggaacaggctcagcagtggacacagtcaggtcttgtgttggggatggggccaggagccctaagagcaggctccagttcgccctgcttcctcctgcagaggccaggtggtcttgaagaggggacacgagtctgtcctcatcctggaactgtaagggatgcagggacataggccaatctggctggacccctggtggcttcccagacaacatagtaaaactccgtctctactaaaaatacaaaaaattagccaggcgtggtggtaggcgcctgtaatcccagctactcaggaggggcagggtgcaggtgggggttgggtggagtcgcccagtcctgtttggttggaactttccatcagggtctctgtggttgacatcttgttgcatttcaggcttttcggttccttggttctggacaccacggaggccactccaactctttgctgtagctttagacaatgctgtggggcaggtggggtgggggcatgatccttttgtgtggtgagtccgggaggcacacaggatgaagcctcaagctcccattcacttttaaaaactcctgacgccctcagctgcctctgagtttttgagcttgagcagaggaaatcaaggaaattgaggctggcttctgatcacatgcctttacttcatccccagctattcacggagctttgccaacttaaaatatcctcatttgcccgatgaggatattaaaataaaaaacagacacccattcaaccaccatctcatatcgtcaccacttcacagaggtaggggacattttaatgccccggattttggaaggacgcggtctcacaataaaagacagtattgtagatggaatcgggccggctttgtagaggtccctggatcctgctttgctttcaccctattttgttgcaacccagtggaaattttgccagagcaatgcccttacacagggtgggattggggaagcctgctcttaactgcaggccaaatcctccattcagtttataaatgaaaaaactgaggcccggacttgctccgggtgggaaaactctcaaccatgagatcagaagcagactccaggcctcccggttcccagcccccagtctcccctctgtgacagtctgcttgctcagcaacctgggaattaagatcctcgtggctcacaggctgctggggatgggatcaggcattgcccaaagcttctgcgatgtttacagctagcaggctgacattctggaagcttccacccaaggagtggtacagaatctctctgagcatctgtagtcttagaaagagcacgtggccatatccttcctgggtgtccagggcatggtccccgcaggccatgtgacctgtgtttctctgcatgccttggaacatggggcatgccgctgatctacaccataatctttatggaggtttaactcacctggaaaaaatttagttttagcagctgtcccaggcaacaaacggtatctgaggcctgtgaactgagccagctccatccatctgcaccagttactccggcaggcatgtgtctctcctgaagagaggtggtggatgtggtggcgtgttggccatcgggcaccgtgtcagcctggaggagtgtgtggttcctttgaaaaagaatgttctcccaatcctggtgtgataacttttccttttgtttaattttgaagcttctgttttttcctgtggtcagtgtgctaatgtaagcacttttcctggattatctcatcaatcttcccccattttttttttttttgagacagagtttcgctcttgttgcccaggctagagtgcaatggcatgatctcagctcactgcaacctctgcctcctgggttcaagtgattctcctgcctcagcctcccgagtagctgggattacaggcatacgtcaccatgcctggttaattttgtatttttagtagagacgggctttctccatgttggtcaggctggtctcaaactcccaacctcaggtgatccacctgcctcggcctctcaaagtgctgggattacaggcatgagccaccatgcctggctttttttttttttttagacagtctcactctgtcacccaggatggagtacagtggcacgatcttggctcactgcaacctctgcctcccgggttcaagtgattctctcacctcagcctcctgagtagctgggatttcaggtgcccgccaccatgcccagctaatttttgtatttttagtggagactgggttttaccatgttggccaggctggtctcgaactcctggactgaagtgatgtctgcccacttcagcctcccaaagtgctgagattacacccatgagccactgctcccggcctcttcccccatttttacagatgaaggaagtgagcctccttgagtcttagtaagggagggagctggattcaaggctgagcagttttaacccgcagcgttgccttccctgggaacattcgagttgaaggttaacgagattttgcaagagtttgctcttggtttatatctaatattatgctttggatctaactcacatggtcagatgcaggggtcagattgagactggttgattgaaactcctccgaaacaacaggaaatgatctgggagagaagattccaggtcccctgaggccctgcttctctcttgatcccccacagcccagtgtcgagttaccagcgagtgcctgttctgcttgggtgggtgtccagtgtggtactggtcagaggtaatttttggatctcagagctgctcacagctgttggcggtctgggatggaagaagcaggcgtggcttcggttggcccacattatcctcctgactcacagtgttccagggctgctcagctgccctagggtttgtgtacaaatggccttgatttgacacccttctgaaggtggggggcctgactgatcaggcagttggttggatgctgttgacccccgcagaactcttggtacctatgaggcgtggagttggcgtgggggatctgttagccccagtcccctttttgcccccaccccagcctggccgagagtcctgggcaggcactgagaaggcaacacatggggtaggacttgatgagcaggtggataggacagtgaggtgggaggtgcctctgtgggcctcagatggtccccagcctgtgtgatggggcagcgaagctcaggacacctggtgtttggatatccacaggtgaccggatccccaggcaaatgagcagctggaagtccctgcagggatgcgggaggcacagccagggtggggctggaccccaggcccttccccactcccatcgccccaccctcacaggacacacgggggagctgtgatcctcagggtgttcttttgtttttagtttttttgttttgagacagggtctccccctgtcccccaggctggagtgtagtggtgcagtcgtggcccactgcaagcttgaactcctgggctcaagcgatcctcccacctctgccttccaaagtgctaggatcataggcttgagccaccatgcctggcctttttgttgttgttgttcttttgttgttgttaagtcatctttattttggttgcaaagttgcaatctattttttactgaacattttaagtctcatttgaagtttcatagcttgccgtgtaaaccattgcatacactgtcaaactgctgtacagaacattctgaaatacaatctactaaattaattcgcttgacactgttcagattactgcatgaaaacaacattgattgaagaaggcaagtaagtcaacgggcaaagcatcgattgctttcctactgtaggatgttataagatgaccaacaaacactaaattattttgcttaaaagatgtactttttattgtggtaaaatacgcatcacatgggatttgccattttaaccatttcctttttttttttttttgagatgtagtctcactctgtcacccaggctggaatgcagtggcataatccctgctcactacaacctttacctcccaggttctagtgattctcctgcctctcagcctcctgagtagctgggattgcaagctcaccccaccaaacccggctaattgtagctgggattacaggcgtgagccactgcgcccggcccattttaaccatttctaagtgtatggtccaatggtattaaatacagtcacattattgtacaatcatcaccacctccatctccagaacttttcatattcccaaactgttaaatactaactccccgtcctctcccccgaagcctgtggcacccacccatccttttccttcctgtctctgacaaattccctacaaatttaactcctctagggacctcataggtactcttatcctgggtcaccatacgtgccttactggcctttcttttcataaccagagtaaagcttgtttattttattttgagacggagtcttgctctgtcgcccaggctggagtgcagtggcgtgatcttggctcactgcaacctctgcctcccaggttcaagcgattcttctgcctcagcctcctgagtagctgggattacaggcatgcaccacacgcctggctaatttttgtatttttagtagagacggggtttcaccatgttggtcaggctggtctcgaactcctgacctcatgatccgcccacctcgacctgctgggattacaggcgtgagccaccgtacctggccaagcttgtttatttaaaaggggacagagacaactttttttcgtttctaatcggaatgtgtcttggaaaggatatgtctgaggggtgggagtggagttggttttgtgcttcagggaacctgttcctgccctgtcccaaggtaagcttgtaaagaggtcggtgcccttgttttggaacccaagttaatgacgcaccttttcttgtgtgggctacacacatctttaacctgctgcagatagtacttttgttggcatctggagccatgatgccaggcccctcttctccctgaagctcagttttcctctaatgggtgggaggtaaccagtgctgagtccactaggaagatcgaggcacatctccaaggctaagaaaccggcagttctgtagcctcagccactcccccacccctagctcatccctggcttttgccgaaattctaaccagccccgtattttgtgtgggtgggctccagcccctcgggattttcctgggggtcactgcctccaccccctgggacgatggaggaggaggaggcttgtttgtgggggcagaggatcttgccccagcagcctttgcatgtcaagagtggtcttgcagatcgggccccttgccctggctctgtttaactggtgcttactgagccgtgacgtttgtgctgggcatgggcaggtgcgacatggacagtgagaggaggaagacaccatccctggccccgaaggaggttttaattcaggaggagcaagaaagaacagtgttggaggctgccaggactgagcctgatgccagaactcagggcccaggagccgtgggtgagagcagtgggcaggagggcgtgggggcctccagtgtccactgagccctgtgaggagctggtcacacactggtttgctgtgggagcagggacaccttaacatgtatgttcatgtcactggtgacttgacgcttttcagcttcctctgttcttaattccatttggagcccaggcaggatgatagcagaatgaatggaaggggttgaggagtgagagccggtgaatgagaggggccttgtctgtaggcctttgtgggtcagggcccggcaattgattggtgagtgttacagtgaggatgatcgtccacctcttgggtcccctccccatgcctctgcctcgtcgccatccagcctggccatggtccctgcttggctctttgtggactccctgatggggctgtgcaggagctctcccttggctaatgacggggtgagctcagctcccctcgggcacagcccccagacagccctgctttgcagagttcagctctggggctgctcagaacatgggagctaccttctgagtttccggaagaccaaaggacttcacatttgattgtcctgctgagagtgaggttcacagtacccagactccccagcaggaagcatttccaaaccgtttctgcagctctgggtgcaaaattcccagggctacgggagcctgcccttccctgtgttttcctttctcagagtccgaaggaggctctggggccacagctcacctgcgggggattccgcacaccagcacccggctgtgtctcccccatttcttatgagcagcgataagtcaatccccttcgacggtttaatcctccagcgactgtttacagagaactttctgtgtgcttggaactttataaagtgcatccctcttctcagcaaccctgggaagacagtgcaagccccgttttcccactggggaagctgtgattcagagaggcggcgctgcctgcccagggttagagagcaagaaagtgctggagctgggattggaaccaaaggctgtttggctccaaagcttacactgtttctactcaactctgtagctgccacatgctggcatggatgtcgggggtatacaaggacaggagacagagcctgccctcaagacatttgtggctatgagggtaaggcaggcaggcagggctctggaggatggagagacatgcgccaggcacggggtgatatgggagcagaggggcacccgagctatgcagggtgggcaggcaggcggccaggagagggtgacagggcatgggaggtgggctaggataggagacgggctgtggaagacacgagggtgaaactgcaggtgggggctgagtgggcctggccagagaaggggtgaagggagtgtggggacagacatgggaaccggggttggctgcagaaagggtgaagggggtagggggacagatgggaactgggcttggctgcacaggggagagcagcctcgctgtcaggccacatggctggatcacatcctgttcatccaggagtgcaccacggcctgtctcgtctgtaacagataaggtccttggcttagtgagtacttttgcttttcttaatgaattagagcaagaatgaatgaatgagtgaatggggacattcaaggttatccccatgataacacggttgtcactcctgatgacttttcctctggtgctgggaggcaactccagacaacttgacattagctctgcctcctggtgaatctcacgttcaccgaagagcatcgctggagaggggacacctgaggtgggaggggggctgagtggtcaggctgctggaaactgttgggctttgctgtggcacgaaacttcacccttacccacgccactgcaggactcctcctgccagcctcggggagccgggtgagagtcagaagggtgggtctaccttgcactgcagaaagcagctctgagtttcctggaagccctggggaaaagggaaagcccagaagttgtcactgggggacatggttctaggtgagacccccctcctcctggccttgtggaatggcctggctgagccctagctcattcgtgcactgaccttatccattctggaatgtttctgcaagtttcccctcctcccctgctgagaacgggatggagcatctgaaggacgcatagtctagaagtgcttacagtggctgatgactgatagggtggtttagcaaggtgctgcctcacccagcagacagcagccgccctctgggccaccccgagggcccagcctggaagaagaatgtattcaggcagggcacccacagttgtgtgtgcggaaacgctgccaagcccagtgggatttaccctctaggggctggaaagccattaggaaggaaaagtggtgcttcttaaagcccagttttgtaacatcctgccgagaggtgaccttctgcccagcagctggggctgtcgtgctaatgctttctggcatttgagtcctttagaatgaggtccaagtatgtgggcacctggcacccggccgctcctcccttggggcacaatggggtcttctcccttccgtgagctgaggggctgggagggtgcccactggggctgtagcctgggctggggcatggggcacaagggcctgtgtgcccagctcatttgggccgtggcctggctctgagggtgtgggccggctgcttggagcgtgatcctttcatctgccctttttgcgagtgggagataagatggccaggctgcggttactcctgaacctgtgctctctgctttgccagtcctgtcctcaccagacttctcacaggtccccgtttctgtggaagaggggatcttgtggtaagtcaagggcagaaaccatcaccagcctcggtttcctcaatctgtagcttgaggcttatgtcccccctcctgcccctttgctcccaagattaaaggagaaaacacggatgtgggtcacagaagctggtctagaaatggtggtttttaggctgggtgcggtggcttatgcctgtaatcccagcactttgggaggccatggctggccaatcacgcaagttcaggagttccagaccagcctagccaacatggtgaaaccccatctctactaaaaatacaaaaaagtagccgggcgtagtggtgggcacctgtaatcccagctactcaggaggctgaggcaggagaatcactcgaacctgggaggtggaggttgcagtgagctcagatcgcgccattgcactccagcctgggcgacagagactctgtctcaaaaaaaaaaaaaaagaaaaaaaaagaaaatttttttttccttcttacttgactcagctcgttgcattttgaaccccctccctgtttgcagtctctcctctggaaagagtcatgtcggctgttccctgacctgctgggctgggctggccggcagcatggccgtgcctctgtcatcaggggctgtctttcttgcctactggactgtgaaggcagggaccctgtctggacagggaccgcatcagcatctccagcatgtggctggagcagggatccatgtgtgcttggatctcaggggctgagccgcagccctgtccaagctggattcagatgggggaggattcaggtctttcttctaggaaggagtggggtgtggactcgcagctggggtctggtggggttttcagtactggtttgcagagtgactaagggatgtgcccccagcctgatgctgtcgtcaagacagaaggacgtgcgtgtcctggtggtgcatctgggagggccctccacccgctgagtggtgagccacctctcagcttgttctcttccctgcacagtggacgcggatgtcctcctggaggcctgctgtgcggacggacaccggatggccactcatcagaaggactgctcgctgccatatgctacggaatccaaagaatgcaggtacgtttgccagtggccactgtttcactggaacaatgttcctttagagaaaagtgggggaggaagggacagtgtgtgccagacctctcgggagaggctggacacccaggcccggatccatccaggctgcgggtgctgcagtgggtgactcctgcctccctcctggcaccggcctggcaccgggccttggctcacccttcctgtgccactctgtgattgtcggggtatgtgtctctttcactgggctgggagcaagaagatctgggcttgcagctgtgggcaagtcagttttctcttttaaaaaaggggggacagttgtgggggagcaaaggagatgatgtgactaaagagctttgcgagtggaaacacggaccacctacagaccccaaaaatgccaatgagccggcgcagagtgaagcgttccaccagccggtttttcagcttctgcagcagccaacatctggatcgaccgtttttattcttctctccctacattgactccagctctctgaaaattctgagaccgtgtaagcttagaataaataatgagaagccgggcgcggtggctcacgcctgtaatcccagcactttgggaggccgaggtgggtggatcacctgagatcaggagttcgagaccagcctggccaacatggtgaaaccccgtctctactaaaaatacaaaaaaaattagctgggcgtggtggcatgcgcctgtaatcccagctacttgggaggctgaggccagagaattgcttgaacctgggaggcggaggctgcagtgagctgagatcgcgccactgcatttcagtctgggcaacaacagcgaaactctaactcaaaaaaaaaaaaaaaaaggaataaatgatgagattaggtcatgctgatcatcatcataaaaataatagtgaaaaccccagaatgcccgtgtggagcacctactttctgtgtaccgtctgcacggacagcagccagtctggccccgggaaggacaagggctggggaggtggaccaacctggttgggtttcaggctgggtgacctgagccagctcaaaggcaccatgatacctcctttctggggttgttataatgatcagagatcacccgggcgcggtggctcacccctgtaatcccagcactttgggagaccaaggcgggtggatcacctgatgtcaggagttccagaccagcctgaccaacgtggtgaaaccccgtctctactaaaaatataaaaattagctggttgtggtggcgggcgtctgtaatcccagctactcgggaggctgagacaagagaatcgcttgaacccgggaagcggaggttgcagtgagctgagaccgttcattgtactccagcctaggtgacagagtgagactccgtgcccccaccatcaaaagaaaaaaatcagagatcacctatgaaatcagcaccacaaagccagactgtggcaacgtattggttttctaggactgccagagcagagtataaggggcagggtggctcaaccaccggttcctcatagttccggaggccagaagtctgagaccgaggtgtcagcagggtgggctccttctgaggctcctctcctgggcctgtagatgccctcttctccctgtgtcctcacacggccctccctctgtatgtgtctgtgtcctgctcaccgcttcctcgaaggacaccagtcctttggattacagcctgccctaacaacctcatttaactatgtcacccatttaaagtcactgtctccaaatagagtcccattctgagatactgggggttaggacttcaccagatagattttgggaagacacaatttagcccataatagggagccactactattaatacttagtgaaataaaagaaagtgaggcatcagcccgtgtaacccctcaacgtgcaggcagaggaactgaggccgcagattcagcagcactctgggccttgcttgtgaatggggattttagtcactatcaaatgtattactgacttctactcactaatgtctttggtaaattttggagttatcttttttctttattttttgaaactgagtcttgctctgttgcccaggctggggtgcagtatgttgatcttggctcactgcaacctccgcctcctagattcaggcgattctcctgcctcagcctctcgagtacctgagattacaggcacacactaccacaccaggctaatttttgtatttttagtagagacagagtttcaccgtgttggccaggctggtctcgaactcctgacctcaggtgatcctcctgccttggcctcctaaagtgctgggattatgggcatgagccactgcgcccggccaattttggggttatctttaatctccattgagtcccagaggacaaacacattgccttcttagaaatttcagacatacattagatttcctggaatgtaagaaataccatcagaatggctgagagggcattccttctctctttaagtgcgggtgcaagtccagactcctgggtatcgtgagtttccatatgacagtgtccctgaaacacgtggctcaatgcccaggacaccactccagggtcaccagatgcaagtgactggcccattgtgtcacttaggccccaggaggcccattgactcatcccagtggacacacaggccaggggccacatacctgtcctaggctgcctctcaagtgagctactgagctgcccagctctgcctgcgtcactgccctgtggccccaggtgctgtccgctgccctccagcccttcctgtgtgcttcccctttaccctgttctcactggggtccaaaccccacgcagcctgtgccaatcagaggccaagcctgggctccaggtcacagtgagacggagcccacataagggttcaggaggcagtcactgatgtggctgtgggggtcctcgggtgagcaggaccccgccccagcctccccaacctggggaggtcagagctcctgtctggttgaggcaagggctgtggatgcggggtgtggccagcagtgcagtgatgctaatgaagggattttctaatgagttttgtatagattttcatttttaatgaaggcagggaagggatagggcagatcagaaatcaaatcttatttacaagaatcctcttaatagtgatatttaaaagatgcaaaaaacagggatcactgaccacctggtttgtctgttgtgttagccagctctttttttttttctttttgagatggagtctggccctgtcgcccaggctggagtgcaatggcgcaatctcagcttgctgcaacctccgcttcctgggttcaagcgattctcctgcctcagcctcctgagtagctaggagtacaggtgcctgtcaccatgcgtggctaattttggtatttttagtagagacgggagtttcaccatgttggccaggctggtctcgaactcctggcttcaagtgattggacgcctcagcctcccaacatgctgagattacaggcatgagccactgcacccagccaaattctcttcttttgaagtggctttctgtgaggctcaccagctgaagtaaaatcagtttttgttcattcaacaaatctttattggttcttgatgctcaggaagaggcaggatgaaagccatgagcaggcaggcaagcccaggccagccctcctggcagcagtcgagggtgtgaggccctgagggtccatagggcccaaaggagggggtatcagctccctgagtgggtgagaggctcagagaggactgcagggagaggccgacctctccgcaaccatgggctgtagccaagcaggggttaagcagcctgcagcttcaacaaggacgtgtttggggtggtcagaagatggcagctttgatgttttcccatcatgaatcatcttgactctaggtctccaccaaggcccgacattccttgggatccagatctaaatccacctaaaactttggattagattaaacccacatgtccttcagcgtcttttggaggaatctggacacatccagtgaaacctaaagcaagtcccaagctgacattttccagcccagcatttctctaaccccttctttattttgcaaatctcactgagagcctgctaggtgccaggctccgttctggtgagtggggatcaatcggtgaacgaaatatgcaagtcccctggcctcgtggaggcggcattctataggggatgcagaatgcaaagaaagtaataagtccgtctgatggtttgtaggaaggcaggatgtgccgtgggggaaacagggaggcataggggcttctgctcatggtgggtttataattttagagccgtggggttggcctcactgtgccaggacctgaatggggcgtgggcagtatggaaagtgggaagagcatcccaggccgagggaacagccagcgcaagagcccagaggagagggtgtgtacagcaaggcggccagggtggctggagtggagccagcaacggccagtcccagggaggaagcaccagatacaagggtaaccaggtggctgagggggccatgagatagaggctggggtgttgggggtgagcctgaggcagctggacaccctgaggtgcctgggacacttgattgcttccaccttttggatgttgtaaataatattgctgtgaggccgggcgcagtggctcacgcctataatcccaccacttcgggaggctgaggcgggcagatcacttgaggtcaggcgtttgagaccatcctggccaacatggcaagatctcatctctactaaaaatataaaaaattagctgggcatggtggcaggtgcctgtaatcccagctgccggtgaggctgaggcaggagaatcacttgaacccaggaagcggaggttgcagtgagccctgatcgcaacattgcactccagcctgggcgacagagcaagactccatctcaaaaacaaaacaaaacaaaacaaaaaacaacaacaaactgctgtgaacatgggtgtgcaagtatctgtttgaaaccatgcttcagttctttggatatttacccagaagtggaattgctgggtcctatgattattctatttttaattttgggaggaactgtgctccacggcagctgcacccttttccattcccaccagcaatgcacacgggttccagcatctccacatcctcaccaacacttgtgattttctggctagccaatagtttttgaatggatgcacgcatggctggtggctcgctctggcagtttagtgaaacgccgttatttgcaaatccaccgaaagcatgagtgaaatgtgtgctagctcagctcggtaattccatcctggagcctgaaggcagttttgagacacacgggcagccgggttcagacctccagtcccccagggaaggttgggggaaggtgcactggcagctgccatttttgtgcagaggtggcctggctggcagtgcagggaagctggggaggcccccaccctctctcctggaggcacgagttgggtggctcttcctgcccttgctggctttggctggagctggggttattttgggtctggtcaggggccacccgtgacacactcctctcctgctcattgcctttggagcccgcccacgccagcccctagctgtcacagcctcatggttgtgttggaggagctgattttggcaggtcgaggacctctccccagagccccggcagggctgggaggtgtgggctttgcagctaggtgccactgcagccaccatccctccctctggggccttgggcaggctacccaacaggactctcagaagctgtttgctctgagcctggaagatggaacgagcactgagaagagcttgacctgataaaggggtggaaggttgggcccagagtcagccccccgccgctttttggttttcaaatcagcaggaacattgtgcgggtgaagcctagtgctcagaggagtgacgcggccactctggtgacaaaactgggcctcctggctctgactccagacaccatactacattctgtctttctttttttaaaaaaagaggccaggcatggtagctcacgcctgtaatcccagcacttcgggaggctgaggcggggggatcacccgagctcaggagttccagaccagcctggccaacacagtgaaaccccgtctctacaaaaatagaaaagttagccaggtgtggtggcgcatgcctgtagtcccagctactggggaggctgaggcaggagaatcgcttgaacccgagacgcagaggctgcagtgagctgagatcacactactacactccagcctaactccatctcaaagaaagaaagaaagagagaaagagagaaagggaaagagagagagagagagaaagaaaaacagagagaaagaaagaaagaggaagagaaggaaagagagaaagggagaaagagagagagagagagaaagagagaaagaaagaaagagagaaaaagaaaagaaaagaaagaaagagggtcttaccatgttgcccagactggtctcgaattcctgggctcaactggtcttcccacctcatcctctcaatgtgctggcattactggtgtgaaccactgtgcccggccaagcctttctaactaaatgctaattgagctccttctgtatgccactggggcactgtgtatttctctctctgtgtctgtgggagcagggaaggggaggctcaaaggtgagagcacccccacccccgaggatctcgtgccctgggccccctgcgcacagagccttggcccagcccacccctcacccacaggatggtgcaggagcagtgctgccacagccagctggaggagctgcactgtgccacgggcatcagcctggccaacgagcaggaccgctgtgccacgccccacggtgacaacgccagcctggaggccacatttgtgaaggtgagagccaaagaccatgtggggtcgctgcccgtccccactagtcggcagacccaggccctcccagccaagcggcactgtctgtcagcgctccctgcctcaggccacctttctttgtgagcagctgggggttcctgggccaggagggaggtggaaaaccccactgtttctccccctccactgtagccgtaaaccccggaggacacctggggccgagtctcccacgaggccggggggtgaagtgagctggccttgccctgagaaccgcctgtctccaggcattgggcagatgcagaagtcaaagcagggctcctcctgggcttccagaatcttcttctcaattcagggtcggcaccctcaccctacccaggaggctctcaggcttctctacccacagactcgtcagggtccagaggtaaaaatgggccctcactaagacctctgataagatctgacctctataacgaccctaaaagaggaaactgaggttcagagaggcccagcctccaaaatggcctctctgcagtcctgtcagggacccagacgggatcctgccctgaaggtaagctgtgaataaatggcatagtcctcttccctgagtgctcctaggaccctacgtgctagcaggtcactcaggaccgctatggccgtggaagggctgtgtctttgcaagaggtggaaaggtgcctgacagcattgcctacaggcagtaaacccaaggtgtccaggccatccctcccttaccacccagccagcaaggaaaacaagcccggccaggaggaacttgggcctggaggagctcgggtttggaagctgggcttctgttggaggtgccagatgacgaaaatgcattccctggaagaagcttcccgttccttttaggaaggtgatggaataattttaagaaacaagaatctgaatgaagtctggattccaggagagggtgtgggagctcctttgtggggattctccacatagattgggctgtggagggactccgtgtggaggagttgggggtcccgagtcccctgcccaccttggcctgtgtgggctttcacagggcagggctctggcccaggagagagctgggtggggtgatggtgggggtgcctgggaaccaggactttgggcgtttcatgactgcccccgcaccctcccacccaacacccaatgcagggctgggccttgcagatgccgtcggtccggcacacagctgtgcccatgtccccagacttgagaggtgtggaaaaagcacagaacattctagcaggagtgggaacagatctctctggcagatgagcgacttgtgtttccaggaaggattactcacaccccaaaagatggatgaggtgactgatgctccctacactttctggcagcggagggcgtagaataagcagcctggaagacccatcagtgccacataactgaggcaaagctacacctcctggctcctgctggggactgtttagaaagttctgtgctcctcttaggataaccacttaataaagactgaagcagggcttttcgtgtgtcagggcaaatgttgcttctgggactcaggtgtgaggccacagggacttggaagtaactattgggacctgggcccaggtggcagacagccaccctgtcctttgaccttgcttgatgactcgtcttgaagttcctgtgctttcaaatgcacggtgcaattcctgctgccagaacccctctaactcaaaaacggagaggcagcatgcatgtgtgtcatttttccgggcatggtagagaaatctcagaccatgcaaaaggaacagaactttggagctggtgcatggtgctataagaagctccctcttcctggatgtgtgcgagcagagccgggtggtctctgggcggggcagggatgttgaggggtgcaattgcatgttggggtggggaggggaggtggatgccaggccctttaagcttcctttcaaaactgggacctagatgatttggagtagggggatggccttgctttgctatttgttgctgacatttagaagtggtatctaagccagacttgagtcatcactctacaggttgtgtggacagggggctcagagaggcctcccctgaggcctctcgtggaccccgctgggctgtctgcccgctcctccatctgggatctccacctgtgtttgcagaggtgctgccattgctgtctgctggggagggcggcccaggcccagggccagagctgcgagtacagcctcatggttggctaccagtgtggacaggtcttccaggcatgctgtgtcaagagccaggagaccggagatttggatgtcgggggcctccaagaaacgggtaactttcccccttccttccctaatgagcagtgtattaaggttctccgggatgtgtatatagagcgagagtggagagagagagattttaaggacttggctcatgtgatcgtggggctggcaagtccaaaatctgcagggcaggccttcaggctggagccccagggaaggaggggcattgcagctggagttcaaaggcagtgtgctggcagaacgccgcctttcccggggaggccagtcttttttctctgaaggccttctgctgattgagtgaggcccacccatggtatgaagatgatctgcttttctcagcatcaacagacttacatgttaatctctttttttttttgagacagaatctctctctgtcacccaggctggagtgcagtgcagtggtgtgatcttggctcacggcaacctccgcctcccgggttcaagtgattcttgtgcctcagcctcccgagtagctgggattacaggtgtacactaccacacctggctaatttttgtatttttagtagggatggggtttcaccatgttggccaggctgatctggaactcctgacctcaggtaatccacctgcctcagcttcccaaagtgctaggattacaggtgtgagccatcgtgcctggccaatattaatctctaaaatatagcttcacagcaacatccaggctagtgtttgactaaatatttgagtaccataccccagcccaattgacacttacgatgaaccattacaggtaacacgtgcatccgtgtcaccattgccttaactcagcacggactaactccggttgtcggagccattcatgtttgtgaccttatctgaaagccgctgtcctggagtgacgctgagtgcttggagtctgggatcggacaaatctgtgctcccatccgggtcctaatgtgtaccttggtcccctcatctgggaagtggggatagttgcagtcctacttcatcaggtgctgggaggatggagtgcgagattgggtgtcaagggttgggtagagcacctggccccataaatgtctgccctcaccatctgcccttgtcccttcagctgcccggggcagcatgggtggctggccttgctcccacttcttgggtgagggtctgatgctgaagatcgcacagccgacacgtggaggagggagagcctggccttccacctcctggccagtgccctctccatctggagctgacgatgtatgggcgagcagctgggggccatcgctggctaatagctggctatgctctgtcaaatcatagacacttactcagcaaaggggcatgtgaccccaagagcagcttcaagagcgctctcagctgtgtgcccccccgttctgtgtcctcgccctgcatttctgtgtggttcagttacagggttcaggagactttgtggctgtccagtagcctcttacacttaggccacggtttcttgtgctgtaacagaattaacctggaagaaggcaggactccgcctgggccaagcttgctgtgtagttttcggcctgttccctcctctctctgagctttgcccccactctcttaaaaaataaaagaggtgtgagctgggcacggtggctcacgcctgtaatcccagcactttgggaggccgaggcaggcggatcacctgaggtcaggagttcgagactagcctggccaacatggggaaaccctgtctctactaaaaatacaaaaattagctgggcgtggtggcgggcgcctgtaatcccagctacttgggaggctgaggcagggagaatcgcttgaacctgggaggcggaggttgcagtgagccgagatggcgccattgcattccagcctgggtgacagaacgagactcagtctcaaaaaaaataataaaataaataaagaggtggggaggtgccggaaggggcgaaagggaagaaccctcagacctgtagtctctaagtcaaggtaatggctgtagggtcctgggtgacacggaacctttcacttcttgttcttaggttttcaagtccaggctgtagggcccctggtcacagaggacccgggtcacccgggactcatctttcacttattgttcttagtttttcaagtccagggccccatggatgccactgagatgatttcagatgttacagtcatcaagagggattggggccgcattctgcctcattccttggcttttgaaatcagagacgacattttcactttaaacaaacccaaaccattcctgctggtggaggatttctcctgcatctcgggggtggattttcactgatttatgtctgcagcgtgagcagtctctgggcttttctgcagctccagatgttagatgttttatctctccgtcttttatctgcttcagtccttgccccagactatcctcgcatgctccctcctctgggagggcttcctgtcttcacagccgcaccttcctcccactgctaccagtgccatggacccactgtatgtttcctgggggccatgcagaaggtccccagaccagtgctggcctgcgacaaataagtacagaaatggagaataacccttttcaaacacataatagcatttgatagaatcaatcaggagactcaagtttttactgcgtgcattgctttagacttggagggcgtgtgttggttgttagcaaggctgtgactgcatttgctgagatggtcaagtaatttggactatgggaatatcacccagcatgaagtcaatgattacaggcctttgtgtctgtggtctttctgttataactgatcttttttttttgaaacggagtctcgctcttgttgcccaggctggagtgcaatggtgtgatcttgactcactgcaacctccgactcctgagttcaagcgattatcctgcctcaacttcctgagtacctgagattacaggtgcatgccgctacacctggctaatttttgtatttttagtagagacagcatttcaccgtgttggccaggatggtcttgaactcctgacctcaggtgatccgcctgcctcggcctcccaaagtgctgggattacaggtgcccgccaccacgcctggcctataattgatcagatatcaattatacattttcaagtgtaattctagcttaaagaggataaagttaatacttagctgtttatataagatgttcaaatgggcattactgcctgatagtgacaagaagagagaatgttgggagtttcttttaagataagatgggtgtttggataaatgtctgacttggtctttttcccccttagataagatcattgaggttgaggaggaacaagaggacccatatctgaatgaccgctgccgaggtgagactcgggcgtctcccatcagttggtatttaaacaaaccccaaggggccagcaaggtggctcaggcctgtaatcctagtactttgggaagccaaggcaggaggattccttgagcccaggaggttgtggctgcagtgagctatgactgcacctttgcactctagcctgggcaacagagctggaccccgtctcaaaaacaaaaaaacaaacaaacaaaaagcaaaaccaaggaatctcggtgctgatctcactggaagttggaatccaggttttgctttggtttaccctgcaaagtaccctttggctgggagccagccatgagccacttccaccctgaggagtcgtggactcccagctcctccttccctttccccttccagatctagggctggctggggaggggaagggtgggcttaccaaggaggggccctggtgaggccctgctggggagggtggcccaggcccagggccagagctggtgtggaaagcctgcacgttaccgagcccccaggccttgtgaaggtgacagaggcctccctcaggctctcaggggagaggagggggctcagcgttccctgcctttgtgcccctggagccccagccacggttctgtcaccattggtgatattcatttgcctcacagggagatgtctgcacatttaactaagggcctcgcaggtttgtttttcatatgataaaactgcttttctttcatggaacattctggcatgtctagacctgcagatctgcctcacaagctctttcagtggttccccctgtggttagggtgttaattaggggccagtttaattcttaaatgatgcagtcagtgtacagtgacagttggtccaggggcgctgtccaggggcctggtggagggaggaagggagtgacctagagccccagcaagcctcagggctatgggaggagctttctggggaggggagagctggtctgcaaggaggaggtgggattagctgggaaaataaccctgaaacggtcctcagggagacctgaagccttgtaaagggcacggacccactgtagcagggtactgggaggcagtgggctggggaaggaggtggggttacagggccagagagaggggccctagaagcaggcaggctggcagcagttagaagtgtatctcgtagaatctttccctggttgaggcttatcctgatgagatttgcactctgagcatcactctggccaccctgtaggaagaacaggttgtggggtgcttctgggctatgcagaaagaccaggtaggaggctgtggccacagccaggtgggcagctgcaggaactgaggccatggtagtgggcttggagcagtgggacagctcgagagttcagtgaggagcaggtacatgaggcctagttggggcctggccttccacgtggagcccacacccccatgtctgtgaccggcagtgagctcttctctgcttcgccccttccaggtccaccccagcctacaaagggcaccctgcacaccacctgattttccagacggggaggttgggacctgaagcagcagcccctggggggtgtccagagccagagcctgggggtctcccagtagggcagcaggtgggctccagccaggtcagcctgccttcctgggttcgtctgcccagagggcgttttctatgacccagcctgaacggagctagaaaccaggcggtgcctgggtgcgtccatccctggctcatgcacgctgtgcttccaggaggcgggccctgcaagcagcagtgccgagacacgggtgacgaggtggtctgctcctgcttcgtgggctaccagctgctgtctgatggtgtctcctgtgaaggtaatgtccctatcccaggtgccagcaggactggccggtcactgtgcttgggagctctgtgctggaggactgaccagggcctgccttctacaacccagaccccattcaggggtggagagcagcccaggacgcgctttctcgtgttcgctggagtttgcagcgcagaggcccctgccgagacttccctccaagacaatataagcactggggttgggaaagaggatggagttggggtctaaccaggttccggatccaggatctgctgagtggccttgggcacatccttcagcctctcctggcccccgcgtctgtgagatgggggagatggagaagatgctgcccctccgtggggttcttgaggaccacataactacagtctcagaaaaagcagtagatatgaacgttagcaggggagagaaatcactgctttcgactccgtgcagtccacagcccggatgtgcacatggtggacctgagctcagtttgcgagggtgcagggaagcacttccaccgtggctttggcacattcctttctaggatgtattaggatgggtcgttcttgctggtcacccccgcactgcctcggtctctcctagatgtcaatgaatgcatcacgggcagccacagctgccggcttggagaatcctgcatcaacacagtgggctctttccgctgccagcgggacagcagctgcgggactggctatgagctcacagaggacaatagctgcaaaggtacagcatgcgctccgagtctgcaaacctggtcttccaggcgtagatacggcgcggtgggaagggcagctctggggtctgggctcccgcagtcctgcgccctctgtggctgcctgggcgactgcctgctcatctgcaggagggaggtggttatacccaccagggtgtctggacaggtgggatggaaggtgaaagtgcttgccaataatgttcagaacattgaaaaagttgacagtagtgcaccggtgccagctagttcagctgttaggaaagatttacgttcttatggtgcagagtaaacgatggcagatttgggtttctaaaaaggctcagtgcatgactatttaaaatcaagaccagggatgaatttcaggttctcacatgtactttctacaaaaaaaaaaaaaaaaaaaaaaaaaaaagcaaaaacaaaaatcccacaactgtttttgcacaacagctgccttccatccaaatccaggcttccttgaagttcaaagcatatccccttccactgcataaacacatggcatttctggctgccagcctttccccgccaagccttaggtgttatttggcagatggggaggctctgatgaggatcgtttagaacacagttttgcagagggtttcaagcctttcagaaggacaaatccacttgtgtaaaaatgtcactcactgtatcatgagagtgacttcaaagcatggcacaccccttctgacatctgagggccacagagcaaattctgtcctccccacccccacacaccagctgggtggtttggacccctagagcccagtggccaagccagctgagtatacacatttgaccatttgacagccatgaacttcaagggaagggcagcccatcacatcccatcatgactgtaacccttgttaatatctggattattgtgaagacttcagaatggatatgtttatagagactgtgtttgttgccactaagataattgctttatgatctaaactaaacatacacttagcctgaatgaatactaatatatatatacctgccaggaaaatgccagggtgatttattataacagacagtttgcctcataagagccttgggaaaaaaagtcagctttttaagtctttagcaactggagcacgatttggctcagtgaagtcttttttgtgtatgatttctctattagaatgttttgggttatagtctgagtaatgcgcattagaaaaaagctttcttgtgattttaaagtgttgtaagatgcttctggcaggactcttgctaacaatttcctttttttatgatgtaccagatattgacgagtgtgagagtggtattcataactgcctccccgattttatctgtcagaatactctgggatccttccgctgccgacccaagctacagtgcaagagtggctttatacaagatgctctaggcaactgtattggtaagaggtgtgccgccaggattagcgggttattccaggaggggccagcgacctagccttggggcaggcctctagaatctgcggggccgcatggtatacagaacaggggttggcaaactttttgtgtaaagggctggacagcaaatagagcaaatactttagccgttgtgggccatatggtctctgtcataatagtcaactctgctgttatagtctaaagcggccaagggccatctgtaaacaaatgggtgtggctgtgttccaataaaactttatttacaaaaataggcagtaggctggatttggcccaaggaccacagtttgctgatctgggtttagattaaagagcttgggttttggagttagagtgacccaagaaaattacttctgagctttaattttttcctctataaaatgggagtaatcataatacctggcttagagacttgaggccaggattaggcgagtacttgcgaagtactggtacacaggaagcactcggtgagtggtgattccctgccacaggcatttagcctattaaaaaattattttaaaaaatacttggctgggcacagtgggtcacgcctgtaatcctagcactttgggaggccaaggcaggaggattgcttgagcccaggtttttgaggccagcctgggcaatatagcgagaccccatcactacaaaaaattagctgggtgtagtggcgcatgcctacagtcccagctacttgggaggctgaggtgggaggatcccttgagcagggaggtcgaggctgcagtgagctgtgatcgtgctactgcactccagtctgggcaacagagcaagaccctgtctcaaaaataaaataaaatataaaaataaaaaacagtctgtgttagtatttgaattcatagagacagaaagtagaatggaaggtgccggggctgggcagggtgggggatggggagtgagtgtttcctgggcgcagagtttcagtttgagaagatgaaaaagttctggagatggatgggggtgatggtggcacgacagtgtgaatgcagtaatgcccctgaaccgtctacttaaaatggttacgatggcagattttgtgttacataaaatttgtagttcacatgtagttcaccacaatgagaaaagaaactctggccaggcacggtggctcacacttgtaatcccagcactttgggaggccgaggagggtggatcacctgaggtcaggagtttgagaccagcctgaccaatatagtgaaaccccatctctactaaaaatacaaaaattagctgggcgtagtgatgggcgcctgtaatcccagctgcttaggaggctgaggcagcagaatcgcttgagcctgggaggcagaggttgcagtgagctgagatcacgccactgtactccagcctgggtgacagagtgagactccatctcaaaaaagaaaaaaaaaaagaaattgctgatatcagagaaatactaatatgaaaagagagaatcccatgtgaacttagtatgaatttaggaggcctgggcaagaccgctcacgctagaggagctgtgtggggtgcggccggggagctggccggcctgggttactggttctggaaagacaggaggtgagtcctgctttccccagccgttgtcaggttaactgcctggctaggccgctgcagtcagcgcttaagtcctgatccaccggctctccctcggcctctgcttggcagacgcccctgggtcctgcctttgaggtcagagagactttttaggagaagaggtgaggaatccgagctacagatcacactagtcagaacctccccacctggggtggccccatcacctctcccctgccatgagcaagggggtatacatttccatcttgcttcgatttcaacttttccttagcgaaatctgtattgatcatttatttgaaatagtggtttggagagagagctcttcccccactgcattatttttaaccactgagatatttaaagataagtggatgtggccgggcacagtgactcacgcctgtaattctggtactttgggaggccaaggcgggtggatcacttgaggtcaggagttcgagaccagcctgaccaatatggtgaaaccccgtctctactaaaaatacaaaaattagccgggtgtggtggtgggcaccttgtaatcccagctactcaagatgctgaggcaggagaatcgcttgaacccaggaggtggaggttgtagtgagccaagatcgtgccactgcactccagcctggacaacagagcaagactctgtgtcaaaaaaaaaaaaaaagataaaaagacaagtggaacagtgagcccttaggacaggggcctcgtctgaaacccgccccagccttcctctgttacagcttccctgtcatcccctgggggagacttctgagctggggcgctgtggctcagctgccagttggcccctcgccagtcccttgccagcagggaggggtggttttcgctcagcgcagggggtggtgagcagggaagccatgggctctccgggaccagcggggaggatagtcctgctcagacttgcagcctgctcaaaggggggtccggaggaggctggcgtcgactgaggatggaaaccctgactcatggcaaaatcagccccgatttccacaaagaggcaatgtttgcaagtctcaacctagccctgactttcctctctacagggtgcagcactgtgtatgggctgaggctcgggagccgtccccttactgtccttccaggactggcaagcaggctgtgggctgaaggccagcctggcggcactgagctgttccgtgccatctccctgggtcctcagtgacagcatcgaaagccaaatgttcagctccctcagggtccccttagcttgggatgctgggatgaggatggggttccccttttcatgtgctctcaatccttgcaatcaagctcaggaatcattgttttaaaagatctctatttatttcaaaaattatgtatgtcttgacttataaatcagcaaacaaaacctaagtgtaggaagtaaacgctcctcccctggccaatcctgcccgcctcttggcagggtccatgagcccttctgggctctgctcccttgagactttttgtttttttatgaaaatgggatcagactgttctgccacttgcttttcccccccacttgacagggtatttagaaatcatttcatgtcagcacctttatgttatctttttaaaaatgactgcatcagcagaaatacgtctttctaaggagaaaatacatcaagatagaaggtagtttcaggccgtctgggagagggctgaaaaggttctatgtcaggtcctggtcccccagcacgcaccctgggtcctctgctcccacacctctgcccatggtacccgctccctcacccaggaacagcatggtccgtggtgggaagcgttgatttccttgtgtagccagaatccatcttcctggagctcctagaaccatcctggggccccaagagcccatccgagcctcctgcctgtagcagaagagctcttcctgcagagctagtacaagggatgggtcagggtcccagaaagtggaggtctctgcccctatcatgcatggagaattttctagaaccttaaggttgggtcaccgagggctttgagaccagcatggctttgtcgggttttctttgctcttttcttcaaattccctcctcctgctgctgtattcctttctccttctcctcctcctcttccccctcccatcctccccctcccttctcctcttcccctccccctcccctcccacttccctcctccccctccttcccttccccttctctccctccccgcctccccctttccctccttcttttcttcttttttttttttttttgagacagtctcactgtcacccaggctggagtgcagtggtgcaatcttggctcactgcaacctccaccctgctgggttcaagcagttctcctgtctcagcctcccaagtagctgggattacaggtgcccacaaccatgcctggctaatttttgtattttcagtagagatggggttttgccgtgttggccaggttggtctcgagctcttgacctcaggtgatccacccctcggcttcccaaagtgctgggattgcaggcgtgagccaccacgcccagcctctgcctttcttcttgagtggggaggaaggaatgggccagggcttcccacgtgccctggctgaccttgcctggggatgtcggcaggtcctggggcaggaaggggttccactgaatctaggaagcactgggtgaagccaagtgaacggggaccttggtagcttgggcttttcccatgtgaatccctgagagggagagatcgggtgccctgttcccaaactcaccctatgctttacattgatttgctgtctgtttattcattcccattcattcattcattgatagccaggtcttacccctgtggagtgcacgatgttctgagggacactgttgttctgtggaacagagtttggggaatctagtctgagtgaggaacctgcagcgccagtgggaaggcagccaccgctctgctaaacgctgcatttattcgtgttacagggcaggggccacccagctgtttctctaaagggctagatggtaactaacaacttcagtctctgtggcaaccactcaactctgccttttgcagtgtaaaagcacccctgagcaatgcataacagagtgggcctggttgcacgctaataaaactttatttacaaaagcaggtgtaagccgggtttgaaccaagggccatcatttgctggccactgatttaagggagctggaaagcaggagaccctgattctagacctaggccctggttggcccctgacttcagccatgagcccagagtcattcagtctccggaccttggtttcctgtttataaagtgcaggcagtaatgatagtgataccggcctcacctcacttgcaggctggctgtggtgctcgagagcggtcatggatgtaaaagcttttgtaaactgtaaattgctgcacggtcagcgcgaagggctgactcatttgactgaggagggtggacttggctggcagggagaggggtacagctgtcctcctttctgacttacgctcaggggtcttccaccatcactccctctctttgttcccccataccagatgctttgtaagtgtctgagcaaggttctccaaggtgatgtttagatgcttaggtccttttccactccctctatcaggaagtgcaatctgtgtattcttcctccgaatttgagcagaaggagggtatccctgtgtagcatggccctcctggaccattcatgggttcacacttgctcattgtatgtcatcaaaggtaaatgccccacggtccccatgtcagagatgtgtccactcaaggaaggagactgccgtgcagtgagctcagggagccatggcacctcccgggtgggcctggctcagcataggccctgtgaagcccagtcatcggaggggcctagagccttgctgggagtcagagttgctggcaccacgtggacagtcacctgtctccttaataccgtgcccagtgtgtggagtagatgaatgcaggagaagccaggcaggcaggtcccgatttggcgcagcgaacgatggaggtgctggagatttagggacaggaagaagggccagagaggtggtgtttgaggcggtatgcagtgataaaatttgggagccagctgggaggcggctgtgtggtccagagtgagggggttgagcccctccatttgtggttttgcaaagaggtgggaaggggagtttctttggagatccagtttttgggttctgggacaccctccaggtttaaccacatggtctctgtcttttcccgctgtagatatcaatgagtgtttgagtatcagtgccccgtgccctatcgggcatacatgcatcaacacagagggctcctacacgtgccagaagaacgtgcccaactgtggccgtggctaccatctcaacgaggagggaacgcgctgtgttggttggtattaagaaaacaaatctgaaatccactttcctgtctgcttccagcatgcaccctgccttctctggaagcagaaagttgatccccaaagcaaagccatttctatcagcccatccatcccactgtcagttcccaagcatggggcttcattgtcttgcctggactggtgcaccagcccgtctactgcctcagccttgtctggcttgtcctgagcccaaagctctcgcaccccaccctgtttacagttccatcagctccccgttggtgacaaaggatggatgcctctgcttacagtccagtcccccagagctggcccaactccacaaaccttgtaattcaggcaatgtgggtctgccactccccacacaagcactgtcctttcctctctgtgtgggtgtttgctctcacgtcattccctctgcccacctgctcctacgttcctttggatccagggcacccagcctgcctagatcccgccagggaaggagccttcctcgcataacccccaggacacttcttcagtgtctccctgggttcctgggcacttcctaccttaatgagagtcattgctggcctgccagccaggtagggctgcctctgggtcagctatcttcccagtccagggcccggcactcagtaggtgctctgtgaagtcgtgttgaaatggaatgcctgtttccatgtccatgtgttcctttcttgctttcctttctgatcatcttggggggaaaaaacccaaactaaaggttttcatcatggctttctttctcctttgcaagatgtggacgagtgcgcgccacctgctgagccctgtgggaagggacatcgctgcgtgaactctcccggcagtttccgctgcgaatgcaagacgggttactattttgacggcatcagcaggatgtgtgtcggtgcgtggggggccccgcaggcctcgggggaacccagccacgtggcaccagggacacatttctgtggcacctcgagtgatgtggtctgatcctcatctcagataatcccaagtgcaggcagaccctgagagaagatcctgagtcaggagaccccattctagccccagctctgctactgcccagccaggcggccactggcaccacccccctgtgtgtgagcctgctccccatctgtggaaaggggttctgcttgacccaggacctccaagtgctgatgagccaggtctacacatgtgggcagcatcagcgatttcctggagattcaccgctgagctgtagatccccaggagctagagatgtgtgcctttagcccagggcagcgaggggaaaagttgaccaggagtggggtcaggtcttgtccagccagtgcctgctgtcaccaaacctaggtgctcagggaagcctggcagctgccaaccactcccccaaagtgggcactttgctagatcctggcagaccctccttgtgggtcctggggaggaggactggcaggagggcacaagttcagatgtgctgccgcagaaggagcacgaggctcgcccaccaggcaggcacagcgcggcagtcccggctctcccactgacttcccgcatgctcgggacaagtcactttgcattccttgtctgagaaatgaggctggaggccaggcgcgatggctcatgcctgtaatcccagcactttgggaggctaaggcaggtgaatcacttgaggtcaggagtttgagaccagcctggccaacatgacgaaacctcatctctacaaaaaatacaaaaattagccgggcgtggtggcacatgcctgtaatccctgttacttgggaggctgaggcaggagaatcacttgaactgggaggcggaggttgcagtgagctgagatcatgccactgcaatccagcctaggagacagagcgagactccatctcaaagatgaaggaaaaaaaagaaatgaggctggaggaggtggaggacaaaggacatgagctggccttactaggagggtggagtgtggtgccactgtgttggacattgccctgagtcagcccacccctcactttcagatgtcaacgagtgccagcgctaccccgggcgcctgtgtggccacaagtgcgagaacacgctgggctcctacctctgcagctgttccgtgggcttccggctctctgtggatggcaggtcatgtgaaggtgaggctggggccccgtccactcacctcccccaggtcaccttcctcctggggaagccacccttctgcagaccggtttgcagcagatccgcgatggtttccctgttaaatgacatgttagcaggggaagtgcctgtaaaatattgttcatcagagaggactgcccgcctgcccacccgatttctcctgatgacatccaccctccgaggccgtgtcggggttcataggctgcggcagaggccatgcgggatgtggctaggattatggggcttggagcatgacacccacgagtcacagggccttggttatgcccgacctctccctgcctccgtgtcctccccggggagaggggttgatgtgtgaaacagcagcgaaaactggacacttgttttgcacaaagacagtgtgtgggttttaatcagatgctgcctaggggagacaggcctctgtgtccattgatctcaagtcacccaaacaaaaggagggaggctttgtaaatgacgagctgtgagaggaagtactgaggcctttagggcgtgggtcactgtgcacctgcctctaacttctttttttttttttgagacggagtctcgctctgtcacccaggctggagtgcaatgctacgatctcggctcactgcaacctccgcctcccgggttcaagcgattcccctgcctcagcctcccgaatagctgggattacaggtgcacaccaccatgcccagctaatttttgtatttttagtagagacagggtttccccatgttggccaggctggtcttgaactcctgacctcagatgatccgcccacctcggcctcccaaagtgctggcattacaggcgtgagccaccgcgcccggcctgcctctaacttcgtgttggagttaggctttccccacccgcagagacagggagaagcaccctggccttccggatgacgacattccccaggcatgtccccagcccttgagaaagacactccttggttgcacatctcaaagggacagagaaaccgtttacatttgcaagtttttctaaagtagatgcttctaaggaacatggaggtcagcgcctgtagtcaggtttgggctggaaccaagagaaaattcttttggcagcattgatctttctcagacaggcatgtcaagggggctgggtctacatcctggatacctggtcttgggccaatggcagccacgctgaagttgggtcaggtctcttggtatgtgggggttggacagagttgttcctgccaacagtcttgtggttctcagataacaccaacctcctgggctgatgggaaggtcacatgaactgcatgtcagcccagggcctggcacatactaggtgcttggcagatgtcgtgtcttgtatacggattaggttctgagctgagcagacactgagagctttggatggccctccacaatcgtccacattgccgatgacaccctgtttggtgccgtgcactggctcacaggacggcttctgcagcctgactcaaacatggcaggtcctaacattttgccatgagaattttccttcctgatgagatggtcgcaggggttggatatgccacagtgagctgtggtgtgcatgattctcaaatcggaggacggacggtgtgaggggtcctgggcttagttcacaagaacgtgtatggacaaggaacaagattcacgagttgagtctctcaggcttgtgttcaaacctgacttctgccatttccatggccttgaagaagtaactcagtctttcctgggccatggtgtcctcatctgtaaaacgggcatagtaggaccaaccccatagggggttgtgaggatgaaacgagattaagcatgtgaagagcttatcacagggccaagcacaggatgaagagctggcggtgtggaggctgctggctttattattatttagtagaagtagtgggattcctggcttgtgcttcctctagtcattcataaattgctgaaaagtcggcattcatatccacattagtggacaatattgtggatatagaaccagagcctggccaaccttgctatgtgaccttactaaccatttgttagggtcctgccccgggtgtgtagcaagaactcggtcctgcactggggagtgtctctagcgggggatgagagaccacactggacaggtggaggccaggcctggtgtgtgggggccacagagatgaaacacggggtggaaggctattggacgttctgtgacagccacatagtatagatttaaggcttttccagccacaatctctgttgcaaccgctgaactctgctgtggtagcagagaagtggccagaggaccatggtaaaagaatgagtgtggcagggcacagtggctcacacctgtaatcccagcactttgggaggctgaggcaggtggattacttgaggtcaggagttcgagaccagtatggccaacatcgtgaaaccctgtgtctactaaaaatacaaaaattagccgggcatggtggtgcacacctgtaatcccccagctactcaggaggctgaggcaggagaactgcttgaattcatgtccacatttagtggacaatagcctcccggaggtggagattgcagtgagctgagattgagctacttgtactccagcctgggcgacagacaaagactttgtctcaaaaaaaaaaagagtgaatgtggctgtattctttattttattgttattattattttgagacggagtctcgctctgtcgcccaggctggagtgcagtggtgtgatcttggctcactgcaacctctgcctccttgttcaagcaattctcctgcttcagcctcccgagaagttgtgactacaggtgcgtgccaccatgcctggctaattcttgtatttttagtagagatgggtttcatcatgctggccaggctggtctcgaacccctgacctcgtgatccgcccacctcggcctcccgaagtgctggaattacaggcatgagccaccatgccttgccgggctgtgttctaataaaactttatttataaaaacaagtgttgggacaaatttggcccatagactatgatttgctgacctctgctttaggtaaaggggacagttgagcagtagttcagagttgctgagtggcccagtgagttctgtgcattggagtatgaggagtactggcgtatgggctgggtggccgaggacttccttgtgtgccgtcatctgtttaggatgccatcttggaggtgaagtggagagcacaggatcagatttccatttgagaactagaatggactctggcagccaggtcggggcagacttccaggggccaaggctggaggcgatcgctgccatcctggcaggagaagttgtggtcgaagcaggcaggagcagggatggagggtccggagccaccagcgatgacgcctctccctcggccacaccccccgggacctctgtctctccgagtgtgttaacctgagggaggtggagaggagattttctgttcactgaccctgagggctactgtggaggcagggacgtatgatgctctgagcggtgaccctcgttttgtatttcagacatcaatgagtgcagcagcagcccctgtagccaggagtgtgccaacgtctacggctcctaccagtgttactgccggcgaggctaccagctcagcgatgtggatggagtcacctgtgaaggtgcggacgcccctgcctgctgagggggaaagcaccccctggtcttgccatgacacagcagcacggcctctgactttcaaaatccacagggaagagcctgctgggatttcttcacctgacaaaccttccatgtccacccttggaggcaagcgggtggtttgctgttttccctccaactgaggtttttttttttttttttttttttttttgagacacggtcttgctctgttgcccaggctggagtgatatggtgcaatcactgctcactgcagcctcagcttcccaggctcaagtgatcctcccacctcagcctcccaagtagttgggaccataggtgtataccaccatgcctggctaattttttatttttaaaaaattagagacggggccttgctgtgttgcccaggctggtctcgaactccgtggctcaagtgatcctcttgcttcagcctcccaaattgctgggattacaggcatgagccaccgtgcctggcccccaactgaaattctaatatacttttcccatccttaagcgtgagggtgggaaggcagcaaaccactcctgacttgttctttaataaatgtgcacggcggtaattacaacatgcactgggaccttgggccgcatatctcaggtcttggtggtggtgcatggctgagaggtaaggagggggctcagggaccacctatatccctgactcagagctctaactcttcatctgtaacatgatgattaacttcagcctcaccagatcattggaggattaaactagatgacagcaattacaggcaattaagggcaattacgatgattaccattttcatgtaaggtgtgtgtgtattttgtttgcttgtttgtttttgagacagagacagctctgtcacccaggttggagggcagtggtacaaacacggctcactgcagcctccatctcctgggatctagcaattctcccacctctgcctccttgagtagctgggcccacaggcatgcaccagtatgcctgactaacttttttgattttttgtagacacagggtctcactttgttgccgaggctggtctcgaactcctgggctcaagtaaccctcctgcctcagcctcccatgcctgggattccaggcatgagccagtgcacccagctgaggtgtgtttcttattattgaactgtggtccatatttccccctgcccgccacatgcatacttcacaccatgaacttgctgtgtgaccctaggctagtcccatcgcctctctgagcacgatggtctctgaggcttcctgtgttcagcttgtcctgtgctgctgccctcccgggccccagtgcagcccccagggcgatgtagcatggccagcagccatggccaggtgccaggacactgaggctgaggtgggctttgccgttgcagacatcgacgagtgcgccctgcccaccgggggccacatctgctcctaccgctgcatcaacatccctggaagcttccagtgcagctgcccctcgtctggctacaggctggcccccaatggccgcaactgccaaggtgagcaggagggatgccctggggtccctcacgctctgcttggggccctgcaatgtcgtggggctgaggctgggctcgggggctgtgcttccccaacccaagggccacagcacagatggaatgcattcaggaaaaggaggcccaccccatccaaggggtgtcctggggtctgcagcaccctggtctcctacacccaggccccagcacacttgtcctctggattgtctgagcctgtggcggctgcatccggcaggaacacttcagccctcctcccctcccctcagcagccccgtaaaggctggaacagaggcctttaggaagatgcccgccagggaggaagcagtccaggccaggggatggcgtggcctggtgtgggatggcccagggatactcatggctatgggtcagctccagcatcggctaagtaatggtggccaatggcattggttctgcattcagcccccttttctacgaatgctctagggggcagtgtgtgtcccccagagccatctgataaccatccattcaatcactgacagcgggtgctgagtagatgtttgtgagcgcgtgatcctcagtgtacacactgcgcccagaagctgagtcatggaggtggggctgtccagccagttcctcgggagccccacacaggactgtggatcctggggctctggaagccccctgggtcccacagatgtagcttctggtcatgaggaaggtgactttgatgaaaggcaggcaggagctgcggtgtttcctgggaggccccctccgcttgccctgggctctggatggaaggctggttgtgtctgcatttctgacggagcaaatgacttttctcctggccaggctccctcaccacagcctggggtcccgcccagactcagcataaacacattcctgagccgggcctttgaggctggggagtgttgtttttgccaccgatgctcaggcatttggcacctcttaatggatgtctcccagggttggtgacagcccctgagccccactgtttggctgctccagagtctatgggagttgggctgctcccccatctccaggggcctctcagtgtggtgccccaggccccatcccaggagtcccagacctggtggttccagtccaccctgaacagccaccaaccccaacacacaggcaagacgtatgatccctcgaaggctgtttttctcattgttgtgtggagctagcagctcctgcccttttctcctaagaggttgagtcacacctagggtaagggtgctgagcctcgggagccacagagaggctctggttagttagtgtatggactctgatgccagcctgcccgggttcaaagctcagctctgacatttataaaatgtgtgacctcaggcaggtctcttaagctctgtgagctcctcataaaatgaggatcataacagtatctgcctcattgagttcttaggaggattcagtgacttatccttgcgaggtactcccaggacccatcatgtagtgtttacttttaccatcgtcacgctccctccagggattgcgaatgataagttaacactctataaatgtaaataccctataaatgtaagaactggcacaggacgctgctctgaagatcagccagtggagggcagggatggcctgatcgccacccctaaccctagttgatgggaggcctgggctcctccgtctccagatgggtatggctcctgcagcctctgccttcactgtgctgctgtggggtctcttgcagacattgatgagtgtgtgactggcatccacaactgctccatcaacgagacctgcttcaacatccagggcggcttccgctgcctggccttcgagtgccctgagaactaccgccgctccgcagccacgtaagtcccttggaccatgccatcgtcgtctgtctgtgttggccttcctggtgacccagttcccgggtgggtgggttatcaggctgtgacctcggtgtcctcccatgagggactcagggcactcaaagatcacctgatccctggccctcaagcccctaaatgctagtgacactggtctcggaaagtcaagggggtaactgcaaatgagtctggggtctatagtcatgttttcaggccaaggctgtgcacagaaccaggagaaaccacagccctcttttttcctagggtggaagccttgggcaagctctctgggcctcagtttcctcatctgtaacatgcagatgtcagaacgtgctctgactgagatgcataggtagcaatgtctccatgtcagcccaaagccagggagccgatgtgacctgttggacgttgttgttaggtgcccacctgaaagccagaattcgtccagcctggtgaccgtgtgggaacggcatcaaagattccagatcctaaacgtggggctgcgtgcccctatgtctttgtaagctcactcactcctaggccatcacggcgcccacttgagaccacggttcccacttcctatcccccttgcccctaattgtattcagaaagtctcatttagtgccacagtcagttgcttcaggaaaagctccatgctgggaccgatctcaggactgtggacttgtgacctctcccagcactctgagtgcacgatgcaggcagccagctgtttccgaggccttggccccttgaccttcagcctgccttgggctcttggccagctgcccccgcgacctgagggtcagtggtagtgtccacctcttgaccctaggggcagctgccctggcttgtggcatagcaaggcttctgggtacccgagcagccccgttgtccctggcagccctccatattcttcctggctttgcgattctcattggctggcccagccatttccctgtttcccagcacggatttctgtctgcttgaaaacccaacatcttgtttccttcctgagcttgggttaggaaaaagctgccccaaaactgggtttgcaagtctgtagcatcccgaagagctcatggttatgcaacagcctgccccaggcagtgacactgcttctctgagccattaagaaagttcgatggccttggctgcaggctgtgcagccgtctgtcattgtaagttcactctctccccagcctttgtcagcgcctgggcttgaggattccaggaggctggctgtggttgtgacctcgatttctaacttgcgcacagtcgtgaaaccacctttcgaagagggggaggctgccctgcacaggggccctggcgcctcctaagcctgagggtgggcgggttggccatgtgtgctgaggtcatggctgaaatcaggggaacccagctccacccctcatgttggctgtggaagcctctgccacccctcagtgctggagaaagtcgtttcttcctggacctactgcgtgcaggcacctgggtagacagcccacagagggctttgtccccgcacaggctccgccttcggcgtgtgtgctaggagggaggaggggaccccacctggctgggcgtgagggtgggcagggggctgtctggagtgggccatgcctgcatggaggtggaagggggagcgaattaggcagaagcggcgggagtatggacacatgtgcggtgaaatggggagttcagcctgaaacctgggccctgtgtgctgtgcagtaagggattgagctgctgggcgcctggcttgttccagcccttggactcccgggactgatagtgaggaggggccaccccctctcagcactgctaacccctcagactggagttttgtattttacagccccttttcctgctcatcaaaaatcgaagctgcttaacacgttttttcatctaagcttcagaaagcaatttttaaaatctaaaagagccatatttaggagggacccatggccggcgcttctgtggttaacaactcagcaagagcgcctccttcgggagccttgacagacaggactgcagagtccgctgctgtgcctttctctctctctccactcagacggcttccatctggggaacatcccggcggccgagggctggtaactggagcatgacccaggaagctgggccgcaaaccacagggctcggccttgtggacaggaccaggctgttacagtcctgcccacacaattcccttctgcccgcaggaggaagtgtgcaaagctgtcccacagccttcatggggccggacacatcctctttatcccctcagtggggccggcgcctgatgacctgtggtctagaaagctggagcaaagccgggtggccttggttgccgcttcccggggatgggacacgagtgaacagctgtgggcctgagggtgtaacacggtggacggtggcagagatagagccgtcgatggcccccctgccttggccagttcctggggcttgtctcccggacgacgagcgtgtgaaagtcaggaaaatgccggcagggatatccacaagcacctggggtggccagaactgccgtgcctcccaggagaaggagggggcctagagggccttttttctctggtgtgtggtggcttaggatcatttccatagagcttgaggtgttagggtcaaatgtgttgaactggcaagttggagcacattgtcctctaacgcatgacatggcccaggatgggtggcctgctgaggggacatgtctggaaaccagggcctgcgtggcagggggggacggggcgggctcgcctatgccctgctctgtaatacattcagtgatgacaacccgtccctgacctagacacactggctaaaagggatttttgggccgttcccagtctgacaggcagtttgccagacagttatgtttctggtgttttaaaaagtttgagtagagcgaagtacgatcattgaagccaggacttaccaggaaaatcaaggacatgtttatttttgtgcattagtcatttgcaaagcacatagcgggtgccccaggccctgctctttgtccagaaggagccagcccagaaactcctagtgtagagaaggttttggggtgctctgaggaatgactgtgtggggtcggagggggagcctccaggggaggagtgaccagtcgctgtgtgtgatgacggcgggagctgcaccagaacaccacgcacacctcccattgctttcctccgcttccctctggcaaaacaaattccatccctggttagtacccgccatgctgagagaagcgggaagccgaaatcccaccagggcgactctagcgccacctgctgaccagccccatccaggctggtcctgaagttgctggtgtgtgtgcgtgtgcgcgtgcttgtgtgtgtgcatacattgtgtgtgtaaaagctttgaagtaagacaggccgactttgaaagccaagcttgccccttacgacacaccacggagctatcagcaagttctgcatcctcaatgggcgtctgtcttccagccagtagagcgggaggacgatgggagacagtggagggagcgagtggaaggaaagtctgctgcttgcagcctgctccctgcacccggaagcgcagttcacctgcacccggaagcacagctcatgggtcccatgctcctcccccagttcacggacgctttggtcatagctcctcagaggcccccctgggggagagctctcagatcgcctggagcactcccgtttggcctggacctgggcatctctggggcaggccaccgccagcagcacccgtgcccaccttctttcctgcctctgttttgggcccctcccaggcaggactcccccgttcagtgcccctgactcccaggccagtcctttctaagagcttggaatgatcactagccaagtaaatgcaaggcctcctgtcagtcctgacaaacctggaaagaggaggtaaaaggagaccccagtctcgataaatgcctcaagcaagtccaagtaacccagcacgagacatggaaacttaaaaagccaaaagggagatgtgatagaaggccaggacgagaggatgctcctgacctcagaatccagacacagcccagatggcagggcttcctggagcacctgggccaggtcctctggggctccgcacctgggccctgcttcctcaggcagccaccttcagagtatgatgggccaggagttcagtacacaggagacgacccctgtcccatcttgtgacaagaaattagaacttgttactatcctgtagcggaagataataccgatctccatcctgtcacaggaggttagaatctgtaacaggaagttggaatctgtgctcatcctatacaggaagttaggacccgtccccgtctccaccacaggaagttaggacccgtccccgtctccaccgcaggaggttaggacccgtccccgtctccaccgcaggaggttaggacccgtccccgtctccaccgcaggaggttgggacccgtccccgtctccaccccaggaggttgggacccgtccgtgtctccaccgcaggaggttgggacccgtctctgtctccaccacaagaagtttggacctgtattagggttctctagagggacagaactaatggaatatacatatatatatatatataaaatggaatatatatatatatatataaaatggaatatatatatggaatatatatataaagtggagtttattaaggattaactcacatgatcacaaggccccacaataggccatctccaggctgaggaacaaggagagcagtctgagtcccaaaaatgaagaaaaaatgagtccaatgtttgagggcaggaagcatccagcacgggagaaagatgtaggctgggaggctaggccagtctctcttttcacgtttttctgcctgcttatgctgtagccgtgctggcagctgattagttggtgcccacccagattaaggatggatctgcctttcccagcccactgactcaaatgtgaatcttttttggcaacaccctcacagacacacccaggatcaatactttgtatccttcaatccaatcaagttgacactcagtattaaccatcacaagtccaccccttgtcaacttgaacccatgcacatctcctgagatcatacataatcttcaaataaagacaataataagatcataattacacctaacataactatacttcatacgaccagaaactcaccaatccccaacccaaatactattatataaagttaacgatacttaaatgctgatgtgaattcaataaatcttatgtcacttgataaaagagaaaggaaataaaatgaagtcatttttgttagtacaagtgtatacatgcacaaacatttttgattgttttttgtttgtgtgttttttaagacagagtctccctctgttgccgaggctgaagtgtggtggtgtgattttgtctcaccgcaacctccacgtcccgagttcaagtgattatcctgcctcagcctcctgagtagctgagattacaggtgtgcaccaccatacccagctaatttttctattttaagtagagatggggtttcaccatgtgggtcaggctggtcttgagctcctgacctcaagtgatcctcccgcctcggcctcccaaaatgctgggattacagtcgtgagccacagcacctggccatgtttttaaaagaaggaggaaatactcacgacaattacagtcctcgtttctgcaactggtcacatggctcgtagctggtattgatgactgccttcttctactacccattctgtattccctttgccttcagcaagcaccttggcagatcttgttttttttttttcctggtggagtgacccaaaccttcattcctgaagggtctgggtcatttgtagtcctgcctggattgggctgttgtagtttcccattgaccttaatcacagggcatggtaatactgagagatgccctaatggatctcctgtattccatgcatactctaacttatcttcattttggagtagtagactgatttcatcttgatagtctgggtcagccaccccagccaacactgtaactcccttcttagcctgttgacttaaaggtaggaggagcttcaagtgtccaggtggcaatcttaatttccagtttaatggaatccttgttctgtctcctggtggcggcgttcctccctctggaactaagacctctaggccagcagaacgtaatgttgcaggaacaggaagcaaaaattttgctagtggatcactaggggtgatggtgagtggtgccacttccatttccacccttggatgcctggacccgtgaatcctggctatgggagaaacagtgccataatattggaccctgattcagagcatacatggccttctgtagaactttgtcccagccctgcaaagtactgtcacctagttggcattgtaattgtgacttcaaaaggccattccactatcctatcaatctacctgcttcacgacgatggggaacatggtaaaaccagtgaattccatgagcatgagcccactgccacacctctttagcagtaaagtgagtgctttggtcagaggcaatgctgtgtggaataccatgagggtggataaggcattctgtgaacccacggatggtagtcttggcagaagcatcgtgtgcaggataggcaaacccatatccagagtaagtgtctattccggtgaggacaaacctctgccatttccatgatggaagaggtccagtataatcaacctgccaccaggtagctggctgatcaccccgaggcatggtgccacatcgagggctcagtgttggtctctgctactggcgaattgggtactcagcagtggccatatccaggtcagccttggtgagtggaagtccatgttgctgagcccatgtgtaacctccatccctgccaccatggccactttgttcatgggtccattgggcaatgacaggggtggctggggaaagaggccgagtggtgtccacagaatgaatcatcctatccacttgattattaaaatcctcctctgctgagctcttttatgtgatatggtgagcactctcatgtgatacaaatatcttcacagtttttgaccactcagagaggtctatccacatacctcttccccaaatttcattgtcatcaattttccaatcatgcttcttccaagtccctgaccatccagccaaaccattggccacagcccatgaatcagtatgtaatcgcacatctggtcatttctccttccatgcaaagtgcacaaccaggtgcattgcttgaagttctgcccactgggaagatttccctttgccactgtccttcagggatgtcctagaaaggggcagtagtgctgcagctgtccactttcgggtggtgcctgcatatcgtgcagaatgatctgtgaaccaggccctagtcttctcttcctctgtcagatgatcgtagggaactctgcatgaggccatcggtgcaggctggagaagagaaggcaagttggcaggagtggagaccacgggcatttgagccacttcctcatgtaacttaacttgtgccttcaggacctgctcaagcccgatcacgtatataccacttccatttgatgatggaatgctgctgttcatgaccaactttatggctagatgggtcagaaagcacccagttcatgataggcagttcaggtcatatggtgacttgatgacccagagtcaaacattcagtttccaccaaagcccagtaacaggccaagagctgtctctcaaaaggagagtagttatctgcagaagatggcagggccttgctccgaaagcctagagaccgccactgtgattcacctatgggggcctgccaaaggctgcagccagcatccttatctgccactgacacctcaagcaacattggatctgctgggtcatatggcccaagtggcagagcaacttgcacaacagcctggacctgtcatagagctttctcctgttctggaccccactcaaaactggcagcctttcaggtcactcgataaatgtgctggagtaacactcaaacgaggaatgtgttgcctccaaaatccaataggcccactaggcgttgtgtctctttcttggttgtaggtggggccaaatgcaggcaacttatccttcaccttggaatatctcgacaggccccaaaccactggacccctagaaattttactgaggtagaaggtccctgaattttattatcagatttattttccatcctctggcatgcaaatgtctcactaataagtccagtgtgtttgctacttctcacttactggatccaatcagcataatgtcaccaatttaatggaccagcgtgatatcttgcagaagcgaaatgcgatcaaggtctctccgaataagattatgacatgaataagattatgacacaaagccggagagttgatacacccctgaggtatgacagtgaaggtatattgctggccttgccagctgaagacaaattgcttctggtgggccttggaacaggaatggagaaaaaggcatttgtcaagtcagtggctacataccaggtaccaagagatatggtaatttgctcaagcaatgaaaccacatctggtacagcagctgcaaattggagtcaccacttggttaaacttacgataatccgctgccgttcaccaagatccatctgtcttctgcacaggccaaatgggagagttgaaccgggatgtggtgggaatcaccaccccgcgtctcaagtttttgatggtgacactaatctctgcaatccctccgggaatacgatattgtttttgatttactgtttttctaggtagaggcagctctcatggcttccatttggcctttccaaccataaaagccctcaccctaccagtcagggagccagtgtgggggttctgccagctgctaagtatgtctctgccaattctgcattctggcactgggaaaatgaccacaggatgagtccggggacccactggacccactgtaagtcagacctgagctaaaactccattaattacctgacctccttaagcccctatttaactggagggccacaatgacgttttgggtcccctggaatcaacctcagctcagaatcagtgtccaatagtccccaaaatgtctgatcatttccctttccccaatgcagttactctggtaaaaggccagaggtctctttggggaaggatgggagaaagattcactgcataaattgtcagtaatgtagtggggtccttcctcaagaggacccgcctccccttcattcaaggggttctgggtctgtaaactggttcaagtctggaaattgattgaggggccgtgattctctttttttgtaattcaaattagtcttttgtccacttgatctagaagttttcggcttatacaaatcaagtaggaatgcagtaggcttcctatcaatttcacttctaggaacactgtgattaattagccaatgccagagctctacacgagacagactattctgattgctgctttgcctctgctgtccattacagaagctacacccaccttgcctttgatggttgagtgctgtcacttggccactgccacctcaggatccaattatttccattgtatttaaattttgtagttgagtgactgtggttcccactgttagatctgacataccaagacgagcaattacagggctcttcaaagatgcaggtgctgccctcacaaatctgtttcgaaagacattggtcaagggtatatcttctgaatcctcccaacttggttgagtaggtctaaagtgactaatccactccaccatcccaatctccctaagtctttggattccttcctctacattaaaccaaggaagaccaagcatttccagcttgctcacagtgggccatctcttcatccgtatttcagctaaaccagcaaataaactattagaaccttttttaactccccgagttgcaacattaaatgcagagtccctgcttagtgggcctaaatctgtaaattcagcctaatccaacgctatgttccttccaccattctccgacacccttaatatccattctcatgcccgttctccagattagtttctataaattagaaaactcaagcagttcttttcgagtgtagctcacttcctcatgggtcacactctcaacctcatctctaggggcccgccaggactttagtctagttataggtctagaggcaaacaggggtgttaggggtggctcctgaggagaatcaacattatcttgcctggcaactgcctcacaggaggccatcactgttgcctcaggcagcgtggggtttatctccttagacaaaggtggaaaggctgatgggtcggggcggggatgttgccactactggggatggggaagctgttaagctgtttcttctggcaaaaaagattcatcagagtttataaactcagtgtccccagcttcatcaggctcctcccacatgtccccattccaagttgcagggtcccattctttttcaatcaatgccctcactttaacagcagacacctggcgaggctgtgcatgcatctttcattgcaggtcagccactcgcatgataagagcttgtgtctgtttttccacaatttcagctcttcctctacaggagataagactctcactcagggcaatcttagcagatttgaggctcagtatctgcttctgaagctgggagatggaatccctgagttcataattttctttcatcactttgtccactaaacttaggagcaaccaaccagcttcattatgttccttggttctccacatatgatcaaagatattatgtatagagtcactaaacttgcctcatgagcgatgaatcaggagtttcaaatgcgtttatttttcataactctctaaacagttcatgccaaggactatcagtgttctccatactattagaagtggagtccttagcatttttggatctaatcgttaaccagccaaccccagaaaccccaaaaccaatgaaagaactccatctttaatattctcttcctctagaaccactcctggtaccaaaatctgtagtagttagggttctctagagggacagaactaacggaatacatatgtataatggagagtttattaagcattaactcacacgatcacaaggtcccacaataggccatctgaaggctgaggagcaaggagagccagtccgagtcccaaaactgaagaacttggagtccgatgttcaagggcaggaagcatccagcacaggagaaagatgtaggctgggaggctaggccagtctctcctatcacatttttctgcctgcttatagtctagccgtgctggcagctgattagattgtgcccacccagattaagggtgggtctgcctttcccagcccactgactcaaatgtgactctcttttggcaacaccctcacagacacacccaggatcaatactttgtatccttcaatccaatcaagttgacactattaaccatcacaggacctgtccccgtctccactgcaggaagttaggacccatccctgtctccacccaggaagttaggacctgtctctgtttctatcacaggaagttgggatctggccctgtggacccagatgggttactgagcttggaacacgagggcttagtgacaaggaactgggaactgacctcaatggctgagtagcgatatggctccctcactcactctgtgaccttgggaagtgggaaggccacattctctctgagcctcagtgtcctcatgtgaaaaatatcaccgaagccactgtcatggggtggtggcagtgatcacactagagagtgcatggtgaggaagagctgagcacttggtaaacggcagcagctctgattgctagtggcagagatagtcatttcatgggtcacctccgagacacaaccaagagccctgcgtagccctggccactgtctgggcaagggcctgggaagggcagggtgtgcctggggagtgcccctggggtggggctctgccagtgagcaggggacgcacctcactccgggcacagcctttggcccccggccacccagcgcccgagatggtgttggaagaggctagtgcctgaatcagcagcctggaggtccacggcgcctcccgcaggtgagtgaggtgtgcccttcgtgttggctgaatcggccagaggggcggcgggaggccccgcctgccagccccgcatccccgcgctctgccgtttctccgcttgctggaccggccctaaccctcttcttgtctctctgcccacttttcttgcagccgctgtgagcgcttgccttgccatgagaatcgggagtgctccaagctgcctctgagaataacctactaccacctctctttccccaccaacatccaagcgcccgcggtggttttccgcatgggcccctccagtgctgtccccggggacagcatgcagctggccatcaccggcggcaatgaggagggctttttcaccacccggaaggtgagcccccacagtggggtggtggccctcaccaagcctgtccccgagcccagggacttgctcctgaccgtcaagatggatctctctcgccacggcaccgtcagctcctttgtggccaagcttttcatctttgtgtctgcagagctctgagcactcgcttcgcgtcgcggggtctccctcctgttgctttcctaaccctgccctccggggcgttaataaagtcttagcaagcgtcccacacagtgagcctcgcgtgccttggttttatttggcatggttgggagtctgtgccgcttgttacccgggggtgagctgggcactggccaccgcctggtacccccgagggctgactgaggagcgctccccactagagggtgtgtgctcgggggtccctgttcacagagcccactgtctgtgccgacagggaggccaggccgggtacatcatttcacatgtgttaacttgtcttcatttgtgttgaacccaaagaataaaggtggtggtggagaagggccctcagattgctgagcacagtcccctctcgttttacagatgtggaaactgaggcccagagagaaggggaagggttggccagggtcgtctggcctgctgtggccatgccaggtcaaggaagcgggtctgctggcccctgcctggttctttgctgtatccccggaggtgagcatttcactgagacaagaaagctctctcctgagattcaagcctcctcttctgtttgtcttgatcagaagcccaaatctgtggtgcagaaacacgggatgcggttgcggctcctaggatgcagctcttgcctcagtgaagtcgttttgcccccactgaggatcctggccctgtgccggggggaggcaaaggaccacacaatacatgtgatactcacgggatccttcataggccttacaccagtcctgccaggcaggtggtcatcctcatgaagactcagagagggcaagtgatttgcccaagatcacacagctggtatccgagccctggtttactgactccacagatctggctgttgcgttctgccagaatacctccactgagggccttaaccccctgcctccctccatctcctccaccatggtccagccaagccagtcatctgtccccctctgctgctcccagcgtccattcacctcccctacagctcattctttgcttagcagctggagtgatcttttagcctctgcctaaaaccgttcctggcttccttaccatttgggttaaggcctccagatcctcaagatgtctgaaggccgtgcctaatttagtccttgcatgcaatttccagcctggcctcaacttgttctatccttgcccacttcccttgagccacgctgcaagctctgctgcctccggcccttggtacgtgctttgcacccttggcctgaatgttgcttaaactccagctcatgtgcctgcctcagagaggccttccctgccacccctggcttctgttttctctgtccgtccttctcatgacccctttccttcatggtgcttgtaacaggctgcggttcctgttgactcgcgtttcacatttgtcttccgcaccttccagaaggctctgtgaaggcagggaccaggtctatctcattcagtgcggtgttcccagctccttgcaagacatctcgcgtgcagaaggtgctctgtcaatgtctgttcagggaacagatgactctgccagccctggcttatgtcactagcatttctgtggctgtgacactgtgctgacactgtttccaggcagaaatccaagaagggaaggcagaacaccccagcgggatcaagtaaagaggactgcagggttcttccatggaagcaggggttggaggatacccaccttgatgcctagtgaggaagatggacctggacagacagtcagctccacaccttgcgctgagcagctgtgattgtgccacgggagcatgagcccttttccccacggcccttgccactgtctcctggccctctctctgatcatgccaggtttgcaccagcctcgagtctcccatgttgtagtacattctccaagatgcagcccaggagcctctctgaaggaccagtctggttacgatggtctgagcttccttagaaccttccatggttgtcttttcccagcagatgaagcatagcctccttggaatggcatgggaggcctggcctgatctggcctctgcccaccctttgagctgcacctgccccaccccagctcatccatgtgcttgtaccctggccccacggggaggcttgcccttccctgaatctgccttcttgtggctttagcatgtgccatgctgtccccctgcagactgccattctccttgcagacttggctcagaagtcacctcctcagtgcagttagcctgagctcccctggccccaggtgcctccatcagagcatttaccccattgtgttgtggctgttccttaacgtccccactagccaggctctttgagggcagggattgtgtctggttaatttctgtattctctgcaactttgcaatgtttggcttgaagaaggagctcagtaaacatctgaataaacatgcaggttgatggatggatggacagaccaatggatggatggatggatggatggatagcatttttaaggcttagttcaaatatcgtctcctcagccaggtgtggtggctcacgcctgtaatcccagcactttgggaggccgaagcaggcagatcagctgaggtcgggagtttgagaccagcctggccaacatggagaaaccccgtctctaccaaaaatacaaaaattagctgggtatggtggcaggcacctgtaatcccagctactcaggaggctgaggcaggagagtcgcttgagcccaggaggcagagattgcagtgagctgagatcggagtatggcacaccagcctgggcaagaagagtgagactctgtctcaaaaaaataagtaaaaattgtctcctctgtttagccagcaagccacagcaggggttcttgtcctattcaggcatccatttgtcaggggcgggattactcaggctggaaggaacacctgtgccttcatgtgcatagcaatgtgaagaggtgggggaaacctctcaggggctttggaggctacccagtgaccttccacagcttgccagaagctcctctgcaacattcccaccaagggactcttctttgcttgtggaactccctgcctcctgaggggtcccgttgcattttgggatcccatcgacgtttgcgtgtgtgcctgagtgcactgtgggagtgacagctgagtgacctgagtgctcacccctgtcccgcagctccttggggctccttagccatgttctcggctcatgctgctgacagaggacaccatgcaggaaaagcaaaataagagcaggaggttgaatttccttcttgccatttactagttctgtgaccctggatacatcgtcagcctttcagagcctcaaggcccaccttatggttgattttgaagatggcctgaaatagtccagcaggcagcgcctgatacagagtaaacactccataggtgtgagtgtgggtttcttcattcattggaaggtaactgggtgttcgtgtggcttttcattgaaatggggatgaagattcagagagtttggagggatccaaggtcatatgtggagctgacatcacttttgattcagaacctgtgctttcctggttgtgtcactagtaaatcaagctcccaaggagaaaagacagcaataagggtgatttttattgtaatgataataataacaactccaacagctaacacatagagtgctgaccatgagacaggcgctgttccaagcatgtaattcgtttactcttcacagcagcctagggaagcaagcagtgctaatatccccattccacagtgaggacagggaggcacagaaaggtgaaggaacttgcccaaagttccacagctggtttccagtggcactgggattcagacgcaggcagcctgggctgggatctgtgctctgatcccctgtcctccactgcagcaaatacgggggagaggcagcatccctgggatgaatgagactgttgctccagccccatctcacagagcccgctctgccattcccaaactcaaaacaggatatcttattagctaaaggaggaggcagtgtggtaaggaggaaagggctatgaggctggaatgaaataagatatgcaaaatgggccaggtgcggtggctcatgcctgtaatcccagcactttgggaggccaaggcaggcagaccactgaaggtcgggagttcaagaccagcctggccaacatgatgaaaccccgtctttaccaaaaatacaacaattagctggtcgtggtggtacacacctgtaatctcagctgctcaggaggctgaggcaggagaactgcttgaacctggaatacagagattccagtgagccaagattgtgccaccacactccagcctgggcgatagagtgagactttgtctcagaaaaaagatatgcaaaacgtgtagcgtagagactggaaaggcagatgcattatttctgaagctctctagatcccaaccaaaaaacacccagacaactagataggaaaaaaaatgtttccatggaaaacatttacaaacgaaacaaggtatggttgtctgcagttcaggcccacctgcatgactttggcatctgtgcaggaaaaaacagtggcagaaccccaaaataatcaacaggtatccccagaaagtgtactaggtgctttgggggaacagcagctgaaactgggaggcgttttcctcactccaggggccagagtgtgcacagagccagtgggagggaggaaggggctggcgcaggcttgctcttgggagcttttgaaacttagccaccacagctctccctaaggtcagagtctcacacgagggagagactgctggaaatggaacagaaattgtgtagaaaagagaccatagagactgtgggaagagaaggtccgggtaaatgtggaagaatgtcaggaggtgagctctgcaaagtcaggaagataactgtgaatgatactctttctcaaattccaggaaaactagtttcctttaaggatgatcaacccaaaagcatcaaggtcaaattccatggatgagtttctataacaaagtaccatagactgggtggcttaaaataatagaaatgtattacttcatggttctggaggccagaagtccaaaatcaaggtgtcagcagggctgcacttcctctgaaacctctaggggaatgcctcttctgtaggggagtgctctttctgtaggggagtgctccttctgtaggggagtgctccttctgtaggggagtgctccttctgtaggggaatgcctcttctgtaggggagtgctccttctgtaggggaatgcctcttctgtaggggaatgctccttctgtagggcatgctccttctgtaggagaatgctcctgtaggggaatgctccttctgtaagggaatgctcctcctgtaagggaatgcctcttctgtgggagaatgctccttctgtaggggaatgcctcttctgtaggggaatgctccttctgtaggggagtgctccttctgtaggagaatgctcctgtaggggacttctgtaggggagtgctccttctgtaagggaatgctcctcctgtaagggaatgcctcttctgtaggggaatgctcctcctgtaagggaatgcctcttctgtgggagaatgctccttctgtaggagcatgacttgtctcagcccctggtggtttgttggtgatcattggtgttccttggctcgcagctacatcgctgcaatctctgcctttgtcatcacatgatcttgtgtgtctttgtcgtcacatagccctcttcttataaggataacggtcatcttggatcagggcccaccctactccagtgtgacctcatcttaactgattacatctgcaatgaccgtagtttccagtgacgtcacattctgaggtactggggatggaactttgacatctttcttggaaggatgtaatgcaaaccatgacacccatagaaagtgttaggggctgaattgtgtccccccccaaattcatatgttgaattcctaatccctaatacctctaaagtccctatctccaaatgcagtcacattcaacgaggtaattaaggtaaaagtgagatcatatgaatgggccctaatccaatacagcaggagttcttataagaagggattagggaccaggtgtggtggctcacgcctgtaatcccagcactttgggaggccaaggtgggcagatcacaaggtcaagagttcgagaccagcctggtccacatggtgaaaccacacctctactaagaatacaaaaattagccgggtgtggtggcatgtgcctgtaatctcagcgacttgggaggctgaggcaggagaatcgcttgaacccaggaggcggaggttgcagtgagccgagatcatgccactgtactccagcctgggtgacagggcaagactctgtctcaaaaaagaagaagaagaagaagaagaagaagaagaagaagaagagattaggaaacagacatgcacagagggaagaccatgtgaggaggacacagggagaagtcagacttctacaagccaaagagagaggcctcagaaagaaccaaacctgccaacaccttgatcttggactttcagccttcagaaccatgagacaatccatttctcttggttaggccacccagtctgttgtatagcaaacaaatgcacagctattataagcaaaaaagagaataagagacagaatgatatccctctgggtaatgaaagcacaccagaaagacgtgcccagactaaatgaaaattctaatattctatcttgaaagaaaccaaaagtgttaagaaaataaacaaaacatagaagaaaaatggggccgggtgccctgtaatcccagcattttgggaggctgaggcaggtggatcacctgaggtcaggagttcgagaccaccctggccaacatggtgaaaccccatctctactaaaaatacaaaaattagccaggcatggtggcaggtgcctgtaatcccagctactcaggaggctgaggcaggagaatcacttgaaccagggaggcagaggttgcagtgagccaagattgtgccattgccctctggcctgggtgacagagcgagactctgtctcaaaaaaaaaaaaaaaaaaaagaaaagaaaagaaaagaaaaaaaaaagaaaaagaaaaaaagaaagaaagaaaggaaaatagaaaaatcgagtcagaattagaagaaaactgagaaatgaagtaatagaccaaagaaacaaaaagttaaaaatttcagatgtaaatactaaactagatggaacacaaaagtgaataaacagataaatagaagttgaaaagaacaacaagttttaaaaatcaagaaagaaataacaagagatgaaaggcttgaagaaaaagtgacaaatattcaaaatctgtaagaagatctgacatttagataataggactccctgcagaagaagccgaatacatgggggaaagtactatacatgatctcaagaaaactttccataaattaaaaaagagatttgaaattccacattgaaataacacatagcgtacctgagaatatcaacaagaacaaccaacaccaagacacataacacattcttgtgaaattattgtactttaaagaaaaggaggaaggccgggtgtggtggctcatacctgtaatcacagcactttaggggccaaggtggcagatcacaaggtcaggatttcaagaccagcttgaccaacatggtgaaaccccgtatctactaaaaatataaaaaattagcatggtggtgcacgtctgtaatctcagctgctcaggaggctgaggcaggagaatcgcttaaacttgggaggcggaggttgcagggagccgagatcatgccactgcattccagcctgggaaacaagagtctcaaaaaaaaaaaaaaaaaaaaaaaaagaaagaaagaaaaggagggaaaaacaaactatgaacatttaaacaaaaacagtaagtgatttataaaggaaaaaaaatgttctcatcagactctttgacagcaacactttatgctaaaagaaaataaataacatattaaggactctcaagaaaagttaagcccagaattttatacctagcaaaactgactttcatgtgcaaaaagcataaactattatgaccatgcaagcattaaacattcagttacttctaaaactacaactaaatgagtgttataaggaaaagagtatagtatgaattactggataggtcagacaatgtagacatagcacatttatttttaaactctgagccgaatagggagagcatatcaaaaattattttcaataattatgttagtcatggtaactttagaattgttatcctgaggctactgtgtaggtaatgtgggataatgatgggatactgcatgtccttgaggaccaggattctgatgtggaagaaagaatgtgcctttgtaatacagaagagattaattaaaaaaccatatggtccttcttttgaattggatatcagtatgaactcttggtgtatattagtttttaaatgttcactgaagaggcctagaaacaatgaccaaccccctagcactgagcctccctagtatccagactggtcttgataagccatttctcactaaaaaacaaaaacaggccaggcgcggtggctcacacctataatcccagcactatgggaggccaaggcaggcagatcacaatgtcaggagttcgagactagcctgaccaacatgatgaaaccccatctctactaaaaatacaaaaattagctggtcgtggtggtgcccgcctgtaatcccagctactcaggaggctgaggcaggagaatcacttgaacccgggaggtggaggttgcagtgagccgatatcgcaccacagcactccagcctgggtgacagagcgagactcatctcaaaaaatatataaaaataaaaataaatgaaaaacaaaaacagaaatacaaatccaagacttcttggagaaatggttgattccaggtcttgggcagtaaaagtgtaaaatgaggctggatcatctcgtcacatcagatagcaagaaagctgtgaaagacgacaagggctgggccaaaaggacccaggagccaacttcattttccctctggcaagagatgggaaaatttgagtttcaacaaaggataaaaattgcagaggatcaaacctcatcggagtggcttccatcatgggttcatactgatttttttttccccaaaaatcctttggagaatgatagcacactagttagcttattatcctgaaaattagaaaattcaaggaaacaaccaagtattgatctgctatttcctggtaattaaatcacaagagcacatgaagggaagcatctgtttacaggagtagtccagctaataaatggaagtgaagtggtagaaccagactatcggcattttgcaatccttgatgaatcagtgggcgtaggccttgagcatcagtagatgctgtcctcacagagacagccagtcactgtgtggctctcactgaagacacactaccacctaccatcttgccaaagggaccgggcctgcatgggatcaggcctctggatctggctgccaatgtccaagaaatccagtggacagaggaccatgctgaactgcaccgtgaggatgcaatcagcaaagtccagcctgtaggaaacacaacagctcaaattcttcaggttctttaatagataagttgtatggaaaataaaggaggccgggcacgttggctcacgcctgtaatcccaacactttgggaggccaaggtgggtgggtcacctgaggtcaggagttcaagaccagcccgaccaacatggtgaagccccatctctactaaatacaaaaaattagccaggcatgatggtgcatgcctgtaatcccagctacttgggaggctgaggcaggagaattgcttgaacccaggaggcggaggttgcagtgagctgagattgcgccattgtactccagcctgggtgacgagcaaaactccgtctcaaataaataaataaataaataaatagaaaagaaaataaaggaacagagaagaaacctgtagcttaaaatggacttaaaaggcagagcaaaaacttgttgatggacaagtctgaatgattgtgtctagagacgcacactgatgtgagaaaactatgaagaaacccaagtaggccgggctcggtggctcaggcctgtaatcccagcactttgggaggctgaggtgggcggatcacaaggtcagaagttcaagaccagcctgaccaacatggtaaaaccctgtctctactaaaaaaaaatacaaaaaaaattagccgggcatggtggcatgcgcctgtaatcccagctactcaggaggctgaggcaggagaatcgcttgaacctgggaggcggaggttgcagtgagctgagactgtgccactgtactccagtctgggtgacagagcgagactctgtctcaaaaaaaaaaaaaaaaaaaaacccaagtagagcactgccgtgggactcaggctaggggtcactgttgggttgcaggaggggttgagttctgtctggcagttgcggggcgtttggtggctggccaagttctctttcttgacctgggtggtgattataaaggcgtttgccttgtaataactcgttaaactatactttcattttgtgtaattttgtatccgtgttttattttatgatcaagaggttgtaaaaatctgtctagcacagtacctggaacccagacctctgagagactgtagcctcttctgcctccccgtcacctggtgatgtggaattgactgccctgtgctgggcaccgagcttggcgctttctatctgctccttcgtttattaccctgctgcccagcctcactgtgggctctgagaaggcgggaccatgtgtcccttgttcactttgctgtccctagcagccggcgcctggcactcaaaacatatttgttgggcaagtgaacctgtgactctattttgccattgtagctattgatgctcaattcgtgcagttgacaaatgtccaagctgtgcttatccgccagggcacatggaagctggagggtgttgctggcatttaggtcccggtccagtttgcaggaagggccatgaagcctccccacagagcagccaggctgcagagaccactgtcgttctctgatggagctgtctctgggacagatgcccctgccctggccacctgctcctcctccctagacctcggcccctgtgggagctgctgtcccagcttccccgtcagcctcgtgtgctgtggttcccctcaggctccagcaggagaagacagacacggtccgctgcatcaagtcctgccgccccaacgatgtcacatgcgtgttcgaccccgtgcacaccatctcccacaccgtcatctcgctgcctaccttccgcgagttcacccgccctgaaggtgagtgggatgggtgtgggggtcccagggccccctagggcctccctcggcttcagctgagggcttggcctacaggagttgttccttgtaagatgtggcccaggctttgaaatgcagaactttcttttttttttttttttttttttgagacggagtctcgctctgtcgcccgggctggagtgcagtggtgccatctcggctcactgcaagctccacctcccgggttcacgccattctcctgcctcagccttccgagtagctgggactacaggcgcccgccaccacgcctggctaatctttttgtatttttagtaaagacggggtttcaccgtgttcgccaggatggtctcaatctcctgacctcatgatccacccgcctcagcctcccaaagtgctgggattacaggcgtgagccaccgcgcctggcaacttgacatgcagaactttctttgtgtctgtgtcccccccacacccacctggcacagcagcatttggcccattctcagctttccgttcaggtggtcttttcttatgggtaacggttgttctgcagagagccattaagcgctgattctgtgaccagcactggagaatcagggagggcctccgggaggaagtgatggctaggctgggtcctgagtggtgaggtatttgagtgaaagggggagaaggggaggagggtgcccagtggagcaggacatggccagaagggtctggaggtatgggggggcggtgtgggcgtttgagaaactgagccaaggttttctgctggagcgctagaggcttggcaagaggtgggctggaaggataaacaggaggctaaaactggagttgggccttcaacccccaggctttgggggaaccatcggaaggttgcagtggaggaggtttgcatatagaaacatcatcctgttgatccagggccaggtgaactggaggggccagacggggagcaggaagctcaggtgtaacccagtcagtgctcccacaccccagcctggctctctaggaagctcctggcatgcagtgtagtcatgttgtgtaacctgccatcactgcaccgtttctctggagcagggcctgggctgcgtgctcccaagcctggcagagggctatggatggagcattgtcctgttcacctcgcttcctggctgtgctgcccgtgtgcccggtccccaaccacccccgccctctagggagtccctatccctggcctgcggagaagcatgccatgatgagttcattcagcagccgtggacggagcccctctgtgtcaggctctagggacatggtgataagaaggggtcctcccaccctctcaggggaggcatgcaacggagccagccgcgaggacaccagtgtttacaccatgacacaaccatgcgggggggtggggggaggagaggctccctcagcacgtggttgcccaaggagccgtccccagtcccagtccccctaggtttgctcctcccgaaaaggaataacgctgaatcgtcacagggtggcacagacttgggtcagagaaaataactaactggtatttgccttttgcaaaatgatggggtttcaccaaaccacatacaaatccttcccaaatccccagtggctggttttgtggcctctccggccagccccgatctgagtgttggttatcgcagggagccgagtgccgttgggacacctgttagcatcttgggcccaggaaatccacaccctgaccttaagtgctgaaaggacctttagtgggtctccgccggcttccttcctcaccttacaggtgaggaaactgaggcccacagagaggactcccccaagacagcccagagctggggctgccctgcttcactgtctgatctgggagatggacacacaccccccagagaacccaggccaccgctcagggtggcccccctgacctgtggcactatagatgggagaggagcccacccctctggcctttctgctgtctccctctgtcccctcactcgctttcctcctctggtccccaccttcatgaatatgcacagtgactgatgacttctcaccagcccttcctctgattagctctgtgtccccgaggaagatccaaaatctctcctgacttcagtttcccctgctataaaacagggatgggctatgatataggaaggtccagacccctccaccctccccacacaggggatctctggcttcattgatgttgtctcatgaaagggccctgggttaggtcttcattccccaagggtgagttcctggggacgaggctgggactggggctggggccaggctgtgctgagcccttctccattctgtgcctctgcagagatcatcttcctccgggccatcacgccaccgcatcctgccagccaggctaacatcatcttcgacatcacggaagggaacctgcgggactcttttgacatcatcaagcgttacatggacggcatgaccgtgggtgagtggctgggaatatcagctctatccaggcacccctccccctccaccccgaaaccctctctggcccagcccaactcccatctgagtcccctccccaaattcaagcccacccaaccttcagggcccagcgccgaggccaccacagctcccaatcggtctcggccggaggaacagccagagtgggggatcctgcctgggatctgaccctagctgtgccacccactctctgggtgacccctctgggtctcggtctccctgcctataacatgggtgggttccagagagcgctgcgcctcacaaccatgaatttcaaatgataccacccaagtaaagtgcttgtcctgagggctggcacagtcccgcggtcggtgggagctaaggggattgttattcttggggtgcaatgggagggatagcaaagtaggaatcagagggcctgagctctggtctctcagccttggaactagctggattcgccatgtggccttgagcagtagtcgtcccctccctacgcatcagttggtaagaggaccaaggccactctgtgtgcacagcccatctgaatggggagctcactgctctttctccctggagatccggtgtttggggagcgtgaagggaggctggggcatgaggggactgtggaagtcctgttggtgggtgcaggctggggaagatgtttacaggcgggggcagggccctccctggctaggaacgggctttaatgacaacctactcgtgtgaaaaaatatccaggcccactccattccgcacgcttgtttctgtcattcacagcccctctcctgaactgtcacattttaaaagatttacagtcatgggaaatgaaaacggtggcatctgccattttggactcggatttatactctgaacactttcaaagcagctgagcaacggacggacagtccctgacctcccctgggcctcagtttccccattgtgaactgggaggagtgggcttcctagtcccttaggcgctggagtccgggaggtcctaaccagaacccacgagcgtgcagtgcgcacagagcagagcgttttggagcctggcctccaggtggcgctgttggaccttggacgctcagtctttgcgcctcaaacccgacggttgttaaaactggcagctggagaaagggaatcgttattcccgtcttgccaaagagccatttatagcacctttacaagcttttaaatgggtttgcatgttgtaaacatgactgagtcactggggggctccccaccccagcctcctcctgcgctagctggcagcaggaataattagttaattacaattaatggtgcattagccctcgcgtgattccaaggggaaggcgcatggtttggttgtcggcagttgtgaaacttgctgcttgcccttgagtcactccccactctgggcctcagtttcccccattgtgaaatgagagtttagatgaagacagccttgagggtccttcaggcccctgtgcaggagggcaggcagggagggggttgggtcagggctttgtcctgtcccactgggtgggtggggtatgcaccctgacactggcccacagccgccccccgccccaaaggggccagccctgtgcttgatgctgggcctgcagttgtggctgggacatggccctcaggtgatttctagatcttggaacatgggagtttggaatcctaggaccttctagttcactcactcattctttccgtttctgaacccttcttgagcctctacctgtgcctgaccctgggctaagccttgcagatacagagatggataaatgccacatagcccctgaggactttgcatctcagcagcagggagaagccaccccgtatcagatcatcaaaatatgatgccgaaataggcatgcacagagacaggccttgatggcctgtggaggctctcttaggggaagtctcctggcaggttttacgtctttagttcccacctacatccttcctggggtgacccaagccaagaggttgggcagctgctgggcctagaaccagcacccaccagcgcctttctctggctgcatctgctccagacagaaccaacctgggagtgtctgtttctcagcttcccatccactggggcagaaaatcctggcatgtcagagcctggaggctcctagagaccatcccttccttcttccgtaggaggggaaactgaggcccggaagggcgagggggcttgccagtcttcttacagtgaatcagggacacagtgggcaatggaaaggagtcccagggtatgagagatgatcacaggtgccgtcccggcagcgggcttctgggaacggaatgtggatgaggccacaaggacccagcggcttcccccggcacagttggtcacgggtgccctggtctttggaattctgggctggggctgcgtgggggagggccccagcctggcccttggaattgtcgtgcctgtagccctgtgtgctggggaggcccctgcctcttccacgcctcggtctgtgtgcaggatgccccacctggctgggctcctggagttgacctggtgcccatgtcatctcaggtggaagactgagaccagggaggcaagccctgcgtgttgggacctaggctgcattgctggctggctcctgtctctgtccccactgcgctgatcttatttctctgtctgagatctcctccttgggcttccatatccctacttccttctccctcctcttctgcccagaataacttccatacatcctgggagcttcctggtccctaggggcagccatcccggcacacggctcctggcctgtccacctggtaatagatggttccaccgttggactcgagcccagcctgaagcagccctgaaaacgtggggttgaacccttgccggctccttaccgttgctgggcaccttcacccccgcattccccagtcctcacagacactgccagcgacgggtcatgattgtctcccttgggcaaaggagggagctgagttaaatgaccgcctgagactgtgcaactgaaaaactgcagggcctgggatgttttccgacttgtttttagcagtgcagttctgatttcaagcagtgacttaggcagaaacccttcatggtggtggagaggaagaaagcggcttccagggctgctgctcctggtggggagcgtgggaggctcttgagcctcctgggcagccccgtgcagctctgtgctgcctgcagcacacggcagggaacgccgcctactcacggtgcttgctgaacacctgtctgctctaggccatgccctgtgtggacactgggcaccggatcaggagggcttcctggaggaggtgaggcccgagctgagtgtccttgcatgtgagggagtgacacttagtgagcacctgtgatgaccaggagccagggtttcatcatcgccaggaccctgtgacacggtgggattatctcctctaacaaaggagagagcgagagccagagagggcaagagatttgcccgaggccactcagagctggggccagagcgggcctggagcccggtcttccccagacaccacacccgcccagagccggagcccagggttgactgctgctgtggtgggctaagttgctgtgagtttggatgtcccagaaaaacaatcagcgcacaggccccggggctcgccgtgttcagtcctcccagagtaacagaagaagagggagaaatgccccgagtccactaagaacctgcaagggccgggtcgtcctctaatgtagccttgaaagacccgttcttagcggggatcgaggagcccgcagcagggcccgcgccgtcgtctttgtaaagcccccttgcattcctctttaaccggctgtcaaagaaaaatgaagaatgcgttttcgccctgtgcaaaaatgctccattaatgcccgagggattctcaggccactacaaagctttccttatctggctctggattcattctcagctctgcagcctgtaatccggggtgctctgggaagagatctttcaggtagtatatcctgagtgatgactaatgggggagccctggctgcagcaggggcgggctgtgtatcatcagcgtgcggaagagagagacagaaaggcaactcgaggccacccgggctccccgggcccctgggctatggctgctgtctgagcctcagacttcccctccagcctccagatcaccacttccttttaactctcaggccagccacatctgtgtctgtctggctccctccactcagcctcaagacccagcatgtgtgtgaccacttccaagaagcctcccctgactgctccagggtcatggctgtgtgataggagggcctggcctgcaaaaacgccctccctatttctccagggagggaaatctgtgtgctatgaggcttggttgtggccacatttctgttaaaaccctgccaatgccaacaggagctacagagcctgcaggtgaagtaattctttggcctacggacgaattttgcatgtggacctcctgacccttgggcctcccgggttgcagggagctacggagttgtctttgtagttttttgcaggccagcccctcctgtcgcacgggcatgaccatggggcagtcaggggaggcttcctggaagaggtcacacacattctgggtcttgaggctgaggggtgagccagacaagtgggacacccaaactcacagccacgtctgtggctggcccatgaacagcgcgatgagaggcagggagccaggaagggagggcacagcctgcggtttggggctgctggagcatccagggtgcagggagggtcgaggggaggccgaaaggggctgcagggccaggccttggtggatgctgtcctggggaccacgggagccacgggaggtctgtgctgcccatggagcttccagatcccgctgctttatttaacccactgggcctcctgcagcttgaggttgcggttgaggttgtacccactcagcaggtaagaagactgaggccggaagagccaagtccccaggatctcccagccaggaagtgttcgaggatagggcttagacctgaactgcccagatccgggactccccatccccatggcctatgttaagccctgattattttttctggtctatactagctggtatctacactggctggcatctgtcagccgtggttgagtctgagtcccagccgtagaggataaatagtgaagcacctcctttcacacagtcacagtgctcccggccatgggatcttgggtcctgggccagcccctgatgaggaaagacctccctgtatgtccaggcagtcaaaagatgaagttcagatgtcaccatgctgcggaatggcgaggtcctggagggtctctctccggctctttacctgccgagggcccactcatccttggtcacacaggcgacccatcatgctgctccctgggacccccagacctgcctcctttccaggacccctcccagcctcaatgattccccagtgacagccacagccgcacctggtgcagatagatgctggggctggctgcaatttagggaggatctttctaggctggggcaggagcttcacggctgggaatgggctttaatgacaacctacgcatcttagaagacattcagacccactccactctgcacagttgtttctgggcaagccctctgatatgatttagtgcacgtgtggctgggtgtggagtgtgtgcgtgtgtgtgggtgcgtgtgagtggtgagtgcgtatgcacagggtttgatctctgagatgttttatactctctggcttggagaagggacagtcctgtagtatcaagaccagaccttgtgtccccagcccaaggctgccctgggcctagggacagtatttggagacttcgctggcagttttgcgttggaatcacctggtgcctccctgtacgtccacccaccctgtgcccagatccccttcgcaagcaccatatgctgttagatcctcgagcagccttgtgggacagccaccctggggctggtatcaccatttatgtaagaaaaaaaaggaagtgctggcccagggtcccacagccagcaagttggagctgcactgcccaagcaggtcctttagtcagctctctgttgtcccccaagcccctcagccccccaggcagctctaagggctcagctgctgcaggattccttagagaagctgaagggtttgggtcctcagctcctggccggggcaagtctggccaagcagcatggcagcgatgaagtccacatgatcgaagggtggatgcttaccttagacagctgctcaccttagacatggtcacctatattacatttaggaaggaaacgccctaattggagactctgcatctcattaatggaatcagatgaaacgatgtatgtgaaagctcccagcagtgcctggcacacagtgggtgcacaggatgtaaatactgatggaaacctaaatgttctgtaaatatcagttcttcctaatttcgccttgccgtctctcttgagagtggctataccttctaggcctgatcaggaaggaagctgggttttggtgtgccagtcaggtgagacgcagagaagacagcacaatcaacacaggaagtaacagaagcagctagttactcacaggtcctagagaggtggggagcaccccttgcagggccaatgggaaggggaagcgcctgcagcatgagagagagagagaatgagagagagagacagagagagacctgtgggaccaaagcctttactggggtccagggtgttatccaggcaggtttcccgtgaggaattctaactggggggcttggagcaggcaggagttccctgaggtcatgcggtggcggatgggggtcacttctgcataggcctgcactatcgatgtaggtgtgagggtctttgggttgtatccagctgtcccataaggcaggggcccccaggaggtggtggtataaggcagtcctctgggtcaaccgccttaaggaactgggaggaggtggagaactggaacccgcagcaagggtgactgagccctgctctggtgtgggagttaaacgcacattcagaatgcgtgccgaggcaacataggatgagaagccggcacaacacccaggcttttccatgaaagtgaacttgacagccgctttcccacattgtctgtgctgagtcgtgggagcctctgagttttgccagtgtgtcaacgcgctcctgcagcactctcacccccacttaaagggaactaccacagtttatgttttgaaatcgcattttaaattccatctgtgggtgtataaggattattacccaatttcaagtttaccgtttgaaaaatagcaatggcgtgagtggccccttttaggcaaagtgtgattgggtctgtgtggccgcggcaaactgctctgggcttgcggctttgttctctgtttccagctgtgtgactttaggcaaatttcataacctgtctgagcctcagctttcttctcagtaaaattgccataataatatttgccctgcagggtaatagggactgaggtgtgtgcctgttttaacataagagtggtctagtctggaggataaatgagccgctgggaggaagaagtttggaaatggagggctggtgggagcccggagccttcttaggggacaacaggccagatcaaggatgatgggacagggccaggaccgtccagcccaaagtggctccaactgcccaggacctacttaataggcagatctcgcggcctgggctggtgaggccggcctggccggaagcaagtcagcaagcaggcctctcaagtcctatcatccttgaattatcttattcattcaacaagaacatcctggggtacttttctatgccaggccctgcactgggtactgcagaacaaatctacatccaagctacgcatcctgcttttaagaagctccccaccagcatccatagcatcctgccagagttcccacagctgaaagtgcttgtggtttaggggttggtgtcatcccagttcatgtctgagagagagagagaagtggcgtgtggcagggctgctatgtacagttggatgtgttgtgcactgcaaaatctaggcagcaccatccaccggtgagtctatttgcagtacacaacctgctcaactgtatgcagcagccccggtacaagggcttgtgaatggagatatctacctagctgtacctctccccctggccaggcaaggcctcagtcaaggcttgagaccgtccattgtcccagccagcagggcccagatcacctcgttaaaattattacctcttaaggggttaaatgtgcgccgctgaccgcgtcctgcagcccatgtggagagtttggcccgggatcagtacacattacaaatgagattcagaaattccacctaaaaacaacagcgcggccgtccctgcccaacgatgagtgattgccctgtcctggctttcacggcaaatcccagggatgacgcgctttctcttttctgggagacacagccctgtcaccccgggggccacaccctggctggcagccaagttctttcccagggtgctgggcccggcctcctctgggctgggatcagctgcggcctgactccatcttgagctgggggtgtcaccgagggttccaggaggtggagggcatggggacgagggtgtctcagagactgggagatggaaggagaacacacaccttttctgctccctatgtcgtgaccccatggggcagagatgggctctgaggcatcagagcctgtgccctgtgtgacggcgcgtagccccccgaaacagctgctgttatccctccttgaggttatcagcccccaattccccagataccaaaactctcagaagtcacccccgtcacaaagctggtgaccctccctgcagcagctcctgggctcaggccagacccctcagaaggcttggtagcattaatggggtacagtctctgcttttgagcctacttcagtgagacacacagggggccccagggaccagtcccggaaacctccctgctcagtgggtggcccctggacagcctgggctggacctgcagtaacgtggacagcattcattcggagctcaaggcctcagccccaggagacgccctgtccatgtgagtgccgcactgcacacccgagattggttttccagcccaggacctggctaggaagggtcggcggggtacagcccgctcagcaccccctgccgtggccgcctctgcaggaggagacagcatggtggggagaggggactgtcttgccctgctgaacccccaggggtcggctacacccctctctacaggcctttttggtgtagcgcaggtgagacaatgcagccagagaggttgggagattacacagctccacatctgcggtgtcaccgtggacgggaccgtcatggtcccagcgggagggtggaaggaagccaaacttgagacgtctgccttgcacaaaggcagtggtgctcgtcaaggtttgggctggaagacttagcacctggcgggcatctgaaaatttccatctcccgtgcctgcttggtccccacggacacatgcctgagccatcagggactgcaaatcacaggggtgggaagacagggacgcacactgagcaggtgaaaggtggtggggggtaagcaggtgtttcggaaggagtagaggagggcccggaatggggccacgtaggaaagggtcacatccattcaccctggagtcagcccgagggcccaggcagggtggggtcctagtgatgcctgtcggtgggtgacatcaggccatccacagcaccgggagccagcagaaagggctgggccaggccatgtggacagggtctacggacagtacagggccagaggtccctattctgggaccttgacatgctgccgttctcgtgagcttctgggggactcctgcgaggcatgtgggctgcttctcagacctgcgggtaccccacctcccagatgttgtcaatgggatgtgaggttcacgagcacgtcacggagcctctcccctcgtcatgtacgtgcgcatcatggcaaaatgtgcctggccactggttcctgacgctggaaggcacgaacccactccccacacccacagccggcgttgctgtgactgcagtgtctgtgttctaagccccacttttcacatccatccccgctgcccggccagagagacgtcctcagcccagagccccacttttcacatccatccccgctgcccggccagagacacgtcctcagcccagagccccacttttcacatccatccccgctgcccggccagagacacgtcctcagcccagagccccacttttcacatccatccccgctgcccggccagagagacatcctcagcccagagcttcctatctccctcgcctgctcctaccctccagaataaaatgtgtacgaggtagggaatctgtgcttgtctgccagttgtggtcactgctgtatctcttagagtggggcttacccctgggggcccagcgctcagggatgcgtgggctccaggctggagagaagcacccagatctaccaactggccttccggctctgcagagccgcttgcatcttactccttcctcttccctccgctctgcttcagccactccagcccatgcctcagaccccaaatattccatggcctctctcctctcctggactgtagccgtgacattcacttccttctccttttggtgaactcctattcatccctccaagccgatgtcagctgtcacctcctcttggatgccgtccacacgctccacatgcagagtgtgcagctccttcttttgtgctccagtggccccagatgagccccttttgcaactctcctcatactcattctcccaacgagtaatgtgtgtatccctgggggcaggtcctgctctgaggaatgcagcagtgactaaggcagacatgaacgcctctctcatacactttttatcccagagggtaggagtacacgagaaacaagcataatatatacacggtcagatggtagtgagggctgtgcagagcaggggaggggagtgggaggcggggtgcagcatggcggtacagctttaaatctggtggtcagtgacatttgtcaaagactcaggagctgaggaagtgacccacacagagatctggaggaagagggctccaggcagagggaatggcagagtgctggagtggccatgcctggggaactccttctggaaagtctgtcgtgaaccagagcagataaatgcttgtgctggggggaggggtgtcgtgaaaagggaaacaccaggagttgtggcattgggagtttcttcgcttgactttcaattccaccaaacaattcctagacagaagagcctccaggggtttattcgtgcaaggctaccctctgtcaccctgtttgtccttgcttcttatacacacacagaacagatgcacccactggggtcaccccaacccagcccccagcagttgcccataactggccgcaggatcccacacacctgctgacttccagagtcaccaaggggttaaaaggggctgggaacagcctcttagtctccagagcctcccgcaggaatgatttgtgaccctcttaggctgctggtctgcaccttctgaaaagcctttaatatcaccgggcacattcataaattattcttttttaaaaatgaaatgttttagccaaacagcagtagaggcatgttgtgcaaaattagcaaaaaaaaaaaaaaaggaatgacgatgatatgaatcttttggcggcctctcctaaccgtctttaaatctgcgaaaggatctcagtgcccgccattacctggccagcaccgggaggatgtcaggtgcttccaggcggactctgctaggaacattccatctgtggccaaggctatcacagtcctcaaattaacagcaaaccccgcgtggcccttgtggtgtgccaggcactcttctgggcatatatatgtattttttatatataaaaatattttttatatatataaaaaatatataaaaatatttttatatatataaaaaatatgtaaaaatatattttttatatataacttgctcctcatagcaaccctgtagatcattattcccattttccagatgaggaaactgaggcacacaggagcttccaggctcaggtgacatgaattaagaatgcacacatcatgctgggactctgtggggttcctgctgtcatgactttccccagcgaccttggggagggcagagttctactctttgaggcttgacccggtcctgaaatctcagttgtcacttctgcatcctgacaacatggagcacggtccatagcgtaggtgtatcgtaaatgttcagtccatggcagcgcagacagtcatctgcagattcgcgagcctctgggatgatggcctggaaaagggacattgaggacgtggccttgctccagcctgggggggctctgtgccatggccctgcagcagggggcccctttctgccctgaattggctcattcatggcgcctctcaggagtaaaggagaagaaagtgatggttctccaccaacttcacctgtcccctcctgctgaactccagcagcggctcccatggctccaggagagagaaggggcatgactggcctgccctctcatcagcctctcccctagccctccctcctttactctcatctgctcaggaaaactgagagcaccaagctgcctcatgtctccaccctccccgcagagcaccctccccgcagagcaccctcccatcgcccttttcttgttgggcacctcgttcttcaaagtcagttcaaggttaacccgttggggaagcttccatgacaccagttcccggtttggggtgtgtatttctccgaagctctcccaaaggagatttgcttacctttatcagcctctgctgccccaatcccctgtgcctgctctcccagtggctgagagccccatgaagagccagaccagggccaggtgatgttggtaaccccagcacccagcactgcagccacccacagcaagtgctctgtgcttgtcagatagagaagagagggctctgctctgacctgcaggcctggggctcaggaccccctctctgcactcaagggctgcccgccaggccagcctctcttcccccccatccctccagaccttcattgcatctgtagaaagaggcagagtagccttcactccggaaggcagagggcaggacttggcccctctggtgtgcccacgtctttgagtgaagttggcaagacttgaactcgtcctgcccttcgtggccccctcaccttgggggattgcaaggggttcagtgtggctggggcagtgtgctgagagctgggctggacggggccgtgggcctcagcaagatgcgtctcacctgctgtgagcccgggtgggggtagggtgagaagagccccctgcagagccacagtgggcccccacggttggatttacctcctggctctgagcacagtgggaagaggcatgggaggggtgaaaaggaaggtggtacatgtgttcaggtagatgcgacgaggccggaactgaggccaggtggggttgtggggagagaagggaggagagtctggagacctttaggaatagaatccattggcctcagtgatggtttaacctgagggatgggagtaaggggcctatcgagggcgactccaagttcctggcttgggggtacctgcctggagagtgaggggtaggggaggaagggaagtgggtttaagggaggagggtaggtcagtgtttggcgtgcttggatttgaattgtccatctgggaggggcgtctggagaaattggagtggactccgagtttgggtcgggggcccaggaggaccccacccagcaggtaggtgggtggaggctgaggtcggctcaggagacacacggagggaggggacatgatttcttatccctctagtctcagtcacaagttcacttctcctaaaaggaggtgcctcagacagcagatccttccagaactctcccagaccttgtcttcctttggcaaggccacagagcttggtggaaggggcagtggcccagggtctgggctccagttctggtttactgcttgctggccgtgtgattgtcagcaactcacgtaaccacacagagccaaattttctccccggtgagcccccactgcctgcgtttgcgatgagaggagagacagtcgatgtgagtgagctctgtgatgacgaagcactgcagaaatgttagttcccacgccacaggtgaaggctgaagggctttagtccaaagctgacatttcccttcatatttttccccaaggggaaaggtgcaccctgaaacgaagagctgtctctttcgttcagctaccttcagctgtcccctccaaactgtctgatttagctcacgggagacctgcggaaggagcacatttataaccatcaagaaatacggatgatgagttttgctgagacatgttgactgacacttagtattttaaatatgcagcccagacacctgtcccccttgcttcccggcttttatggcgtttctcagccaagcagagaagaccaggtttcgggagctcagtcccttcaactgcaccaccagcttctgatgcgattctctctaattgctttctgctgtttttgccgtgtgtttatgactcagctaagggcagtacagtcgggaagtgtcctgcgcgccattttgcagacaggagggaggaagtgtcctgcgcgccattttgcagacaggaggaaggaagtgtcctgcacgccattttgcagacaggagggaggaagtgtcctgcgcgccattttgcagacaggagggaggaagtgtcctgcgcgccattttgcagacaggagggaggaagtgtcctgcgcgccattttgcagacaggagggaggaagtgtcctgcgcgccattttgcagacaggaggaaggagatgtagtgggatgggaagatctgggctctgaggtcagtccccgctggacggaaacctgcggccctgttagctccgtgatctggaaggtgctactagtagcgcctcatttttctccccaggagaaggagggcgaccgtgtctcatccctaactgcgatgggggctgaatgcggctgtgggcacatagggtctctctgtctccacccatgtctcctgctgtgtggcctctttccagcccatccacactctagttggtggctttgtgagtgctgacaatacttccatgtgcttttttgttttttcttttttgagacagagtctcgctcagtcacccaggctggagtgtggtggcgtgatctcggctcactgcaacctctgcctcccatgttcaggtgattctccctgcctcagcctcccgagtagctgggattataggcgcctgccaccatgcccagctaatttttgtatttttagtagagacagggtttcgacatgttggccaggctggtctcgaactcctgacctcagatgatccacccaccttggcctcccaaagtgctgggatgacaggcgtgagtcaccacgcccggccgcacatattctcaacgtttcctctttgccattggtctgtgctgctcgtcctcgcctgcaggaactgtggagcctcttggggtgaatttactgaggcctggtgatggtttgcttcttcccagttgcctgcggtgcttgtgatgggcaagcctgtttgggtctcctctgagctcctggcctctctgtttcagcaccttgtccacacagccctacacttcccttcctttctgctcatggctggccccacatggtggccacagttaatttccactggtatgagatattgtgcagtctcttgattcatcatctggtttgctaaaatgctctttgacagccctgcacactccattacacgttgtcagctagaatcacaagcctcacgttggaggctgcactttagaagggaagatgacgtgcccaaggtcacacagctggtcgatgcagagccacctaggaactcgaggctgtaactctaggtctctttataaaccagtgtctagagtcagagacatgagactcaggcagagagaccccccccaccccccgccactgactttcatcatttgaaacaatggagagacaatcaagtgcaacatcaaatagcaggagctgaaagatggcttcgagatggggccgagaatgtggaccacagagcccaagaggcagcgaaggtctccccactgcacccgagcacttcgtgttcaggatcctggatccccagcacatcagctgcaacttacagagcagagccaagacatgaaagtgaagcgcccgaggggacctacatttttcaacagggagaaaaaaagtgcttaattatatctttaagaggcacagacacgccaagggataccagcagcgtctgagacctgaagcagaaatgccagggatgaggatttggaagattaacacaattgaactcagcactgtggccttttttttctttctggggcttcggaaaggtaggaggcaaacaccctggcaggtaagacagacaagccaggtgtgatggaaatgcacctctttgtcctgccttttactgctggggtggtccttccaaatgaaactgctctcacccggagccttcagtggctcccctttccttcaggacaaagtgttgtcttcgttcctagattgtgaggcttcagggactgattttccttcttccttctctccttccttcactctcttttcttcttcttctgccttcatcttacgacgtgttcatggcagaaggcctgccatgggcctgccagggcctgggttggggatggtggggcagaaatgagctgacactgtccctgaacaaggaggccgactgtgagcgtcccctgcaatgagcaggtgcagtgttgcagtggaaagagaccaggtgccaggtgacatagggggtccagggaagacttctgtgaagacttctatgaagcattccagctggtcccagtgtctggcacatgagacatggcaaatcagagtctgtaggatcaagtggatggatggaaccaggcccctggtggcagctctcatgtttgcgatgctgcatgtgggcagcgagtgttccttgctacttcttcctccttcccttgcctccctgtgttagagaagttggtggtggttctgaaagaacagtggtgtagaattcgtgatggggaggcagccaggaaatgacccagcttcttggttctctgagactgacgaagtgaggtcctggggcagtccccaccagatgaggcacgtggctcagcctcatctgcctgcctctccccaagattgacaccgttcccagaaccggcctgaaacttcatatttttgggctttgcacttgtccttcctgcttccttggctcatatttattcctcaaaacccaatttaaagcttcctgtttaaagctcctctgtgcagagtagcctctaatggatgggtgggtggattcatgggtgggtagcatctaatggatgggtgggtggatccatgggtgggtgtgtgggtggatggacagatgggttgattggtgggtgaatggatggatggttggatccatgggtaggtgagtggatggattggtggatagatggatggatggatggatggatggatggatggatagatggatgggtgagtggatagatggatggatggatgagcagatggttgggttgatgggtgggtgaatggatggatggttggatccatgggtaggtgagttgatggattgctgagtgggtgggtggatggatggatggacggatggatggatagatggattggtgagtggatggttgggttgatggatggttatgaagctatgaagaaaagtggtatcagaatcttgattctgcaggcatttatttggcatctattatgtgccaggaactgaggaccagctgaactgttaaggtcctctttcatgaagtcctccctagccactggcctgggttcagtcgaggtgagggcaaggaggtggaagtcatgcttgaactagcctggagatggaggaaacctgttccccaaaccagagcccaggaaaatgtggctaggctggaggagtgtgggcaggtccgctgacagggcatggcctgggaaagggggtcctgggttgagtggggttgtgcacagactgggagatgcagtgtggacttcaggtcagaggggagggatagagaagcggatttggaaggtcaggaaggggtgcacattccttgagcgcctgctgtgtgcagccgtacagtctgttgttcaaccctcgcagcatccctacttgttctaccttaataacttttcttgttaaatgcaaagaacctgagaaaatccaggccccgaatctgaccatcagtgattcagcctagcgcctcccttccccttcacagcacccttttccctagtgtggtccttcctttctagttgctcgtctcaccacgcagctgtttacaatcagcttggagctctggtcttcagccattgtagagaccaaacctcgtgaagtactctggtgcaatgtatttagggacaatcattttctatatgttcagggctttcctctctcataaatcagtccaagagaaatacttaacacctgctgtatgtttctaagaattcagccacgctttggctgggagtcagatcactttaaatattagaatgctttttgatagccagtggtcatttctcagtggaaagaaaaaggatgacatcgagtttgatttgtttctgattttgaaggttgctggggttttttttgttttatttttggttttgttttttgagacagagtcttgctctgtcgcccaggctagagtgcaatggcgcgatctcagctcactacaacctccgcctcctggattcaagtgattctcctgcctcagcctcctgagtagctgggactgcaggcgtgtcccaccacgctcggctaattttttgtatttttagtagagacggggtttcaccgtgttagccaggatggtcttgatctcctgaccttgtgatccgcccgcctcggcctcccaaagtgccgggatcacaggcgtgagccactacgcccggccaaaggttgctgtttttaatccctgttcatagaagaggaaattgagactcaggaaggtcaaataatccatctgggggtcctaccacggagccaggtcagttcgtatcctgcaggtctcaaagggcctacttagaacgtctgtggcaggtccctgtcccacatggagctcactgcatgagcactttcttctttctttctctgtccccagactgacccctgaggacagaccttcagtttctctacattcttatttagccagtgccaggcacacgtagcatgcgcagaccctctgtgcattggaactgttgataatattaatggtcccacatgcaccaggagtgtgtatttaaatatagacatttaagataaatatataaatatatcaacataagaatatgataattatatatacatatatcaacataagaatatgattactatatacatatatcaacataataatataattatatacatatatcaacataatataattatgtacatatagcaacataatatgataattatatatttatcatgtttatattttatatataaattttagagtaaatgtaaacattttatatgaacaaatatggatatttatatataattatatttacatataaatacacttatgtgtaaatataattatataataattatataaatttatatgtaaatttataaaatacactttaaactatttaaaatacagttatataaatttgacatactttataacatatatttttaatatattgttttatatgtataatagttatatatcatatatgaaactatataatatacagaaatataataataacagaaatagatctctttttttttgggacaggatcttgctctgtcacccaggctagaatgcagtggcacaatcttggctcattgcaaccttgaccttcccgggctcaaacaattctgccacctcagcctcctgagtagctgggactataagcacacaccaccatgcctggctaatttttgtattttttgtagagacagggttttgccacgttgcccacgctggtctcgaactcatgggcttgtgatctgcccgcctaagcctcccaaagtgctgggattacaagcgtgagccactgcacccagctgaaacaaagacatatctgactgttgcttgtggaggtgcctgccattcctccctacagtgattcacaggctcacccagcctctccttctccttcaagccccaaacctctgaatgccaggaagggtggtaagaagtgtctctgcgcctagtaccagtaaagttggcaggtcactgtggctagcgggggcaccattgttggcctcgggcctggggagagaaaaatatgacatacagggggcccacgggggtacgttaggttcagccctgtaagcccacactgaccctggtgggcagacccagcccagggaggggcaggcaggagtgaccccgtcatcaggttctgctggcgagcccagggtggtgacaggcgcacgtcttttgccgggagctgaagacgttcatgggctttcaagcaggacaaagcttcaatgtcatcaccaggtagcaggcagagcaagggtgctgacagcctgcagaagcctgtgcttatctctccatcggagctaaagcccatgtttgcttagggaacagcctgaaattccaccccagctgctgggcctttcacttttgaaacataagcccagagagcgaaaggggggaacgttgtgcccagattctctttctgagcgtgaacttgatgttcctgaccaggaaccagccactcgtaccgaaggccttcctgacccctcagttctcccctgagcctttgctgtgtcctgggcaccaagaggtggagataggctgtcaccgtgcacgtttcctaagcctgcagaggaactgttcacagaatccagcctggaatcagccgtttgtggcaaacagtcagtagctatttctcaacttgtggttgtgaagctgcaggctccatattcgctcttcacagagcatccaagcaggtgtctcagtgccagctcacaccgttcacactgctcacaccagctctggagagctgcttgtacacatctctccacaagtccactttcagtgttgccacgtggtaccggaaatttgccatagaaattggccgatggtacgaccagagagccacctgttagatagttaccccacatccccaccctcaacaccaccttagacaaatcctactgtcagaacatgtggaacggagaagggaccttggcggttcattcataaatgtcagcacccataggtctgtgcctgtttggccgcagacactggggagcagcctgtagccttggcttgtgcagcttcctctgcaggaggggtgcctcttccaagaaacctgtcctgactccccagccctccccacctccattctcgcccccgctggacaatgcacaccctccatcagagcgtggtgcatacctttcatcctagatctcccaccagctttgaaaccagcatcctgttcatgatgtctggaaccctgggaactgtcccagcacctgtttagcacatgtgtgcatgcgaaggggatctgctgagtgctctgctctggtgggaaggccgctctgcacagctggagctgatgccttggcagatgctgggcatctgaatcgtgcagtgcaggagcacaggggcatggcaccgtttgttgctggggaacctaggcctcaaaagggcctcagcctctccgcagtgcagtgaggactgtcccatactctcactgcgtacagagtatgggagagtctctgtgaggctttgggtgccctgcagagggaaggcagtgccagctgggcctggtcgggggccatggagatggcgggcccaggctggggaggacttgtggcacccactcccttacccgctaacccggatcccctggaatctgcagaatgcctggggttgctcctcttctaccctgccgtggctgagctttgtctgtgccctgtcctctggccacggtctttgcctgatccctaccctggtacaggcagagctccctgcaacccccagctgtttccccagaactgacaccagtctccctgcaccacccatcctccttttgactgccctggggacgccactgctgctctgatcctctgtcactccagccacctcttgcttccctgttatcacaaacactgaacagtgagctcaggtgtcagcctccacagaggcatgcacagcaaggggtccggaggcatgccccatggagaactgggggtgctctgcttgcaggaggatccagggcccattgcagtcctcagatgttctgggggagaggatacgcctgcttcatttcttctcaggggtcagaactgggcacagggggttggaaggagggagaaagatgtctatcaggtacccactgcatgccaggccctcttctaggctcccttaaaacctttcaggtaggccagtcacggtcgctcatgcctgtaatcccagcactttgggaggccaaagcgggtggatcacctgaggtcaggagtttgagactagcctgatcaacatggagaaaccccgtctctactaaaaatataaaatgagccaggcatggtggcacatgcctgtaatcccagctactcgggaggctgaggcaggagaatggcttgaacccgggaggtggacgttgcaatgagccgagatcacgccattgcactccagcctgggcaacaagagtgaaactccgtcgcaaaaacaaaagacaaacaaaaaacacctgtcaggtaaatggtggtagagcagaaaacctgggctcagaagctggcattgatcccagagccatccagtttcaaagcccacacccacaactttcctccaggttgggcagtgcatgatggaaaggctgtcccagcaagtagtgagttcactttcaccagtccctggaggcaggagcagagcctgagctgaccacttggaaggagatgttattcaggggactcgagcatctggcgtaggatgggactccatgaggtctatgcctccttctagctctgaaactcctcaagggaaaccatttcccagatctctacgttgctgcagtcccttctaacttccagcacaccttctgctctctccgcaggtgtcgtgcgccaggtgcggcccatcgtgggcccatttcatgccgtcctgaagctggagatgaactatgtggtcgggggcgtggtctcccaccgaaatgttgtcaacgtccacatcttcgtctctgagtactggttctgagggctggtctgccgcacagccgcaggtgcacctccaggccaaatcattgctgccagtgactgtggtctgtacttgtttataccctcagacttttttaatgttaggtatttgtagcattaggccaacatgtattaagctgagccagatgaataagtccatctgatgtattttcggtgtttaaaaaatgagcccagttgctcaactgtttggttgaaaaccttgctcattttttaatgcgaaggctaagtgtcaccccctttctctgcctctggctgggccttgctaagggccaaggaaagaaagacattttttagggggcagccagtccaaatgccaaaagaagaccagttcttgccctgattgtatgaaatttgacattttggcactttttttttttttttggccaatcagattttctatgttctaaggacatggctgctgtagaatagcacagacgtggatgataaattatccccagaagcagcatgacagaatgcctcggggagcacttggaagggaaattgcagttctgttgaaatagaggaaaatcccttggtaaagacacagcctgttaggctcgtgtgggcctccagtatgttcaccaggggaatggctgggatttctcggcactctgcatcatccatcttttcttataggtgggaaaataaacaactttgtgatcctcctga

SEQ ID NO: 46 - DNA, 58173 bp, Homo sapiens
agatgctgtgttcccctcctcagagaagaagaaaacgcactagagagtgggagcatccccaaggctgaagcgcatccaggacatcacatgtcaacgtgtcctctctggcgtggggtccccgcgagtctgggaaacgaggagctggcaagggagggcaagcgggggcggcaaagagggcccctggagcagggggcgcggacctcgctgcgctgcgcgctctaccgccgggctcgcaacgctgggctcagcgctcgcgcctccctcagctctctcctccgccccccttcgccctccccctttccctccctttctcctcctcctcctgccgccgcggccgctgccggacttcgccagatcagacccacggggctgccctcccctgcgcactcccctcgctgcccgggcccggagcgcagcgcggccgcacaggtaggagcccccaacggggggtcgccccgagcgagcccagtactcactgggccgcgcgcgggagagtgaggtggggtgagctgaggggtgttgagtacccgagaactgccctggactgtgcagggtgtctcgggcagagagggaggtggaggtgtgcagcctcggaatgcgatctgtcagcaagtgcgagtactcgggtgacatctgttgggatgggcatgtgtgtgcgcgccgacaaccagccggcagggctttgcccataaacgtggttttgaaagtttaggggaccagtgtgcgagatttaagccgcacctggattccataggagctggttagaagctgggacgctgagcagctccaggggaccgccgcgttagcttgctgttaagaaaggggacctcatctccctgccgggccaggccgcccgcccgaaactggtaccttgggctgcggtgcgatccctggttccggtcctaggcagcctgaaaccgaaggtagcgtgtcggggacccagactgataagacaaaagagaatcagtcgctttgggctgcccctccacacaacctgggacttttaaacaaagctgtgcgcagagaaaggcgtggaaatgccactttgagagtttgtgctgggggatgtgagaagctctgagacatgtgagaaggtctagtattctactagaactggaagattgctctccgagttttgttttgttattttgtttaaaaaataaaaagcttgaggccaaggcaattcatattggctcacaggtatttttgctgtgctgtgcaaggaactctgctagctcaaggtgagtatactgggaaagccttaacgttctagagaacagagttttgcagccccacctccatcccccggggtgtgggactggggggcaggaaatgcaccgtcccctttgaaatggattactgttttttcctttcgaccccctctttctgcagcctgctttgtaggtgcagtataaaatgcacgctgaatgtcttttgtatgtaaacagcgtagcaggatggagtaacgtgaaatgcaattctacagcagtttttacgtctttgctgcctcgttcgttggctaccgagaaggttcaggagggggaggggagatgagaaagcagattggaagttgagtatggtggagcctcagcctctcccaccctcctttcctcgcttgtgctcactgctaaagttttgttactttccccgcagcagatactaaacattagtttgtcctgtattttctttgagattcacaatgttgaaagcccttttcctaactatgctgactctggcgctggtcaagtcacaggacaccgaagaaaccatcacgtacacggtaaggggtgatggaatttgaaataagtacggttcagcgggattctgtgacaaaaaaagactttacacacccctgccagtgtatttgggctatactctgctgagggtgataaattaaacaacacttcattcatgcttcatatctaagattcgttgtaaattgcccccttgatcctttcaaaagttcattgggctcaccacctaagataggaaccaacatgtaatcatttgtgcagggctaaaaatgggatccgttcaaaaactaaaaccaaagaaagttacatgtttccaaaacattcaacaaattaatgggtgtaaggaactggaaaacctggactcctaccacatgcagataaaaccaatacgtgcagaataagactcaagtcaagtaagaacgttaaacaccataaagacacatggccttctttgtgtacatgacatgcattctcaagtaagtggcctttattgaatttataaaggctatatattcattctttttgtataacttgataattctaataaataaaggcagacaacagtttatgtgttaccaggatgcatattggctaaagtggttttaaaacgtaatgtgtgcaactccgttttgcattttctaattagcgtctctgatatttccaagtaatatttgattagttagttgcataggtgtaaccaatgtttaataaaatattaaaaagatcacctgacccctcccactgctacaaatagttgtggtgagaacagagaaggacagtactgacttcacttctggtgagtttgtttgcacctctgttctgtgttttcttgtctttaatcagtgttaggcaaatgacatttgtcctggattggaatatgaaaagcacatttttctactgctcccagtttaaaattaagtaatcctactcgaaagaatgtgaaaaatttttgaaaagaaaactcttaaaaatgaactaatgtcaattactgataataaacattatctcactttttggtaccacattatccctagaatgttagtattcatctggcaaatgttcctttctgttgttcagatccactataaataaaatagcttaatacaaatattttgttaacttcatgttaaatgcagttgcttcctctgctgaagataaattaagcaagaaaaatgaaggcatgtgctgtttatcttaaaatgaaaatgttttgttattcagactaaacttactgccttctcagggagctaaaattaaattcactacccacttttataatcatctcataaaagattttacttcttttccagttgcttatcttctatgcccttccctttgctaatcacctaaatcttcctcatttttaccagagaaggttccctgtggcttaaacatgatagttttaagaccactaactagggttcattattattgtaacaaattttccagatatgttacccttttgtgctaagattgggcctattctcctttaaattttgtatgcctaataattcatggttaaaggacaagataataactatttctgagtatcccgctgtggagacacgatctcctttgatccttgcggcaatgtgtaaggtaagtggcatcatcttccttccactaatggtagaactgaagatcagagagagtgtctaacttgcttagggctacatagccaagtggtgaagctaaactcagtctaggcttacttaatagtacactgacattaaatgtctagaagtaaatacctaaaacaaattgcaagtcttctctatttaccatacaaattattcaagtgaactgccatttttgcctggcttgaaagatacttttcagaagaatgggctcgtatccacataatagcctcatagtcctcttccatattaaagatggtgtccattcagctgtttactcaacaactatctgcataagcaattctcatcactattaaaagaatttgtttgtttactaagaaaattcagtctcctcttggagaatttagcctgggaagacagtgttgaaaactacaaagttcctaagcaaggacaaatgatactattatacagattatacaaattgccaaggaaatagaaaagcaaggaggtgattaatgttggtgccagcatattagaggagacagaactctgtgctggttcttgaaggaagtgatgaccttggttggattgatctagaaaggctgaagaggcacctgagtcagagagtggcataatcaaaagctagagctgaaagcacctgagaccaatccaggtggtgataaggtcagatcagctggaactgggtagtgggaagaacccagagatggtgatgatgagagatctgcaggtcactgtgaggtctcagagagaggagcaacataaccaagagcacaagaaagatcatggggtctgtatgcagcatgtagagatgcggggccttgcctactcatgggccagcaaaagcctttcttagtagacatggtagaaatggacacaaagtcagcagagatggaaggaaaataagtggagcattcagcactgatgttaaagttggaatcctgggtttcgaaaaaggtagtggtacctttaacactgtttgggaaacaagaaaaaaattagtctgagagacaaagtgaatttagttctcgctccagtaagtttcagacatcagtaaaatatctaaatggatctctgggcttccattcagctatttccttgtcaagcatccattgtgtacataagcagctctcagttatattaaaagaatttaagtttatttgtttgtttactccacttttgctcaatccttccttgggcttcttccttacagtgactttctcaaatgagcgtctgatcagattgtttcctgagcttaaaaattcttcagaggcctcttatcgcctgtagcaacatttctcaagaagtagttcctagacaacctgtatgggaatcgcctgggatacttgctaagaatttagattccaggccccctacccagacctacagaatcaaatcctttgggtgggcccaggaatcttcattttaacaagaaccctgaatgatccttagacacaataaagcttgagattcactgaccttcagggtagaattcaggcttccattcctaaagaaaggctttcttgttttggccctgcctacctctgtaacctcatcctccacctacccagaactccttgcagctccttcccttttcaaaaattttatgcctttgtcacaatagcctctcttcctagaattcccacattcacctggaaaaatcctgctcatcctgtaaagcctgatttactgtcacctcctctgtcaagtcttcccttctgccctgccatgctcacccatgcccccgggcagagtccattactccttcctgcatacacttgtagaaggcacctgccatcttgctgcaacttgtctacctatctgtctcctcttctggtctttgagctgcttgaggacagggacaaagtctgcatcatctttgcatccccaggccctaaaactgcctggtttcagaaggtgatccataggctgtttgttcagtgggtgaactagagaggagattgaagctgggaactgctaggaggaacacctctgttccttaggagctgaagctagggagcaggtcagggtgtgagatggaggtgcttgaatgctgtaagaggatttagagagagagagaagagtccagggctggttgggggtgggggcgggggagagggcgaggaaagagagagaatttggtcttttttttttttaacatttccaatgtgggaaaaaaggcaaattaataaagagcagtcagagaagttggagaagattagtctcaaaacagaaaagaagatggtactgggcaactgtaccaaaaagaacagaagagtttaggcagctgatggttgagaatggacccccgaagctgtccaatgcacagacttgtcttttgaaaaaaaagcgatagaatgttaaaccacccatctcatcatatatctaggactttagcacaaggattgttgccataagaatgaagcttttagagtgatttcttagggaatggacacaccaattaactgtctcctggccccacctttgatgttttcttcacagcaatgcactgacggatatgagtgggatcctgtgagacagcaatgcaaaggtgagccagcttcaaagacttccatgtgatcattgccttctgtctccatctcttgtgtcactcttcctgtcctgtctgtgttataccaaaaaggcatgagcattatatttacatgtttgatttttccctcttagaagattcctgacttattttattactgaccacagatattgatgaatgtgacattgtcccagacgcttgtaaaggtggaatgaagtgtgtcaaccactatggaggatacctctgccttccgaaaacagcccagattattgtcaataatgaacagcctcagcaggaaacacaaccagcagaaggaacctcaggggcaaccaccggggttgtagctgccagcagcatggcaaccagtggagtgttgcccgggggtggttttgtggccagtgctgctgcagtcgcaggccctgaaatgcagactggccgaaataactttgtcatccggcggaacccagctgaccctcagcgcattccctccaacccttcccaccgtatccagtgtgcagcaggctacgagcaaagtgaacacaacgtgtgccaaggtaggaataacttattttcctaaccattgaaagcttttgcccaagtgcacctcgtggtgaggatgatgataatttattaaggacttctcgcgtgccagacatcatgctaagtgctttgtctgcattatatttaatcatcacaatattcctaaagggtagttgctgtagttgtcatcattgctttacaaatgggaaactgtggcttagaaagttcatcagtggttcccaaccctagctgcccatatttagagtcacttgggaacctttaaaacttctcgatggcgaagctacaccccagcccagttaaatcacagtctctgaggtgggttccaggcatcggcttttttttcagttcctcatgtgcggccaagtttgagaaccagaggtcacacaggtgctaagtgcagagctgaccttccaacccaggaaggcgggtgccaaagtcacagctggcaaaagtcaccatcaggttattcactgggaatttgaaattatgctgtcaagctactctacagatgtacccctttggtttctcaagtttcttttcatcgaacttgccacagacttattttcctcattcaggagtaaagaaatggggctcctgcttctcattaccttggagggattctcccccactcacgtttatatctcttttaagctctcatttgacgacgtttcacttatatcacttgcaccatggcatcatctgcctagggttttctgtttattttcacagagcatacacatcactgtgtattctagaaacagctgtaggctcgtattagcaaagtgataagaatctggggctttgaagacatgtaggatattagctaactgaactgtgctatgagattgtttccctttcttcttggcaaaccatttcagagcagcctggtgtggagactgtgttactgaaatggggccataggagcctccagactcctttctccctgccagaggctgattaggtagatcccatagtgcagaactccatgtcaccaccacatacgtgtatggcacacgtgggccaatggaaagggtccaggagttcttactttctaactggtcatgtgtaaggaagagagcaccttcctcccttaacaccaagggtttcaatagagaccactgagctgctacattaaatgaaagatgcattttcttgtgccctgggatgctgccccttattcacccgtgtttagttttatcttctgtgtaaaagatactcgagtttaaatggcttaaaaatgaagcaaggggctgggcacggtggctcacgcctgtaatcccagcactttgggaagatgaggcgggtggatcacctgaggtcgggagttcaagaccagcctggccaacatggcgaaaccccatctctactaaaaatacaaaaattctctatgaatggtggcacatgcctgtagtctcaaatactagagaggctgaagcaggagaattgcttgaacctgggaggtgaaggttgcagtgagccgagatcatgctactgcactccagcctgggcaacagagtgagactctgtctcaaaaaaaaaaaaaaaaaaaatgaaggaaacttgtcatgctctgactcttatttatttcatattttgtttgtaagctttaagtaccccacatcaagacctaacccatgttgtgatggtgtcacttttcagagggtgcatcgtattagcatctgtttcgtgttactgtcatgagtcagaattccagtattgatgatgaatgcttcagcatctgcttgatattctgatattgaatttaaggattatgtcaaggagataaaatgatgaggttattcttatacatgtatttgggttaatactgataaaaaaaatcttgagtttatttaagatagaccaacttttaattgtgttatttagttatataactagactggaaagtttggtagtatttttcccaaaatcaaaaaattttgctgaaaaattcttaagtatcaacttttatatactgaattattttgaatactttagatgtgtactttaatggtacttgggagaaaaaaaaaccagataaatgaatgagtcatttcccaaagtagtttgtagaccgtcattgacatttatggttgaattcaagaacaatgcccagaactaaatgaagaggtcctagaataaaatatattcaagacttacaacatgtattggttacggtagaaactgtactgtgattaatgaaaataaaatcctatttaacttttctagaaaatatttagactacctaacaaagtaagttacgtttcacatagtaaaacatttatagttctttcttctttgggaattttttttagttataagcagactattaagtgccttgcttatggaatatgctaaatacatacctgttgactgtgtgcacacaggttatttccaacccaaattgatctgtgtaattcagccagtttctaaaatttgggattggtgtctataccattgaaagcagggttaaaagttttttggaaggcttagggcttaagttggatttcttcccacctcacaattttgcaaagtgcccataaatgtggatttacttaattgttgataaaagggggttatttcatatgataacaacaggataatctgtctagggaatttgactaacataagtcgagtcacacttgtgcccatttcttattgagctaatcaaacatgcagtccagcttcttctaattgcctgcagatgtatgacattctcattccaggccagcagcacaaaataatattttataaccaatgtggaagtatggggacctctgtttagaacaataatgtgctctaaggacctatattattgacatcatcatggagtttgaagagtcttctgttttaataaagatctccactcccttttaaatgttgcatatttatgcccagtaatccagacacatttcctatggtctactggatagaataaatgaatcttacagatgagtcttatttgcataaaaattatttcttttttctatgtatattttttagcaggtatagtttatcattatataacctaaaactcaggacattttaaatgtaagaactgaaatctgtactgtgtttcagtcttcaaatcaattgtgcctttgaatgcactataccagtcacagatggcttctaaataatttaaataataccactagatattttaaatgtacactattttataaatatatcctttaaatagctgtccatttaactgtttaatgaaaacatgatatgtttattccccttcatgtatttttgggggtgttttcagttttgtacaaaaacaaggagtttgaaatacaacataacattcaaagatcaggtcacagtgagcaggtttttttcaggtaattttttgctaaatgaggatcatgctgtgggagccagtaacgctgggagtttcccatgactgacattattcttggcatctataaaatgaagatcatttcagtgttacatacctggggccatgtatagatagagttttcgaaattaattgtttccattagatatcatctgcctcaaagacaacagatactcatctacaccaaaaagaagttgaatgaatggggaatatattataatctgttgatggctcactttagttttctacacctttattgcatagtctctttctcctttttttttgagacagagtctcacgctgtcacccaggctggagtgcagaggtgctatcttggctcactgcaacttccaccttctgggtttaagcaattcttgtgcctcagcctcccgagtagctgtgactacaggcgtgcaccaccacaccctgctaatttttgtatttttagtagagatggggtttcaccatgttggccaggctggtctcgagctcctgacctcagatgatgtgcccacctcagcctcccaaagtgctggtgttacaggcctgagccactgtacctggcaatagtctctatataatctttctaaaggagatggagttagaaatcactagatgaagttgagaaaggattttttaaaatcatatataactttctaagacttccattcctgtattaaaaaaaaaaagtcatttgggaactgacaagaaagagaaagcattgattgccctaattgaagaaacttgtttgtttaattgaactttaaaaaaattaaaacacatggcattttgcatacctggtaattaagccactaataaaccctgtcaggacttacaggcatgactactaacttggtaaagaaactgtgccatcgagaaatgaactcagtacgaatgtccaataaagttgattgtaaaaccaaatcgagtacagtacctggcttatgttgtataaagtatcattgagaaatatgaaaaaaacataccctagggtttccaccatctctgtctaccaggactgtccagtttcaaaaccaaaagctccatgttcctggaaatgcctttgtcccaggcaaataggatggttgagcccctagcatacccacacagccaaatcgcctgcacctcacagacaagagtgaagaagtcctaacgttagagccattttttcaggttgaggcattgcttgtccagtgagactatttttacaatttgttttgtactttcaaaagacaaactgcattgatttttaagtagttggacagagtctttctttgcagttgtcgggatcccatttgccagtgtgccaatgagcaagtttctacattgttttagatgttttatgtgtaggatgcctggacattagaacctgcacacttagttatgtgtcatatgtgtcataccatgggaaagttagcaatcttttcacattcccacctagaaaaaatttcaccacacagccaaattaaatactatgtttcacctataaatttttcagtttgctaaaatttttattttttccaactttcagctatattttcaatcattttattttgtcattattacatgtgatacaggagtgattagaacactaaaaaatacatatttgcctcctgtaaagtctaaaggaacaaattacagtgtacatagggttcaaatttaaaaacctctatagtcttaggcatcatccatttatattctacatatttctttataaacataagggtaactaaactactcttttgaaaaaggaagaagttattatctgtacatctacctttgcaaagaggaacttgaagtaacatatacagcttctcagatgctagggatatctttctttgacttctttcattttaaacttaagtgatcttatatccagaagagaattagaaaatcatagtgtaaccaagtggcttagatacctggcattgtcattaccaaacagctttcaaacactgcccttttgttgattctcattaatgtcattagggtcgctggctgcatgggttagttttgtgaggaaatgcctaatttttcttccatataattatacagcccagtgaagacctgtgatctcagaaaatagatattttgcaaaaggaagactataattgagtaaattatgatgttaaccttaaaaaaaagtactttaagcagtaagaaaaatgggcatttagcctccttacagttcttcattgtttttagttgttaattatctcaagtacctgaaaattctcttaagttatataaatggataagagttgagtttacaggggagaaaattatttttcaaataagccgatgcagtgtatggaagtaattgatttactcctaaaaaaaatctagcattgtttcataatttacttttcaatatgctgcagccattaaatttctagtcaatttatgtcattttcaatacacatttgtgagcagtatttataggtatctgattcatacacagtcagaaagtgttcttaaaattgcttcataaaaattgaatgacaaccgttagaggtggaaggatagaagaggtcagtatgatcactctcctgcagcaggactgtgctacacacctccctaattcagtgggtctcaaagtgtagtccctagaccagatgcatcaagcatcatcaggtaacttattagaaatgcaaatttcccaggtcccaccccagactgactgaatcagaaactctggggccagcaccagcaatctggttctgggattatactgttttaacaatatattatataacatatattgttataataagacaattaaatatattgttataacaatataactacatatagttatataacatataactatatattgttttaacaatcccataatatggacgcctactcaagtctgagaaccaatgccttaacttaatcttaacttctgctatataaatcagagggcagggtcagaatacttcacatgggatatgggaagcagtgaaaagaaaacatcaaaaatatacattctgcctctagggtaagttagtatttctattttacttttctcactcttcttactgtcatcaccaatactccgattcctaaacatgggtggccatgagtcctgattaagactgtatccctgaaccaaggacatgatgtatgcaatctaaaggaaaaaaggacatattaacaagaaaacaggatacacatctctatgaaacctacaaatatgcaatcatataactattcttaaattgtcagtaggtgagactctaatttttattctggctatggcaatgactgatgctaagtgatacctatatcttctatagggctcctccttaagttcatggcacaaacttgtgagatgaggcaatgctgtagcggttcggtttgtgtagaaccacaaaagagaaggagattgactctgactttgactgtaaagtatccttcagtcaccaaagtgatatgagatcctttcaatatcagatgcacagctaaccatctctttccatttagactctgtaaatatcagatatttgaagaatattcacataagcatcttctttcaatttaaactttataagaaatttacttcccatcaaagacgaggagattctttttaagactagttaacacttaatctgtggaatgaatttcctcctccccattgaagcaagaaggagattagagtagaattgcaagcccgggtaacttcaggaaagtgcactggtactggctcattatttatttatccagcaggaagtctcaagctatattccctgaaatcaacaagttgccccttttgtaaggattgcctttgcacgtgttgaattgctggcacaattttattctttgaaaccaaagagtaaacaaaaattttcccaatgtgtttgattttacatgaatgtacaaataagtaattcacaccgcatctgaaattcattagcatgttgctttttccaggaggtaattgcaaatcgcacactcaaaataaaactgatcaagaaaactgcatttcaaatattggcaaaagaaaatgctgtcattgcaaaaatttaaaaagaattgcaggtttgtagtttaaactgaaatgatttgtaaacatttaataaaaatgaagtgaataaatgacatgaaaggaaggctgaatgctgagctgttagcataactacagattaaaagaagaaacagctaatcaatgtatataaatgtgtactaaatagactaaaaagcttgagatttgcactaagtcaaattctaaaagttcaactacctttcaaatgattgtacatctatcccatccagggtaactaggcagtattgcaagtgaaattgatcaaatggaacataaaaccattccattagagttcagtgaattcagtcaaatttgagaaccactttctgctgtagcttaatagagtcaaggtagaaggaaggaatgctcatagtctttagggaatttgtaataattgtcccatgagttatcaaataataaaagaaacaaacaacagttcaataaagtaacatgagacatcactggaagtacataatgaattgccaaaagtagatgtaaaactagtatgtgacacaggtagcaccacaattaactaaaatacatatttggacagaaaaagaaaacgtgttctcagaaatgtggttaaggacaaaagtctgtttcctcgctggaatggggcatttgggagagaatgatgaggggacattgggaaatctgacaaggaaattagcatccaaatatcagaggaaataatcatactgtaactgcacagaacaagtgagaagcattgtatcatgtccacattccatctgtcctagaatgatttcccaggagaggtccccagaaacagtgtgtttctgattggaatgctagcaagataaggtggggaagaaaaccaaatcagaaagaacaattgatgaaccactttgcagagcaaacatctatgactggttccatcctccgtaactccaccaaaatgctaatgaattcatttagctctgtctaaacatattccagaactgcattctgttttacttattattgaataggcaattagtatatgttgtttgtataaatgaatagattttaatcataggagaactcagacttaaaccatccttgaaaataagctaccaagtaccatgtgtatataaggtatatttcccaactataaatgttatacaatattagtgtggtccatcagtaattattaaaagagactgtcctgtcccttttaacatggaggtctcagataccttgtccccgttttaagcttatgctacttgaaagaaggattcataaaacctattctttatatcctggattactaggttttccataaatattagtgactaaacaggttggtgttattcctagaggaagactagtaattgggaacactagaattcttttttattttccaataagccatttaaccagggaatgcatttctgtatcaaatacatcctttttcagaaatctcatggtgaataatgaaaatacactttggttgggaaagtgttaatatttatgatacttgaggtcagataatcataagcctgaaaaatatttttgtttttataattttatttttaattgaaaaatatacatatttatggggtgcaatgtgatgttttgatatatgtatacactatgggatgattaaatcaagctaattaacataaccattacttcacttgtttttttgcagtgtgaatatttaaaatctacttgcttagcagttttgaaatatacaccatattattattaactatagtcactatgctatgcaacagatttcaaaatcttcctgtttaactgaaactttgtaccctttgattaacgtctccccatctccccccattctcaccctcagcctctggtaaccacatttttccctctacttctatgagtttgactttttcagattgtacatttaagtgagatcatgctgtaattgtctttctgtaagggtagaaaacattgatgtgagctctctgatactgcgaagaaactcaaggcttttgatgaacttctgtaaaataagatcaagggagaaggactctgagcagtccatcttaccttggacatttccctggctagaaattatccttctcaaatttgtttttagaatccaagaaagtcacttagttgtgtacaggtgatttaaaagaagagttttctgatcttgtcccaaagtagagaagctcgggggagctagataagtgagaagaaaaagtcatagctctcaggaacccaggaagaaagaacagagcttactgagagcccattgagaactgttaactagctgagacttgaactgtaggtgaaataagagtgacgtagggaagggaatccaagacagccataaaaactgcatgtgcttttatgtgtgcctagttaaaatgagaatcatgacaggagctggaactgcatgtagttaaatcgttgtggggaaggtggtgaaataagttttcactctaaacagccttgtgtgttgcaaggaatccaatcctactcccttgagtgaagccacagaacacaatccaaagtgggaaacaactcatggggtccaactcactgcccaccttgcagaccaagtctgtcacaacccgggttagggaagaatttttattcaatgatgatgttagatttcccttgtgaaatattttgcagcaaagccctcctcttgtacatacattcacaccagcatgccattaaattaacatttttactattttctgaaaacttatatatcccaatattttctaatataccagaatgacaaagggcagtgtaagtctgtttttcagagtttgctgtttaatcctcagaatcgtatttttacaatttgtaaatgtgtgatatcaaaagattccacttctaaaaaagaaaagtatatcccaagagaaataactaaaagacactttagaaacctgcctacgtaggctaaataccccttttcttgcctagtttattctaactatttatgcccacacatgtgcacacatacagatacctattcaagtacatgcctatacacatgcatatgtacaaacatgtgcacacattattttcagtaggaaggtaccatgtaccaaaatgaaactgatcatagttgatgatgcttctgaaatgactgaatgcagagagaggtttcctctcattattcctgtaacattaacactggaaactgctttctgaatacatgtgtttacctatcacaagagaacaggacaccctggacagttaactacactttttgctgaacaaagaattgtgttagatggattaaatagaaagtgttgacaaaaaagaagtgaaggtgctgaggtataacctctgaggctttgtcatcatatacttctgcagcaagatgatcatttcattactaatctttctcagagatttgcctggatttcatcctgacccactattttatattgaacaacttaatttttggcaaaattgacatttttgatgaactatcgtttaaggtggattcaaaaatgacttatctgggactgaactgaatctccaagctttttcattcttcagactttggtaaattatatagtcaggaagtagtctgaaatagaactccactcaacaagcaaggcagaaaattccagtcattcattatgaattaaactttgcagtaaaagctgtgggcaccttttgttaaaacagttcatgtcctggaatatcagaagaatcttaatccagggagggagccagaaaaaaaagtcctcccatacaagctggtaaagatgaagggttttggctgggcatggtgactcaagcttgtaatcccagcactttgggaggccgaggcaggcagatcacttgaggtcaggagttcgagactagcctggccaacatggtgaaaccccgtccctactaaaaatacaaaaattagctgggcgtgatggcacatgcctgtaatcccagctacttgggaggctgaggcaggagaattgtttgaacctgggaagcagaggttgcagtgagccaagatcacacactgcactctagtctgggtgacagaacgagactccgtctaaaaaaaaaaaaaaaaaaaaagatgcagggctttgttctgaacttcaatcatatgacctccctccttcagtgattgtcgtgggtcagggtggggggtaagctaatggtaaaaagaaactaaatggaagaaggaaatttaattgtcgtgcaatttaagcagataataatagttctgtagaacaggaaagattagtgaacagctcattcaaaaaaatgttaaatagcaaaactattgtaaattagagctcaactctaagtaaactgaaaaatattttcattgatttttcagtttaagcagaaaaatggattgtgtaagcatgccagagcattagtttccagtaaaccaacctatcacagaaggttaatacaccaaatggactattagaatgtcagtctgttagaaaaagagcttatactatctaatttcattgtaaaaacttggctacaaacagtattaggattctaatagagctttaaagaattattggaaaatcaggctgggcgcggtggctcacacctgtaatcccagcactttgggaggctgaggcagacagatcacctgaggtcgggagttccagaccagcctgaccaacacgatgaaaccctgtctctactaaaaatacaaaaattagccaggggtggtggcatgcggctgtagtccccagctactcaggaggctgagacaggagaatcgcttgaagccgggaggtggaggttgcagtgagccgagattgcaccattgtactccagcctgggcaacaagagcgaaactctgtcacacacacacaaaaaagaattattggaaaatctgtttacagtatcaaagtcaggaacaggcagactttacacattaccaaaagtattatgaacttactatgaaattttcttagtaaaatacatagtttctggtttcagattaaaggaaaagtttatagtgacaagagaaaatcaggaagaccttaataaagaagattacactaattatttaaaaatgtgaatggtatttttcattttctccatagcttcaaaaaattgagtaaaagtcctgagaagtggataaaactaactgcaagcaacagacctgtttatttttcagtgtaaatcttgataggctgagaagataggaaaagaagaatcagtgcaggttcaaattcataccaagcctttgcagttggagatcctaagttttgtaattattctaataggtaatatattattgttatgccaaagctgttgctcagcaaaaaaaaaaaaaaaagaaaaagaaaaaaaaaaaagccactatcccttagaagagaagaaataatttctctgtcacagttaggtgaacctctgtatttagtcaaggttctccaggaaaacagacccaataggatacatgcagagaaaaagagggagagagatttactgtgagaatttctcatgtgattatggaagccaagaagtctcatcatctgctgtctacaagctggaaaacaaggaaagccagtggtgtaatttggtctaagtctaaagggctaaaaagggtgtgggagatgggaactgctagtgtaagtcccagagtccaaaaaatctgagaaccaggagtagctccaatgctcctttcttaagggcaggagaagatggatgtcccctctcaagaagagaaaaagaaaattaatccttcctctgactctttgttctatttgggctttcaatggactagattacatccacctgctttggtgagggccatctgctttactcagtcaattcaaatgctgtctattctggaaacaccatcacagacacactcagaaataatattttaacagctatctaggcatcccttagcccagtcaagttgacacataaaattaaccatcacaaactcttaaccacaaagatcacaactgggtaacagcaattgctgaaaattcatgacttggtgttgcttgcctattggtcaatttaaaaaatatatactgcatgctattatcatgaaaaactcaagctattgatggtacttcctggatcttctgcaaatctcaagtttcagtgacactcaccctctagcaccacctaccaccaccacacagcactcaagtatgaaaatcagtcttctaaggaaaaagcaaaaattcagggagtacctgctagggtaggggccaggactatattcaaacatacatttgtggagaaaaagcaaaaacggagcaaacaactgagccatacctttatcttccaggcgctgcttcttaccctgaaagacaggaccccctgtaagagaaatgacaggcagaaaaaaagttgtggaatgtaactgggagggagaaagagagcaagacaagggagttgaggacaatgagcaatcacaagactataccaatcaaaagtagattctcctaaagtatctcataagatattgtaattaccaactgtccactcatatatgtatgtatacatatatatgtatacatgcatatatatttgtataaatgcatatgtccctcaaaagactgatgaaggaaaatagaaaaggtgacacctaataaattggttttgctgtttttataaaattggctaaagaagtctttagatttgggattcaattgtttaatatgttttttagaatctcctgtgtgttatgcattatagattagtgcttctcaaatattaatgaacatatcagttccctggggatcctgttaaaatgaaaattctgattctgggtaggtctgggttaaggcatgacattatacatttctaacaagctccctggttttgttgatgtatgcagaacctgtcttccagtagctgacagtatccttcctaccaagaaactgatatgtctaatggattcttcatcttctactttctgcagcagcaaatggggtataatctggatagagtcaaatttgcatgtggttacttttcaaaaatacatttttctcctttggttagatactgtttctccaatacaaattacattgtaacagctatagctataaatcacagatatttccctctcttactaattaatagaattttctcctgtagtggaatgtttttatgcttgaatgctcaagaggattccagaaagtagtctttggcagcaaagggtggtggaaaccccatgaaactaagcaagagacaaaagttcccatttgggtcttcccctaaatgacttgctgactttattaaatcagtttatcttgctggatagttttctcagctattaaaattaagagttgtcctttcagctcttacttgaaattatttacaaagaacaggaaagagaaagagacagagagaaaatgagtgcactttgtctaggctgtaagccttgtggatgtatggtgatgatatggttcttgattgatatatgcctggcatttaagctgtttccattgatagttcatttttgccttttggatggcatttttatcaggaaaacataccgaggcaagtcaaaatccaccttgggaagaatgcaggtgcattctgtgattataatagaattaatgactcagaagcaaaaaaccagctggttctaatcacctgaatctttattgacaaaacagttcacacctactactagttgtttgctaaaagtctgcaccaaatcactgaagctttaaaagctagatcactgcagtcttttccccaggcactgacatgggtaattacggtattgtggttcatgccacagccccagacttcatttcaatcctagcttggaaaggagttatttttattttggtgcgcaggaaataaactttttgcatatattaatataaccccatgtaaaatgtaaaggtgccagcactaaatgtgaccagccctttgttatgttcttgattcttgaattaaggtttcccatcttcactggagacgagtgcctttcggcaaagaactatctgtttaaagtctgaattagttcatttcaccttttggaatttctttcagcctccaactcaaaccatgcttacaaccaaagccatgagtcttgcctgagtttacgtattattttccatcacatatgaaccataaggaagtctatgtgctagttaatctgttactgcataacaaattactccaatgcttagtgacttaaaacaacaaacatttattacctcaccttttctctgggtcaggaatcaagttgtggcttagctgggtcctctgactttgggtctctgacaaggctgcagctcattcaaagctcgactggaaaagatccactccctagctcaaatactagtggttgctggcaggattgacttcctgcctctgtttctcataaattcttccaccttcaattccttgccacatacacttctccatagagcatctcacaacatggcagctttcttagcaagtgagggggcaagagaaggttccagcaagagagaggatgctaataagaccaaagttaagagtctttagtaacctaatcatagaagtggcaacccatcaattttgccatatactgttcgttggaaacaagcccctggtgtgaatgccaagatgttggcatcattgagagccatgtcagaagctgcctaccacaatctagaattaaaattctccctgagttgactccaaccatttagagttaaacctagaattttaaatgatttcaaaaagcaaaataggaattcagagcaaaatataccccctccccagcagtgcaagaggctgtatgactcatgcagataggcagcctaatgggtgtggtcagtagcacaggcaaagaagaacctggctgtttctagaagctccttttgagtaaacgtagccttttcttcactgacctgagtcttctaaaatgctatcaatcctcctcaaaaacactcataaatgattccatctccttcaattttaaaactagtttaaagtcttttactccactcaacaagtaattttcataaaacaaaaactttaaggacaagcataaaaactctttattgctgattaacatgtactcacatgcttgttacataaaagacatttaataaacactgctcttgctttatgttaccttttgtcctagacattccaatatttgtgtttgttagggaatcatggatatcacattctccatctctctcctagaaatccctgttctgttctgttcacatttttcttcccacagtctattcaaaaacctgctcctagaatcatcacctttatgtttaaatatgtttacatcgtttcttttgccccaaaagtctactagaagacatgcactgaacatatcctaagattacaataaataggttgtttaagagttaaaacttcagaagcaacaaaatctaacatgaattttcttggggtcccaaggaataggtatctcaataagaggcaggatagtggcttatttttcaacaaagcggcactaatgaagtaggatagcactctgaggaaaagaggaaagatatatgactaaaaatcgataaaggtagaaaccaatttaacaataatagcaggacctataatatgagatggtggcatgaagggacagctgccagccacatccagtttccccatgaagaatactctagtagccagattgtcaattaaccagagagaaaaatagagaaaaggctaattcagctattagaaagtataactaaaatccaaagcaaagttttgggtttttttggtaaagaagatagaaatagaccaaacattcttaaattgcttttaaaagtgcataatacagctctgtatggagcacagtacattttctccttagtttactctcccccagattattttccagatttctccaggtgtttctcatgccaataataaaaacctctgtgagccagttgagtgggttgtgggataaatgggtgcctcacagccaggtagaggccaacccggagcatcccgggaaggctggtctagtccacgaagaaggcagtgagagttggtgggggggatcgtgggggcagtcagatctgattccctttacagtgaagcccagaggggaaaaaagcattctgctcataagatttcctcatattcagccatccatttgctaatatattctcttgacataagtagccccactaaattcctctttcctcatcaccaactctaaaatgacagtttaaggattatcctttctgccacttaccacgaaactcagctccaagccagtttgttgtaggtttctgaacttaaccgcatagctcacaactgagtgtctaatcaatcattctatgactgaatccatctggaacaaatttgaagaagtggccatgtaggtttctttaggggaaaaaaaaattaaactgaaaccagagttgattttttcaaaagttcagaagaaaaaaaattataaaacttagcaatgacttcccccccagaaattgttcatgctctctgaataagacttattctgtcctaccccattctgcattgcatttaatccttcagagaggtgacctgtgaatgtgttgcagcagagtccactttcctgataatgagctcatggtcactacttgggtagaagggaagagggatatggtgtggccaggtggtcaccataacctcatgttgctcttaaattcccaaacacacagggctcaactgagagattatgtaaccaaaagagcctgtttctggtcaattcttgctagaccactggtttttgccccatacgcattaaaggataatttaaataatgcagccaggtagatttaagtactagatggtttttagaactccatctttcctttccttgctaggcccaaattgttaatgtaagtttaggatatacttctccatatatacccttaagtctgcaccatccatgcatttgttcaatctttaatgatttattcatcagttcatgcatcaatgcattcaattaacacgtgttcaaactgtactagaagcctaggcacaccacctttcttacaaggacttcctagtctgtctgaagatgtaacataaggtcagacttttaaaaattaaatgatacaaataattcagctcaataattcaagtcaacagaccctagttgagagcctcagtccccacatcatcagtggtaagtggcgattactgaaaaattctggagaagtcagaggaggaattggtgctgccaccaggtagccagttaggacttttctgagagaatggatgtgatgcagttaatgaaggatgaaccagaggggaacaaacctgagaagaacaggacaggctttggtgggtggacaccctaggtgcagcataatggtgacagtattgtccttgtgtatcaaactctcctttcatgtctcttgctagcatagttaccatacgtacagtacttgaaagtaatgcaattcttttttgagaaactcactcccttttccataaatcatactgacgtcagccctcaccaccactgttccccaccccagtcccagtgtcactgtttgggttgaggcaaggcaggtactgtgggtgcagcaggaaacaagatcggaaaattccattggaagacagttgaggtaggacccagaattcttggttaagccatttagatttattactgtcacaattagtgacagattttgagcgaagagtgacataatgaaaaccctatctccagacaggtgtaggatgaggaggaaaaaaatacatttacacatatggttaaatgtgttaaatcatcttaatgggactgaggtggggagcattagtggtaagggcctatgtcagtctgatttatggaaaagggagtgagtttttaaagaaagaattgcattaactttcaagtactgtacataaagtatgctagtaagaggcataaaaagagagtgtgctacgtaaggactattttctggatcataataattagtttaaaattatttataatagataattcattattttgccacagagcagcttctgctgtgtgaaacagtgattctaaacaagtttgactctaagtagggtgaacagtttgtttctaatattattgagcaatatatttattcgtaggtattacaaagataagcatcaattacaaattaacaagatggtgtaatttcaccccccacacttcatgaaataaccaatttggagttaaataggcccttcaatggtctactgaacaatcagcctctctgcctcatgctcacattcattaaactgtaaaatgttcgttaatcgtagtgtatgactgaaggaatatggagcaagtctctaaatataaactatgtctaaacagtctgttaacaacaattactcttattttagcatgtttaaggcagtcaccctgcaaaatacgatgaattcaacctaagcagagtcattgtaacaaggtttttgcaatattggaaattatagcaggaggcaattatccataggcccattctaccccacaacccccctaccatccattctgcaaataagcatgaactaaaaagtaatctggttgtagatagaggaaagcaacaagttttcctgatacatctaggggaaacattttccagttaaaggttatttttatataaaaataagaatttaaaagcggtacagaaagaggtttgggagtaggggtgaggctggactgccgagctaataaaacaagaatttaagaacataagaatagatggtttagtttatggattaatccaaaagaattttaactggatttcgatctcacttcactaagtcttgactttttttcttgggagaccccacagctagtttggaaaggtaaaacacctggtttatccatttattgacctatttaagtttccattctgaaacacttcattaataatagtcatacctgtacttttccttctcaatggtgggggtctgctggagatgatgtgttcattatctggaatttactttttattttctatcagatttaggaagaataagatcggggaaaaattgatattgctttgttagttacagctggggagatagcacaaaaccccagactaggtatcctgtagctggatccctaaacatcatttcaaagtgtgagactattcaacaagcctgaattaagtaactagtaaatgcaaagcatagtgggtgctgagaatacaaagataaaagcttatggggcctaccctcaaagagttctcagtctctgaggaagcagacagtaattacagtgtgacattttaagtcccattttagtgacttcctagagaaggtgacaccaggcctccgtcttggcaagttgtggcatttagactttagagaagtagggaaaggagaaagaatgttccaggcagagggagcagcatttgctaaggtcatgagaagatgggaaaagggaagagcaagttgttctgcataacttcagtgtgcagtacatgaagatagacaagagtcaaatcatgaagggccttgccagtcatgttttaaagtttgggtttcatcctgaaggtggtaaggagtgatgtaatcagcttccatttatacaaaatgaaagatgccctgtatcagtctgaaacttgtgtatgcaaatccacatgaaatgtgccctctttgctcacaaaggaattaaatgcatcatttacttttaaaatttatttctgagttctcatttgttaacctgtctggataattttattgtaactaattacaactggttttattctctatttataatagttctacaggggcaaattaaatatagatttcattcaagaaataacacaggtctgtctgtatgcttaaatttttatcaaacataaggagtagggaaaatattttagctcaaggaaaagctacagaagtcaaactagccttaaaaattgaatcaacaggtaatgcatcgtttcaggccatttctagtttttctccacatagaatataactgcaactcttaaaggatttttactgtttgaggtttgctccattttagagtctgtgctaccacttactggaacactggattgaaaacaaaattgtaattcagcctttgcagaagttgcaaggaaattttacacattcacgttttttgtcacaacatctcctaatcttgtaagacaaagtgttgtaatgatgatataattgtgtaaatactatggaagcgtcaaatgttatttatctgaactgttttgccagtttatagtataaacatgctagaatttatacatccagcctaatggatatctcaattgctaccttcaacaagttgaggctataaaattatataggccactgatacgtgcctggggttatccagctgttagtttcccagtggagaatgccagactttggtggtcagagcaaaactcgtttaggaccctgagccagccagacaaggtgcttcatccttaagggggctttaattaaggatgaggtgaggagcagccattgccccaagtcagtagagtttccagagatagtgagtttgctgcaattctctttcttaaaaaagataatttggccgggcgcggtggttcacgcctgtaatcccggcactttgggaggccaaggcgggcggatcacgaggtcaggagatagagacaatcctggctaacacagtgaaaccccgtctctactaaaaatacaaaaaattagccgggcgaggtggcgggcgcctgtagtcccagctactccggaggctgaggcaggagaatggcgtgaaccccgggggcggagcctgcagtgagccgagatcgcgccactgcactccagcctgggcgacagcgagactccgtctcaaaaaaaaaaaaaaaaagataatttgtggacacagctgtcctaaaggtcacctgaacaagctactttctgtggtgacctggagttgagctggacccccaaggggagtctttactggtaagatagggaatttagagggaggcttacggacaaaggcagacaagtggcaagaatgtgttgcacgtggcagtaggtggccaggctgatgcagagggccatgtaagatggcactgatgagatggagcccaaggaaaagacaattttatgtatggaaccatctgttatgtggcagtgaagattcagaccaatcatacaggaccatctgcattttgttaacacctgtgtgcacagtcacaggcaggtcttggagccctgggagcctggcagcagcccagcatcactagaaaggtgaagatggcagggacagccctgccaatcctgcaaggagtgcactagagagcctcagcactgggccagggaagctgcccaagaagcagtgtccagggcccacagaccaatagaaggcagtcctcacaccatttcagaggtggcagcagtcagagttctcaagttggaagaatggtctcaggggcaaatgcaaaattcagtatttaagtaggaaggggtcagaaatgtaggatgatgattgataggctaggatgacaacagagaaggagtcagcctagccacgtgattcatcaccctattaccataagcatggtgcttttccttgggccttaagttctttcatttttcctatttgttaatactctctcttacaagagtaacaagaaacagtcacgtatgtacatatcatttaccttcagctataatgaaggcatttgaagaaggtcattttgtattcaaagaaactataattaactttccaaaagaatacttttctaatatgccatggttttactatattactagcacaacatttaaaaaaacaaatattggcccaaaattaaactctcctatctgatatgactgaatgaatgtttcattaaatacaagtggtgtagatcaccatgctgcttagtgaagactctgccaacctgcttatttgaaaagtcaggcatacaacattttcatcttaaagtctaactctaagctttgttattaagaacaaatgaccagaaatccttgtcctggctttatatgcatttaactctatgacatttgaaaatattccctgttttttcatagttctgatcgataattttattactgtcttgaaagatggtgaccacaatgtccttaacattctcaaaaaaataaataaataaaagttgctgctgaaatttacatttttcatatctttttcatagctagaacttgttcacacaatagttctctctcagaattacatgtaggttctaattagagctctagttaatgttatgtgtgctaggtagtctttataaatattaatacttcattgccatgaagcgattctgtagccatcaacagtcctttcctctgataggactgattttatggaatcaaatattatgaaatgcagaagatactagatttgttttgttttgacagattttgttttgtttgaatgttttcaattttcctaatgagaaataacttttagcaagaaaggctgtgtttgcctgttcttgtatccattcatctggaatatgccaaaggaggggaaggtcataccatagatgctcctgttgattgggtgttagtcataaagaccatattgaaaacatgacactaagcaacaaaacaaaggtaggatatttaataatgtgaaagtatatagaaaattacattaaaaaccccaacttcctgcagtgttcttgcttccttccatctgtatatagctgaagtaccaccctgatcccactaccaatttaagtcttcacactgttaagtataatttattgagcacttactgtggaccaggtacctccattttgagtgtgtattgttttaattgtcctcacagtatcattttgaactgaacattccccgacttcatagatgtggcagtgagatttggaagagtagaaaagtcaaataactttcccaggacacataactaaaacgtgatgttgcttggatttgaactgagacctatttgactctaaaacctgtgatcttacccacccttctgtctcaagcatatttctgtcagtgagttgtttaagagaaagagttattctgtgattctcagactttctaaaaagatcaacaagtcctcccctgaactcctaattcttggtataataaattatatataaacattaattcttggtataataaggctagtaaaaaaaagctagcataagcaactacagaaagatacaatctcaaataaaataacttagaacttaaaaatactagctgttagagaatagtatgattcctctaattctgaaactcatgaaaagagattcgtaattgaaggtcactgacagggtacccccttacacctatctggcagcctcacagtcatccacattaaccacatatgtgcctgaagccaaaggttttcacttaaaagtttctataaacaaattattacatttctaggggaaaaaataatcctaggctaattttaaaattaacaatctgaattgctcaatttttccattttctttcaaaatgaaaacttggaatatgatagactccgtggatgtgctccatacagtaaccattttaagtatatataacagatctaagaacgtagagtttggtttttttcatccgtttattcatgccaagaaattctctttaagattgacttagtttggcatcaacctttaacacatcaactgcataactggcttgggtctacctgcctttgtactctgcagacacacaaaccatgtatagggcatgtttctccaccagattttctttttcagaatttgcactgccaaacagacattaagctactctaaattcttgacaagtatgtaactttataggaacacagtagtgtatttaaacattgaagagaactttctattcatcccactcttctaacagagccatttaatcctatccagaaagatgagtccattttcagactctcctttgatcctacagattagagggacagagaagtcaccactgaaaattgaaaaaggacgcaagaagaaatggagatccatgaccatggccccaagaaagcaaaagcatgttactcaggtttcccaagatccaagttagagaggggagaagagattagagctagaaaacaaatacttttaaaaacagcattttggaatttatcaaagtaggctttaatgtcagattcataaaaatgaaacagatctcagagaatgtattttctgagaaacttatttctgtccccaatggaaatgtaaagtaaaatgccccagactcattttaaagtccaaagactattttatatgctagctttgagaagcctttagaattgcaacactcacagggtcagaagtttttttgaacagattttcttttgtcccttatggcctttaggcactccttgagctaatattcaggagttatttgaatgctgttgcttcacaacactgaaagtgttttaacatagagggaggaaaatcccacagcctatgtcatcataatttatcaacaaattaagtccaagaatgcatgataatttatggataacttggaggaaatggtaactatggtatcaatttggaacaaaaccaggaagtcagatctcacttgatttaatgttatctgaaggatttgggcacaagtttaacattttgatcacggaataatcttatgccttaacatgatgaagactgagtcttccttcctgaaaaatccttaatacaggacaagaaataatgagtctaaaatttcgtaactgttttcctgctcaaggaagagagaaggaataaataaccacttacaatgaaaccttttcttgctacacttcatcatgaggcaagtatttcagatgttgggagatagattgtaaaggtataaaagttaacttcacagctatacaaagctatacgtatgtgcaccatgtgtcaaatgagagaaagtatagatattcaatgttgttgaatcctcacaattttctatattagagtggatgcagcatctgtttttcaatttttaatcatcaacattgtcaagcttagagaaaagttgactgtacagtacaattaacaaggaacacccaccgttcagattcaaaaattattaaaactctgtcatatttgcatgtagcatgttaacactgtttttaaacacagatgactagtcaaatcccccacctcctgctgggatccacattgaatcgtttgtgtatttccagtgataggaaactcattatctcctaatacatcaaaacaaataataaccacattttctcttacactgagcgaaaatctgcctttcttgcatttctagccatttattctatttctgctttttggaaatacatggtcaagatcttttcctcttcccagggagaagagcagaaaaaataactattgagtactagggttagcacctgactgacaaaataatctgtacaacaacccccagtgacacaaatttacctatataacaaacctgcacatgtacccccaaacctaaaataaaagttaaaataaaaagatcttttcctccttccctaagctccctttcataaccctgaagatgatctcagatatagatctcatctatgttttcttctcttgtaaattgagtacaaagaaaaagataaggatgatatgaggaggtagggtagggctatgggccttcttatgggctggcatttttttccataaattttgatctgtaatattttcattttcattcagtttgagatttctcaaatttcaatttagctatctttaaaccatgggttgttgtgaagtatgtctaattttccaaaagaagggctttttctagttttgttgttgttgttgtttctatcttatttgcattgtagttggagaacataatctgtatattgcaaatttttgaaatttatttagacttactttaatgccagcatatagccattttcttttaatgttccctcagtatttaaaaaggctatgtattctgtactgtgctctatacatgtcaattagttcaaaggttttaatcacattttctattcatttctgaaaacatgtatttattctttcaattaccaggagaagtgtgttaaaatcttactgtaactgtgcttgtcaatttttccttttagtttcattcatttttttatttgtctatactgagcctatatgattaagtgcatttaaatttagaatttctacatattcctggtaaactgaaacttttatcattatgtagtatttttttaattctctaataatcttttttttccataaagtcaacctcttctaatactaatattgcatagccaactttgttttggttagtgtttgcataaatattttccatcttttttattttaatctctgtgtccttgtatttaaattatgtctcttgaaacagtatatttgggttttgttttttaatcaatttgacaatttttggtttttagtgagtgcatttagtccatttacatttactataaccactgatatgtttaggtttaaaactacctaccattctatttgcttttcatttgtcctgcacattttagtttccttttgttttcttaccttcttcctaaattgatggagtattttgtattattctattttcccctctattagctttgtagttttattttttttttttaccattcctttattgtttttcctacagatcatttgaacatgcatccatgacttatcaaaatttaagatcaattagtacttttaactcttcctgcgtgattcaaggaccttaaaatatttaaactctattcctcttcctgccaaactatatatgctattattctcatgtattttaattctaaatattttataaatcccaaaatactttactattattgttttaggcagtcagtacttatttagatttatccacatctttattctttttattgtgctggaattttgaatcaaaaagagaacagaaaaaagaatttagtgcaaataagggccctgaggcatatggagaaacattgcgcagaaagatcataagtaagatataatgaaatgggcaggaaaatacacacaagaaagtaacattctctgaaggcaagaggcacaaaggtattctttattgaaaaagctttaggcagttaatgagttggagaagtattgccaagttacactcaccaaatttagtagtatgcctcaatttagtgggcacaaaagctgcttattgttgaatgaacaacaagcataatgtaattggtttcatacaattaggaggtcagcaagccatgcttgttataattggcactgccatagtcaggggcttatgcgacctcaagtgatgatttgcctgaaggaataagccaggaatgtgtgtgctttgggctccagagacttgactaatctggctgcaaggcctcagggagggaggccaagaatcaaatcacagtgctcaggcagggcttggtagactcagttgaatgtagtcagtctccattcagttcatcactcaccagtgtttgagccggagccggggaagtgggagatagaggagaggagagatcaagtggccgggaaccaggaaaacacaattgaaatgtcagtgcagaggcatcccataatagggcgggatcttaattcctcccaaggccatccactttgaagcaggtctccagcctgtgtggcatgggcttaaaccttcacacaaagggtctttaatttctagtactgagccactctggagcaaagactgatgttgctgtttgtttcaaaatacaggtttacctccacaaggtagcagactgatgaatggttgttaatatcccaaatatcagggttttcttttcccaaacattttctaaattaataattaagtttaagaaggcctgtaatcccagcactttgggaggccaaggtgggtgaatcacaaggtcaggcgtttgagaccagcctggccaacatagtgaaaccctgcctctactaaaaatacaaaaaattagccaggcatggtggtgggcgcctgtaatcccagctactcaggaggctgagtcaggagaatcgctggaatctgggaggtggaggtttcagtgagccaagattgcaccactaaatgctagcccaggcaacagtgcaagactccatctcaaaaaaaaaaaaaaaaaaaaagtttaagaaggaaaaaaaaagagtttagctgggtatgacatactcacaaagatgccagaaaatactcctaacaattaacaatcatttaacagtagacaatgttgtttccttgagattctgaaagcataagcttcatgttgccagtgggcaaaaacagctgaagaatgagaagtaaagcctttgtttctttgctcttcctctgtttcagcctatgacccattggttcatctggtttatgtgtagtacagatgagtcacagattggtcgttcacatgcattagttggttttcttccccatgttcatgaactgtatgcctaacctcatccaatcatctggcaaatgaacactgttgtccacagaggaagctacgtgaggggggtccatttgcaatgcaaatccgtcatcattgctagaaaagcaattcgaagtagcatgatttttttcctatgagaacagcatattgtaaagttctgatagaacacaatgcaatgccaagggcttctaggacacttgatttcgccactctctaaaacaaagaaatgaactatcagggaggctgataatttgttgattttggtgatatttttgtttatcatttaaagcacaccaaattattaacaatctgttttgccagaactgataagaatctagaactataaatctactgctggccatcgattaagacagttctctcttgttacttaatattagtatttattttctccactagaactgcttagcttgagtgaattctagctgataatttcagaagggtgaaaagctaactagaactgggcatttggcccagataaatctgattccagtactatgaaagaaacagcaagggaactagaaagtctttgacaaaaaaatgttgataattggctaaaaactggggagggaaacagaaaacttggagagctatgaatgttattctaagtagaagaaagacgcaagggaggaatcaaggtgctgtgacattaacaaccctatctttaaggctaaaaaaaattaaaaacacctataaattcacttaaaactactctccagaactcataggaaataagtcttcctcaggacctaaattgcagaaacaaaatggaaatctggtgtttgaatctctgctctgtgtgaccctgggcaagttccctcaactgagtctacatttcagtgacatccttttttttcttcatctgtaaactgtggatgaagtaactacctcttccacagggctattaggattaaataagaagctttgtaattctgccttcccaatcaaataatagatctttttatattgctaagaatttacctatttttataccaattaattttagaatgttaccaagtttgtatatgaatctgtataaaatattatatacttttttctaaatcagatttcaatctacataatttattatattaattactcaggttatcattatcaatagcaaatactggatgagtaaaacagtagtaaacttcagtgccctcaggtcttgctgaagtaattcttaccttccaggattatattgaaaaacaaaatactccaaatacctctaagaccttcactcagtgagtcccttttatttaaaaagtttcagagagtaagtaaaaagagtactttggtaggaactagtttatcaccctgtctctagaaaggattgggagcaatcattttgagcaggtgggtatctaaatcattaagaatgttgggaggaaggaggccaatggtaaagaagctcttccttctaacaaacatgaatcctttaccttgaccatttttctactttactccatttatgagattaaatcagtttgattgaggaagctaggtataataaggttttaaatccacacagatcaagaagtatcaccaacttgaatttaaccactatcttttctttaaccacaagagttcacaggatagcaccattaaataatatttgcaaagcatgcacagtgccccacacagaactagtaaagatacggttattttactccaggggtttacagtctggaaacaaaaaaagtatattgtgaagaatctgaatacttttaaaaatctgtgtgttattgttgaggatagactctctatttcagagatggagaaacaaagagaaaaaattgataccatgaccctagatcacacagggagtgacagattcaaaataatttcagtcttctttgtcctattactagtgcattctcatcactagtctacagtggcttattcaaaagtagttctaaattatttcttaaaccaaaagcagcacaaattataaaagtctaaatggtactcaacaccattcaaggtgcagataatttttgcccatgaaaacatgctaaagggactccatgttgtggtaagttatcaaattatggaaagaacattgcagagattaaaatgttgcataagagagagaaagcagcatgagtcaggggtttgggaaatatgagtcagactgaagggaaggagccaaaaacatagagaatgagggcctaagcagggacttaatggacaccacagagatgtggacaaagttgtctccattaactttgagagaaaatcaaatgtgcggttccctagacgtgggggtcggtgtgataaagaggctagaagagctgagcaaagattagcctgtgttatttaaagcaactaacggtgccaaagtcagcaagagagggacctacaatagtataaatcactaggagggagcacgtgggcacatttttgaaaaatgagggaatcaccaaatattgccattagctattgttaatgtattagaatgacgaaatgtgttatggtattttaggaagcacaatctattattttgttctttggtaatgttaacattaggctctgtctacatagttcagagagactccttatgttgttcaatccagactctctaatcctgcctttaaggccttgaattttgttcacgacagatctagcatttcatgatcctcttcaaccaggcactgcaccaggctcctcacacagagccccggcagctgtgctgacgccatctgtctgccattcttctcatggaaaccagttttgtcttatcagcattttctaatgtgagctgctttctgcctagaaacagcttccttttcctggcaacccatgtatctcgtcttcttcaaaatgcagtggagaacccacctcttctggcgaatctgctttatacctcatagcctctgcactcctggactcacttgctcaacatcatttttcttttactaacatcttactgattttgctgtgtttctcagatataccttgttactctgcttcatacatttttagctccattaggtaaaacactgatcctacttttcctgaaactttaggtaccaattctcagcaaatggtaataactcatttatccatttattgcacaaatatttattgaaaatccaccatgtttcatgcactatcctaggcactgggaatacaggggggaaaataagacatagatcccccatccccacccaaagagcttgggtccaggtcccaggaaatttattaactgactgcctgaaaaaccaagtgagcttaactgtcaaggataaattataatcatgcaaaaacaacaaaaaatttctccccatagtaatttgtcctagattatcaggaaaatcatggctgacctgagtagtttcccttataaataaagcattgcttttgctaatgcagatattctcccatacaaatgtaggaaacagatttttcttacacaccatggagatacctacaaaaggctgtgtttgcactatgggaagtcaggagcaagtagagggcagtggactgtcatcaacactcctgggagagccaccttttccagagcatctgcacagggatgggtattctgctttgagtttctgacatcattgtccattttagtaaattttgtatcatagtgagctttctggtatttatgacaaatggaaatgcatagaagtagaaaagccaaacataacggaatttaacaatgtataataattttatatgactttgcatagatgtgtaaataagtaattccaggatctcaaagtataattttcaaaataatattgtgttatttaaataaactaataaattgacattaacgtaattgaaaataggtcaaagaaattcagtctgtttatagcctttagcattagataaaccaccaacagcaaaggagaggataaatattctaaaccacagccagagaagccataaatggaaatgtagttagtagctgcctcctggtcacagaggtcacttttttgacaattttatgagtcccagtaagtaaaatgtgtaatcaccagtcagtcctaggtgaggcaagtcttgttgcagctttgtttgggtgttggtggagaaagggaaggaaagtagtggcagtgagcacagtggtatttgttttttgttgttgtttgtttttattaatttaactcacctaatatttttattaaataacccactcagaaggtaaacagacctcattcttaagaaggagtagcacaggtttttgtgtttaaaatctacttaatgatacattaattccactggaaatgttagcctatttatcagacactaagaaatgagcaacaagaaagtaggaaggaagtcatagggcatcagttgtaggaatgcagcggggtggaggcagtttgcagatagatgtcaaaaagaaaagcctcagtcactgctgaggcctcccttagaaaatgcagcagccagcccagggccttgatctgctgccagaggaaacttgccacatctgaatctaacattgccgtatctctcaggactgttatcactgcaaatgctggcaaatgttcttgacataaaacaatagatactctgctgtcatttctgcattaacgagtcataaagctctgaagaaaccccagtaaaaaggttttcatcaagtgcatctgagaaaataataaaagacacaaaaaacagcagataatttcaaagcaggattgttgcaccatcgcatagtacctaaaaaggacagtttgtaatcactgacttgaaaataatactagtagtaattataataaatttcaaaacaaaacaaaataacaaaaaccttagccaaaactttaaaaccaagttcaaagaattacgtaagtggatgctttatagattattatccaataaatagccatacatcactcaagtatttttcatctcccctccctctttcttatcgaaagaatctctcttatcatttccacacccagctaagtgaagctgatttctgaggacaacccttttacaatctcaacttcatatattattatactgcatagtgtaaatgcgcagtcctccttgaaaatacagaaaagtgaaaggcaaaccaacctcagggtctactctcagagattcttagagggaagacagaaattgggtgaattttttattattgattctttccctactttttcttccaacatactaccatgagtctgccacagtgatgatctaagacctctgaaatctgcctcaggggtcttaaatcatcactgtggtagacccagggtagtattttggtttttatacaaaaattgtcatctaggaatcacaagttttatgatattgttaatgaagcttagagtggttgttgaagaatgatgaaattatatgatccttttttgtgtactacttaacttcatgatataggagagccgaatgaatataaaagtgatacagataaggcaaaattagattttacttataaattactgtaaatatgaatgtacacacacaaatttatatcaccttttgatctgaaagaaatttcttataactagttcattatgctatcactgagcattttttacttttctagaactgtaacctgcatactcattaaggcacatttagtaaattattccaagaagtacactgctttgagaaaatatggatttttaaactacacaggctagaggaatatgatcaaattgaatcctttgcattctgaaatttgcaatgaaagatttatacatacatgttgccctgctgtttgcaaaaacaaacagctacagggaacgtataatattaaaggttgattacacccagttattggttagatttttagaaatttgtcaatggaaattatctcaaatacaatatattggatggaaaagcaagtatcatacaatctattaaaatttttaacatacaaaacaataccatatgttctaatggatgcatccctgtctaacaaaagtacaaaaacatctcagggaaggattcattcctaccgagacagtggtagctgatgggtcaagggatgaggatggtgtgaggctttagctgtatctgaaatgtttcttaacaaaacaaaatgagccaagaccaacatgacaaaatgttagcatttgttaaatctgagcagtactcactggtatttgcaaaattattttctgaacacttgaaataatttataattttaaacatttccaatgcaagaacattataaacttttaagaataaagtaaaaatttagcttaagaagtggcaaaatggaggaaatatcaacatcttcacaactgacaattctttctgtgttgcatgtctctgacagacatagacgagtgcactgcagggacgcacaactgtagagcagaccaagtgtgcatcaatttacggggatcctttgcatgtcagtgccctcctggatatcagaagcgaggggagcagtgcgtaggtaagtaccacagtgcagtgagcacggtcctgtcttgagtaccttaactgtttcaacctcaagcattccaatcaaagcattcatgtttctttggagagtggtagccaataattccttatttttttatagactaccaatccattttccacaataacaagaaacaaccttaaaggttgagctattctggataacaaagtgttggttaaatgttagacgaagcaagagcagaaatttggggtatgaatgggacaataaaaacaaccacaaaaaaatttaaatttgctgttttgggggccatcgcgctaacacactggtactgtgggcttcattcaccattcactgctgcagagcatagcatagcacagcacatagagcaaatggtggagttgcattccaagcaccaaccccagctcgctttgagaccttgagcaagttacttaaatcctgtgtctcactatgttcacttgtactgtggagatgatactaggccctacctccagagctcatgtagggaatgcttagaatagtgcctgtccctgtgcagtaaagctgtttgctatcgttgtattctgagtcaacagatgggtattaaaggctctttatactgcaagcctttgtagggtaccatgagtacaaagccaagttcagcacgtgcctctgctggagggcctaagagcgtgagctccctgacagcaagaccaggtcatcttgtgtcactgtggtctccccagtccctgaagtgtgcccaccatgtgatggaggctctatgcgtgtgttttgagtgaatggaagatcaaagtatgaggaagccaactggcagatagtgaagtaaaatacagtactctgggctcaatcatgaggcccagcactaggcatgaaactctgactgtccatttatttacataccccttcttaccacagatcagtgaaaaagccttatttcctcttaggaacagagggtgaggatgtggggacagacaaccagcgtcagttttcgcctgagaatgtgagctgttgatgttcacatgtcaacactgagttccatgtgggccccagcccagttctgtctgccatagggctgtgcctagatgctggggttagtgcccagcctctgaggaaggcccagggtttgctataaatgaagctgtgatttaaaagaagagtgtgtagaaaactccagagataacaaagtttggccattgtattagacaggaaaataaatatttgagggcataaaaagtacagaaaaaagaactaatccaacttagtgtggggtgaatcaaagataatggaacatacggtcacagcccttttaatgtggtaggaggaaatattcctaaactcagatctaatcatgtgtcttcccctcctgcttccctcactgagagaatcaagtctacattcctcgacagagcatgaaaggtcttgctcaatctgatcattgtccagttctgttgcataaacacctctcccccaccacaaaatattacaccccagctttattccaccagttccccacacacgtcacacagtgttacttacactttggtgcctctatacaagctctttacacaacaaaaacattccctcctggcaaattcttatttcactgtcaaatcctagcttaggatcacttcctctgggaagcctgctatgatttacccaaatataattagttgctcctcccctgtgccagtacttctcaaattatgatgaaggatacttttttgtaaatttccaatctacggcagaccaatacttctgtaaagcacaataaaaataatgttgcactaatgtcaaattgctatttctaaacatgtactctcagtttctgtatttattcattgcagactggtccaaatagcccatgaaccagcagcagtcagcaggccacacttcaagtagcatggtgctccctgtgtcccatacactcctttctattgttgatcttctcattccatggaataatttgtttcatgcctgtctttcataccagacaaggcagaacacatgtatactgattatcattataaacttggggtgccaaacacagtaccagcaaataagaatggttcaatgaatgtttattagttaagaagacatgcgtcacatattcaccaaatagttattgagggcttactgtgtaacaagcattgttctaggaactgggataatagtaaacaaattttacaaattcatagccctcgtggagctattagaaagtataataccattcatacaaattagctatcaatactagcacctgatgatagtactgaggactaggaagcactatgctaaaattgctcttaattagtgtgaagtttcgatttattcgaataatgtttattgaacacctactactatgccaggccctattccagatctaacaatgaacagacaaaaaaccctctacctccacctcaaggggagaatgtcatgcactatagtgagggaacacacaagaagcaaataaacacataacacaatgtcgagtactgttaaggactacaaagaagtctaaagcaaggtaagggaatagatagggcagaagaacctatttgatattggtgggaaaggtggccaccctgaggaggtgacatttgaatggacacctgaaccaaagtaaggggaaaagccatgtgaatatcttcttactatttatttcagtattcaagttaaatcaaatatatcttgcagcttattagctcccatttatgtttacttgctttgtgccagtaactttgcctacattatgtcttgtaaccctcccaataattctactcacagaagaggaaatgcaagctcgagaagttaagaccaagctagtaattgccagaacaaagattcagactcaggttatcctgaggccacttgagcacactacttaattttagttattaaagtaccaaaagagcccagcataaaggtttgttttgttttgttttgttttaccacaaggcagtgtcactatatagcattacattgtatatgcataatggttgttttaaattacacatgccatgttgaagttgtcacaaagtgtagaatcatgaattaatgaaattttattatgcttctaagatgttagtcctacttagcaagttcttagttgagcattttatagttgaaaatatttatatgagaaggacacaggctggaacacttcatcaaagtgtcaaaagagcactctcaagaggtaacttatttagcatccaattcttccacagtgttcttttatttgatacacaaaaacgtcctaagatacacatggcaagccttgctatccacatcttatagaagaaaaaccaagatactgaaggcgtaagtgacttagccaaggtcaccagttgagcacagcccacaactctttcttctttgttttgtgctgcaccatgcacttcagtagttcttttttacttctgtaattatatataagcttttagctccccaaactgacatcttatatatatatgcaatagtctcaattattttgttttctttaaatctcaatccacccaccaagtttatttaccactgaatggcatgaacattgagtctttgttcttaacttcttaactcagaatacaaagtatatttaaaatacatataccctaattttaacaaaataggaaattattacttttaaaaagagattttctctacataggttttctagataatgcttttcagagaatgctaattcaataatttggttctctttgtgtgtgtgcctgataacctagacatagatgaatgtaccatccctccatattgccaccaaagatgcgtgaatacaccaggctcattttattgccagtgcagtcctgggtttcaattggcagcaaacaactatacctgcgtaggtaagccttttgagaacttgctgatttctgtcttcacaaaaggaaaccccatgccatgttgcagtatttccagttttctatgttcttgagtaaatagtttccatcgacttcccttcagcaatcataaagcttaaaagataataaccaatctgtgtcttaaaacacatcaagatgtgaacagaaaactttttaactttggttttagttctcctctgtggatagatcaacaaatttaaaactacaaatcaattgatatacatacaccagtcaatcagcagtgtgtgatataatgctgaaagtgccaaaggggttactacaagttcaagtatataaactttccactgaaagtgcatctgatttttacatgcctcttctcccctttcagaatgcaatgtcacggcacacaattaaaagattggcatgacatggaaaaaatctagtgtaggaaaaatgccttttcacaatattttcagtgctttagagcattgcaaaactccgtatgggtctcaaaggcttatgttataattgtaatggaatttaacagaacccatttaaaaagtaataaatagcacagataaatcttcagtacagcatgctgagagaccatatcagtataagtgtcttatatcaattatttatagaattggcattttgtatctgaacaacaaaagaaaatcgataccggagtgtatatttattagaagcattaaattcctttggaaagattcatcaaacatcaaactaactgtcattcctagaaaaaatatttcggtatttccaaaagaagtatatgacagacgtttgtagttgttccaacaaatatgaaacctaaatggatgttctccagtgagcttctgcagggcaaataattcagctagggaattactcacttgtcagcagatgacgtaggtacaaaagagtaaggatatgtttaaagtctatatatatatgtgtgtgtatatatatacatatacatatatatatatataaaactttttttcagatataaatgaatgtgatgccagcaatcaatgtgctcagcagtgctacaacattcttggttcattcatctgtcagtgcaatcaaggatatgagctaagcagtgacaggctcaactgtgaaggtaaaactcttcccagatagtatggaataaagtccaattcctgtgactgctgttgttttatctgattatgtacccatttatgaaaacaaacgcttacccatgggaattctgttctaaaatccagttaatgtagttcagttgttacattgcctttttagtgtgttaccaagaaaaaggaaaagaaataaaaataactgaaatattaggtgcaggctggctctaataattagaaagggtgctctagcatgttgcgtctcagtgtgttatccagtgaccaggtatgtcagcacctcctgggagcttatgagaaatgcagaatctcaggctgcaacccagacctcctgagtctgaatctacattcaacaaaaactgcaggtgactggtgtgcacatttaagtttcagaatagccaagtgcatgtcaaaacattaaaataaaaatcaggagatctggtttctggttctattcctgctactgtgtgacttgggcacatttcttgagttgcctgggtttcactttccacatgaacaagaggagggccatttaactagattcatgaccttcagggtccattgcatgtgcacatttcgttatataattcaaaaggcattagacatcctgagggggatgccacagacacttgatgtccctgacctcctcacggttcactcagctttacacaaagctcaaaccccaccgagagaggcctcacatcatgccattacactcaaaactgaaagaggctacctcaggacagctgcctctgcccttctgagtaaactgtagggacatcactattcagaaatgcaaagcattcttcccctgaaagtcagatcctgccaagctgtcattctggaagcttgcacaggttaggggacttggcattcaaagctcaaatgaacttggcttcaaagtcacccaatttctgagaagacaaacatgaactctacatcctggatgggtctgcagagtccaaaatgaaggccgtcaaccacaagccaattcattcagtagtgtagttaggtccaggattagccaaattgtcagcaatgattcagtaaaagtcatgataagaaaaactttttgtgctatgaagtcatagagggaaataagctgatattgttagaatttgccttttagctgcttataaagttttgtatttctatttcagaatttgcaatatttttactctctttagctcacctcaaaagtgtattacttcctctggactgttgagcagaacaaaaaaaatatatatgtgtgtgtgtgtgtgtgtgtgtgtgtgtgtatatatgaaacccaggcaacttaagaaatgtgcccaagtcacacagtagcaggaataggacaagaagccagatctctttatatatatataggtagatataatttttcctccttaaaatataaataattttaattatatataattattttaatatagatattttaaatcttataatttatatatatatataatttatatatatatatatatccaaagtagtggtgcacaaacttttcaactctgtgtcctttctcttgtctaattcaacagacattgatgaatgcagaacctcaagctacctgtgtcaatatcaatgtgtcaatgaacctgggaaattctcatgtatgtgcccccagggataccaagtggtgagaagtagaacatgtcaaggtaagtttattttttttttcatatgttaggtatttagttttagccaggaagagacaagaggaagttataggattctcctatagactttcatttttcccactttcaatatacaatttaagctcttttttcccctgttcatcataaaatatatacatctcataaagaggtgattctatgctaatgccgacatttttcgtccttaaaagataaataattttaataaaatattgatatgtattctatgtaacctacatcatctctttgagatacatcttcaaatcatccactggaaaagattcagttattaaaatgtttcacctgtgagtttgagtttagagcataagctcaatatgtgagttaaacatacctccatccagtcttagccctctaaaacacaaggattataaattgcgtaagaatgtaggtgctgagaaaagtcagcctaatatgttgtaaaatatagttgaatattttagagaaaactactagccccaaaatagctaatgaccttgggtccagtttcaaaataaacattcagatgatcttcacacctatacgtaagtggaagaggcagctccccacaatggtatgatttcagagtttctcaggaagatctaaaaaaaaaaaggaccctacctccaatgttgcatgtagttgaaaattttcttaacagggaaaggactgtcagataaaaccaaaaacgtagaaaatcctggaaaagctagtacaaacacttaaatttacacaaagcaacaaaagaatgaaaaaatgaccaaacttgacagaaaacctgtttgaatcccagctccactgtattcagtctgcacaatcttgaacaaattatcaaactactctgagcctcagcttcctcatttggaaaagggagttgtgggaatttagtggaataacatacataaaaataatttgtaaactataaagcttgtacaggtcaaggtgtttttatgaaatttacttaccaatgtaagtgaccagtagtacgtcttctgtagagagtcctttttaatcagagttggagtgaaggcacacaaggacaataaagatcctgttaagaaaagaaagatcaaggaaaggagacactggggattctcagtctatatcatgattttacaggaaaatattaacttagaggaaatccattacctgggattttataataggcacacaatttttcgactagactccaaccactgagtatgagcataatcagaatgtagttcattgcacaatgaacatctttataaccctttccaggttactagagactttataaatgttaattatgggaaaacattgcattccaatgattttacttactgaaccctaattgagactttcaacatgcatattacatgcaagaaaatgttagctagtggaatgtcttaacaaatttctctggagtccttcaaacaaatatctatgtgtttctgatcaaaaattgatttgatgctcagcaaaagacagaagcagattaatgcacggtgggatccgacctgcctagcctatctatgtggaaacatttatatctattgtaattaaaggtggaaaatgcaccaaaattgtaagtgggggattcctaaatgttatatattgaagatatgcagcttcagaatgtttggttaagccaaaacattttttgtgaaaaagacttagcattcttctaaagtataaagcaattgctttctcctacggaaatcgttccttctgagccttgtccacaggaataaaatgaaattgaaagttttggattcttaactttctctaaaagacttattttgtggatgaaataactgttctcatttcacaggcctatacaaatgaaaactgtgtgtgtgtgtgtgtgtgtgtgtgtgtgtgtgtggagagagagacagagagacaaaagaatacacatacacatagacacacactcatcaaatattttgagagtattaatttctgaaaaatcttccagaatgattaaggtgatgattatgctaggctctacattaatggaagtaataaatgaaattataaggttgtcttttgcttctgttggactccatataacaaataagtattagttttccctgtacctaaacagcatctttattcttcaaaaaagtggaaaatactgaaaggataagtcaattgtgatttcatttgaagaatctaagttttctttcttcagccatagccagcccaagaagacactttttgtaactgtctcttggagactacctagctttcccagtctgttcttgagttccagataactttagccagtttggaagctaaaatacttttttttcctccaaagtcaaggcatgaattatttagagtatatgaacttgaatgagccactaaacccttatttgtttttcatccatatcaagtggaaatatctttctcacctacctccacacagtttgtgtgaagagcaacttagttcaatttaatatttcttaaaagccagatgctctattgcattaatgctaggtgatgaaaggattaaaagatgggtacaataacccttgccctcaaggagtttacaagctaatagaagggttaagctagacatgcagattgcaataatgcaaagcagaaagcaataaaggcccttaaaaaagaacaccgggtatgagaattcaaaagagatcatatcccagcacctagcccatgcttggcttacagcaaggattcagtaaattacttatggaatgagtaaattcatgaataaaaatatctcattgtggagaaggaatgattcagaaaaagtttacattgaataaaatataaatcactattcaaatgtaaagggagacagacatagagatgtagatattaattttatttttattgttgttgttgttgttgttataaatgtaatggctctctagtaaaactgttctctcagatgtcatctggaggcttctgattcccaaatttaaagtcaatctttgtccagcctgaggtaaacacaacccttcttcccaggattctctctccctctgacttctttggcattgccttttcctgggttgtctccctgcactgacagcctcttccttaacttcctctttttccttacagtcctaaaattgctatgctctatgaggtggaacacttcatagtttcacttcctgtgctgtgcttcctctggacagtataatccactcccagcatgcttcagcttactgaaaccagatttctagcctttacctttctcccaagttcctgaaagagatgataagctgccctccatagtttatgcttcctgatttctcagcttggaaagccttccctgccccagccatgaaaactccatctaaccaccacccttcaaggccacgttgagatgcctcttccttccttcagccttccctaatccccctggcaaaattacccaactctgctccacatgccccagtatacttatctatctcttacttaattccattttactttctaagtaatcatatacacattccctcaattataatgtccctgatgacaagaactggtgtttaacttttatataggcagagtcagtggttaacattggggtttgaattcaacagatgaacaataggtgcttgataaaatatcatgaaatgacacatattaatctgcctagaatgtctcagctctgtctgtcctgaattcaatacaatgaacacccagtcttgtgtctaaaagcaggttgaacacagtccagatgctctcacacctccttccttgcaaacagaatctgccagttatatgatttaattagatcagttcattagtttagttagtaaactctttgaccctacatctctacagatataaatgagtgtgagaccacaaatgaatgccgggaggatgaaatgtgttggaattatcatggcggcttccgttgttatccacgaaatccttgtcaagatccctacattctaacaccagagaagtaagaaaaatcagaacttttgaaagtgaggattttctggtcttaccaagccaaactgctgaatacttttgtttgtctctgcagccgatgtgtttgcccagtctcaaatgccatgtgccgagaactgccccagtcaatagtctacaaatacatgagcatccgatctgataggtctgtgccatcagacatcttccagatacaggccacaactatttatgccaacaccatcaatacttttcggattaaatctggaaatgaaaatggagagttctacctacgagtaagtatcctgaaggcagccttaactattgagaaagatgggagtttgttgttgttgttgttgttgttgttgttgtgtggtatccacatgtggaaggaaagcaaacatttaaagtgtcttatgtgtaggcattgtgtaaggccttccagctacattatttcatttattcctcttggtaacactgccagatagatattaatattcatctccattttttacagaggagaaaagtgagatgcagaaagattaagtagcatccctgaaatcactcaaatattaagtttggcagactctgatagagttgtgtgtgaccacgaaaatacaagcctcccatccccccgcctctgcccccacccaacataccccccaagtaggtatcactaatcattgatggttaattaattatacatagacatacatataattcaaacccaaaataattcctggagctcctaaagagtttttcagacatcatgaattcatcattgttacattcacaagacagtttgtgttcacaccgaaactaaaacctataagtatgtgagaagtgaccccacctccccgcacagtatgtgtcagtagttgtaccattcttgccaacttctgggctggcagtatggagtcatctccctatctttcattgcctgtgtgaaatctactttctgaattctgccatttccctcttcacactgtctcctgggttatctttgcttcctcacatccctatctctcttcctataaactggctcccgtcacttccatgatcccttcagtggcttctgagctggtctccctgaccccaaagcctcagccttccagtctccctacaaaatctcagcaagttcattttaggttaaaatttggacatattttaaatacggctcaccacttcatgtgaaaatgatggcaccctaccaagcagtttgcagagttacggtaactgtttcatgctaatgatgttattcatccagttacaattttctcaaaactcctttgggcactctttatttttaatcaaattttaaagccaatatttcattttgagaatatgaattaaattgggaaattcatccttgtggtacagtttacagatttttaatgtttacccatttatcctgttttttgatatattaatttcccatatagctccagagttatgtgatattatttctttgccagtatattagaaaatgattaatttctcatgaccaacttctgaaaagaaagacccaatgcaaaatgcaatctattacaattatttttttgaataaaaaagaatatattatagttctttaacatttgatattttaaatttgacatattcttgatatttgtaagaaatttccactgaatgaattttacacaattcagatactaccaattaactaattctagcctaaacaaataacattatttttaaataacaaaatctttaaaaataattttctattttgaacttttagccataatgtaagaaaataaaattttctagcagaataatcaaagagtgaaacaaagttccaacatgttttttctttgcaattaaacatggcacttttacagttatttattattcatatcagtgcacttaccgacttcatattttcaaatcaaaatacagtgtttttctccagtgaaatccttattctcatgactgatagaaaacattgccaattttgatatttccagagttaatgttaaattatttgaaagaaaattatttaaaataataaaaatagacatttcaagactatttcttatcacataattcaaaaagtacttggatcaaatcctacagagtttctccactaaaattctacttgtgcagagggcattgaaacgcatgaaaatcaacagcaggttagttaggttaattaattcggttaattaagcacctactacatgctcagctctatgctaggtgtcatgaggaattaaaaggacatgtaatgcacattttctgatttcaaggagctttaaatattattgtgtagaaaaagttaacatctatgaaaatagaagtggggcaattttgtgcttaattccatggtccagatacatcaaaaaatcaatgtgggctgtcaaagaaggtttcttgatagtcatgagtcagcctgattcttgaaaggatatgtggaatataaaattttatttatattccttttgagaaaatactgagaaaaccatcttccctggaaaagagaacgtattgtaaagaaagtacatgaaattgaaggttgaatatccaacatcccccacactgccccagtgtctctgctcccttactgagccttactattattcttcatagccctatcactacctagtctagtattcactgaactgtgtcatccactagaatatgagcataatgagagcagagactacacctgtcggttcagtattctatcctcagcacatagaatggtacctggcacatagcagatgctaaaataaaatttaaatgaataaattaattcaatcaacaccttcaaggtgttattattacctacaactattgtttacaagaggtatgcaccgtggaagatcctggagacacaacaatgaataaagccaagccagttcctgcccccgtggagcttgtagtcaagacattgaacaagtgatcagaaagatgttgactgctgcagcagagggttgcaagctgctcatgagtatataacaagtagccctaaccaaagcattctctcccttggtttaatgtccacccattgaggtgactgctaaatactaatccatgactctatcccttggcattcaaactcacacatccacttacctgcctctccaacctcatctccctccactcacaagagcccatcatattattcatcaaaatgaaactgcacccagttcttctgaacatattactttacaaaactttcatttatgcctggtgactctcatcaggcattcaaaagctttccctcagtgcttcagggctcttccttttcttccctttatacatacacctttatgtatcttcatacgtaccctgcataacctcatatatcttagcatttaccatattctgttgaaaaactgtttccatttctctttacttactagaatgtaaacagatgcacaatgttgagaaaatgaaaagtgacaactttgtttacaagtttagaaattatcagattctcacttaagctctagtctctgtaaagtccacaactactcaataaaagtgaagaaaaatgttaacagagagggaggaatcaaaaacaaagaactatttaaaaaaaaaaaaaagcaagtccttgaaacttggagctaatgactgtattagacaagggataagagccaagaagagttgaaaccaagaagggaccaagtagtggctcttttataccaccttcaaaattctccccctaattcttataggaggtatactaacaaagcatagaaactccaatccaagaaaattattctcttcctttctctattttcttttattttagcaaacaagtcctgtaagtgcaatgcttgtgctcgtgaagtcattatcaggaccaagagaacatatcgtggacctggagatgctgacagtcagcagtatagggaccttccgcacaagctctgtgttaagattgacaataatagtggggccattttcattttagtcttttctaagagtcaaccacaggcatttaagtcagccaaagaatattgttaccttaaagcactattttatttatagatatatctagtgcatctacatctctatactgtacactcacccataattcaaacaattacaccatggtataaagtgggcatttaatatgtaaagattcaaagtttgtctttattactatatgtaaattagacattaatccactaaactggtcttcttcaagagagctaagtatacactatctggtgaaacttggattctttcctataaaagtgggaccaagcaatgatgatcttctgtggtgcttaaggaaacttactagagctccactaacagtctcataaggaggcagccatcataaccattgaatagcatgcaagggtaagaatgagtttttaactgctttgtaagaaaatggaaaaggtcaataaagatatatttctttagaaaatggggatctgccatatttgtgttggtttttattttcatatccagcctaaaggtggttgtttattatatagtaataaatcattgctgtacaatatgctggtttctgtagggtatttttaattttgtcagaaattttagattgtgaatattttgtaaaaaacagtaagcaaaattttccagaattcccaaaatgaaccagatatcccctagaaaattatactattgagaaatctatggggaggatatgagaaaataaattccttctaaaccacattggaactgacctgaagaagcaaactcggaaaatataataacatccctgaattcaggacttccacaagatgcagaacaaaatggataaaaggtatttcactggagaagttttaatttctaagtaaaatttaaatcctaacacttcactaatttataactaaaatttctcatcttcgtacttgatgctcacagaggaagaaaatgatgatggtttttattcctggcatccagagtgacagtgaacttaagcaaattaccctcctacccaattctatggaatattttatacgtctccttgtttaaaatgtcactgctttactttgatgtatcatatttttaaataaaaataaatattcctttagaagatca

SEQ ID NO: 47 - DNA, 53151 bp, Homo sapiens
ggctgcccgacccgggcctgggctgtggctgtgactggcgctgccgtgggcgccgcagccctcgcgggagccggacgcggtaatgccccagcggcgcagcgggcggctgcgtccctgagccgctatataagcgcggcagggaacatccggaggggctgaagatgaaggtgcccgcgcatgggcccccgctgattgccagtccctcccgaccccgcgccccgcgcggagcccgaggccgccgaggacccgccttcgccgcagtagcagctggagcagcgacagaggcggcagctgcggcggcggcggcgcccgcgcccctcgcgccagcgcgtagagcggcggcggcagctcgggggccgccactgccccggctgccatgagttgtgcggaggtgatgtatcacccccagccttatggagcgtcccagtatctgcccaaccccatggcagcgacaacctgccccacagcctactatcagccggcgccccaacctggccagcaggtgagtcaccggacgggcagcctgctgggggcgggggcgaagggcatcgagagtatcggtctggggctcggcgacgtcccgccggcacgcgtggcgcagaggatgctctgggatctgcgggagcgtccttgagcagaaagccatcccgagagagccgggaagggagagcagcagggtggacgggtgggtgaggcatgacctagctgggggcttcattgagctgtggtcaccggagctcagaggctgctcctcctaggcaccctagctcttaggactcagttctctgaagctcaccaagggcatctatcttaggaccatgtgagtaaacttcctttcaaccaactattttgtttatttggaaagatggaatgtttcagggttttattgatgaggaagatgaagtgcgctgacagaggtaggggaagctacctggagagtgagttcacgaaatgatctgggactttcatgggggaacactggtctagcataatgtctatcgggtgttactagaacttctccacagaatctttctcccggtgactgtgacttagaggacagggatggattccaaggttcttcattcattttttaattccagcaaagcacagagtttgtacgtgttcagtctgttgacagtgggtccctcggccaaaaggttaccttgaatctctggatgctgagtctccactcttccaagagtaactgaagatgtccataataaggggtcgtgaactgaggagatgatatagttactttagaaggaacagtagagttctggggaatttggcacgaggcgcccttggacattactctctggatacaacggagagtgtgccaaggcttagttagtgctacattaaaataaaaaatgtatgtggcaagggctgtaccaaaatagagtccacctcagactatgggaattagggtgggcggatttggagaaacttaaaaaaaataactagatttggttaggaaattaccatccatagaatatattgatttatttctttttactttcttaggtaccacatgttttattgcaaaccttcttaggtttgggctgttaattaatctgacattttactttctgtatttcctctacttctgtctctttgctagaattacagtgctactctttagaaagaaatctaactttccgtttagaatttaggaactatgaaattcagctaattctggaagggtacatgccccagattcatctgctaaatagtaccagcttaaccagaaccaattagggcaaaagaggaaggagccctactttcttgctatcctcttaaaaaaaatattcagcagcaccagcatttcaaagcatctctgatattacagaggtcttcaattatcatttggaatgtggatgagcaacaaactaaaacttctctacatgttcagaaagatactttcctcctttataaaataacaaactagtagaagttgtttcaaatatggctttattttttagggttgtgaaattaatgaatctgtggtgtggagttaatactgtaacacttttttttgagctagaaaataacattcggtatcagagaaaatggcaaattgccaatcataaaagttttcaataagaaatgactccagtactttatataatgtttgcaatagccctgagactcggtccccaaattcatttcttttgctaaaaccgtcaacatactgaagacaacaattttaaaaagtaaaaaataaaataaaataaaaatcaggaaaactctgaccattgagcttcttaaaaagaaaacaatttatctacattgattggttacataatgatcaacttctatattttgggcttttgtagacattgcttaactagatgttaggctgagtgagccatagggaggtgcttggaaattttcatgttgctttttcttctttttcttctccttcttcttcttctttttttttttttttttttttttttttttttttttttttttttttggtcaagtaaagaaactgtttgaccataactggctaacgaaataaaaaaaaaaagacttgacagtgtaactactgttcttttagtgtcagaagtttattttgatgacctacattttctattggaaaagagagtaaatcaggaaattcttatcaggctgacagcatttttagactatgcaatgcgtgggtgaagtgggactaatattgacttggccctaatgcagtcatccgagaatacatattttggttgtttttgcattccataaggttttatcattattatccatgaagattgttttctccgtacatgggaagtgacccctaatagcatcttgcctgggagacaaaagtaagggctacaactcctactgaatttgaaaaattgatttttggagaaggaaaaaatggaaaaggagcgaagaaaagtaacagcaatcaagaaattttaatagccatttaaaaaatgctagaaaagacagcattaaagttttatattacttctgtattcaattgtagtagtgtatctgtcaactaatttccccctcaaactgtatggctctgaagtccttattaattactgtatcaaaatgattccttatgatggattttaaacacaggtatatttttcctcttaacaaatgatcatataacattgagaattattttggaaataacagaacttcattatccaggcatgtgtactctcacctgttttccgataagcacaaatgtgcacctgaaatttaagtttaggtttttgttgaacatattgcatgttgtaggtgggtaataagtgaatgtcattttaaaaacctagttaactgtatatatatattagcttgcactgcagtgtgttacttaggtatacagtgggctaaaaagtcaaagtaagctaaaatatgtgcaaagtatacattttattgtccctgacattaattactagaaattgcatggctgggtataaatcctacagtggggtttatagagccaaaattactgagggatgctgggtgacctgtttcgcatgcccaccatctctttctggctttaatatgtcagtctctaacaactcctcaggagaacccttgactcagtctctcagcacatgctgtcaaaggtttcagaattatgcagtttatagatgagacagagaacagtcactggttttctaattgtgcatggggatttttaacaatcacactttgggcttcatataaaatggagtatatttactctgtcctcttccagggtaacagctggatgaatctgcatgcatgctttcacttgaaaaaattaagtgcccttggagggagaacttcagttataagttttgtaaggtgttttttcaaactctctctggactctgctacgttggttgagtcataaaattgttctgcaattcggtttgtcagagaaaaaagccctggaaaaacataacttcaactcttctttttacaagtgagaaaatggatttttatagggctgaaatgcctagctaaagatttcaaagctggtgacaaaattaggatcaccagatccccctttctccggtgtagcatctttgtacaatgacatgaaatttcctaaagctttttaaatttttttaatgttttgctattgcacaataggcttatttttgtctttaggtccccaatcaattttttttctaatgaagattaatatgcaatagattctttggcgttggagtgcgagattctttccaagtccttggtagtgtacttttttaagtttaggcattccaaaggccgttagcaagcatttggattatgctaatgacttatgctatccatgttgcacccttgttgatgaaacagtatatccagttagcaaatgaatatttatttatctaaaataaaatacaggaagtggtattagcagttaagtgtctcatctattattgctattccaacataagtttagattcattaagagaaaagaatacagttataaccaaagtagtttcaattcacagacaacttatttgaggcagaggatctatttttcttgcaactgtaagtaaggacttaagtagatttataaaaatttatacaggacttctttgagaaagaacagcccctataacttcacactacacaaattaacttcactgtagagacttcgagacttaaagtgccccacagcttcatgctccctataacttcccagccagaaaattcaaagctggaggaaaaattaaatgttaaaataattgaactcttatctctggcagtcaaccagaatcgagattacaatgatgatggtaagggcaagattgagaaccataaaatcatgcatagtgaggatgtgttcaccaagaaacaaaatgccaggacaaggtgacactgtggaaatttatgtaaagggtattctggctaaatgcaaggaagttctaccttatctagcccttagtaaaatttcacatctcacaaagccggagatggcaaggaggtgacctataagatggtaaaagaggtgtttagagtggaaagtcttgttctcctatgcactgtttcttcaggttactgaagaagaagctgggctatgtgcgtgtgtgtatatatgtgtgtgtgtgtatacgtgtgtgtgtgtatatatatatatatttgtcatatctatctgtgcaaagggaattttcaatgggaataaaactattatgcttatgatgcctaaggcagatcttaaagcaaacttgtaagctaggtgactgtcattctaagacctgggtgcttagcttggttctcacttccataggctctgtgtccaactaactttttaaaaatctgaaaactaatatatcttgtaatagataatatgttagggtattacctccaagaaaacatttttattcaagaagcaaaagctctctaagagttgaatttgaggctctgtcagggacagtgaaagcaaaacttttgagctaagctctgctctgaacctttcaaaacacatctctttaagcagctggttttctgctctgactactcatttaggaagacctaagactgccttgaaccattagacccaaacagctgctgctagaacaactcataaatccatatttactgatagttcagtggataccagatttacgccagtaatttacaagtgtggtctgaactagggtaactgaaccatttttcacttgtctccttctttagttgaagaagaaaagaagaatgacttaaattcaacaggtgtcatttctccttaaaaccaaatgatttcagtatgccaaaacacttgtcattggaggatgcagtagggggactctaaaagtctatcctttcttgttaatatgaagacagataaacgaagtgccataactaattcctaggaattgggctagatgacccatgtctgaaaataaattgttcttcaatgatctgtagggtttttttggctaaatatcagaagaggcagccaatgtaagaaagaaaattaagtgtgaatttgtctagagctccagcatgttgcttattaagatatagagttggatgagagacctctgagacaatcaaatcaaagtttcttgttttcaaaagaggaagctaagggccagaagcttcagtggcttgctcagactcatggaaatagtttcggtcaaatcttctttcccatttcagttcttttttattgaattcccttcccatctgtgctgctttagaaacaagaaaacagttagtaattaacctatgttatcttttgaattttcttacttttaaattttggaatattagccacttagagattataatgccatcagccatataaataaaccatgaggctctctttatttattattgcccttactatactcttccaattaactatgagaagtttgagtttaggaacaggctatgactttcatctttgtgactccaagtctttgcataatttctgacacaaggtaggtattaattgacaactagataaattaatgaataatggataaattaccttaaaaatgaaattataccctaagtctagtaatagaattatacaaactaactagaaatttatatgttggaaactgttgtctccttcaaagtagttggtttgagagagaacacataccctcatgatatgatcattgcttaaaacattttgggaatgtaaattttgaaatcgcctctaagcctgtggcacatttttttgaacatcatcaaaactggcaatttttcttccttggaggggttaggtttgattttttgataatgtcaagaatcatttagaggcaaatgcactcaaaagtaactcatcctgttaagttatattattttcggttggctcctccctactgttaacaaaaacagagaaacaaacacagaatcctgaggtgtgattttgtctcacagactgactggtcaaatttccaaaataagattttcagaaaaattgtagacaattgttttatgtatctgatttgtcaaggagataatatgttcttagacatagaagttcaatttcacctagaattatatatgtttttaaaagcatgacattgtttaatctctaactttttaatgtcatgaattttagactgtcctagttagcatgtgatgccatgctgactgatgttttctgtttgtctgtttattcagttaaaataaatatcgtagagacacattttctttagtctattttctgggtacatgctttgtaaacagacagaaataggttctaatcccatctctgccacttaccattatagttaggccatcctgacccagtaatttgcatattaacttattacttgggaatacttattctgacaaaatatgtgtatgtgagaggacagttatgtgaaatgaaatatacaaaagatttgtgatatatgttccttaacttgacccaacctcatataacttgacctatccttctccaaatagactaagaaccaaaatctgttatccaagtaaattaggaaatatgtggccaggcacggtggctcatgcctgtaatcccaacacttctgggaggctgaggcaggaggatcacttaaggccgggagttggagaccaaccctggcaacatagtgagatcctgtcactacaaaaaaattagaataaaaaataaggccagcatggtggcacacacctgtagtcccagttgaagtgagataatcatttgagcctgagaggtggaggctgcagtgagccgtggtcacgccattgcactccagcctgggcaatgagtgcaatgagtgcaaatgagagcgagaacctgtctcaaaagaaaaaaaatatatatggtcacagagtaatgtgctgcttttatgtcctctatgattttgaaatatttaccctgggatagtgatttcttcttatagctccaatcatgtttttgaatatgaaagaatcattgtattttaaaaagatagccagtagattttatttttaaatctgtttctaaatatccaaagactccagtgattcattaaaatacttttgtttccctaggaaaaaaagtttccacatatgcacggtaatcatttggcattttgtaggcttaagccttggggagttagtggtatttggctcctgacatggaagtctttctcttgtcagacaaatccttcccctgcacattcctgctgaaaaatttgttgctgttgtgcctaatggcaagcagtgtggtggttggatatggtctgtactgcccaagcgaactctccacattgatactttaacctctttgtgagttagctttaactttataactattaacccatttattgtttcatcttactccagagtcattttaccgagggaaaaattgtcataactatgtagtggtgaagagacataaatgtgcatttaagaaaaacaacaacttgtagtctttaaaatccctttagatgactttatttttgttaaaatttctgcagggtcttcgaagaaaaacataaatatttctgagaaatctggatatttttaggaagtgattgtgcattttgagaaaaataccaattagattacattgtgaccttcaatcaggaaatcttggttctgatgatttgatatttagtctcgatgttttgaattttatatattattcccaagaaagaatgtaacaccaggaaaatttcactgaaggagcaaacaccaagtgaatacagaatgtggcagaagtgcttatgagcaaaatacttagttaaaaaaaaaaaaaaagcagagctggacgcagtggctcatgcctgtaatcccagcactttgggaggctgaggcgggtaaatcacctgaggtcaggagtttgagagcagcctggccaacatagtgaaaccccgtctctacgaaaaatacaaaaaattagctgggcatcgtggcaggcacctgtaatcccagcttctagggaggctgaggcaggagaatcacttgaacctgggaggcggaggttgcagtgagccaagatcacaccattgcactccagcctgggcaacaagagcaaaagtccatctcaaaaaataaaaattaaaaaaagcaataaattgatttacagtcaacagaacacagacattagaaagtagttgaggcaccagagtctatggagaatgaaattaagatgggatgaaaggcagcatttgaatccattgctgtttaaatgctgtatttctgttttcctcatgatcgcacttaatgttaaaaacaagtatgcaaattcaaccttggcacattagtgagttatcaggccatttggatactttgagattcttattttaaccagtactgttgattgtgaggctatgtctgtgtatgtgagtgtgtgtgtgcttgtgtgtgttgtaaacgtaaatatttaaattggttcattataatctgtgaaaattaacctaactttatctgaaaaaaaattgcaagtggcaacggtagacattcttgtgtcctgcctatgggtagatagaagcttttttcattttatttgtttgatagttttctagcaaatttatttaattagtaaaagaatcgagagagataaaaagaaaaaagaaagtatataatcattacaaaaaattttatttaattagaggaatcagtataaatattttaaagaaccatatatatttgctatatcaaaaaggaatatttcagtatacatatttatgtaaatatagatatattacatatatgaaataaaaagaatataaagaatacatacaatgagagaattctttttctaaaataaactgatgacagatattttaatgcaggggcagcttttgcttactatttcccattgcatattgaaaaatataatttttaggttagtttatttctatccaaccattgaaaaattggtaggaaaagtaacacaatattatgaagcatttagaaaactgtgaaatcttaaatcaattgaaattctatagtttaaatacaatagtttaatggattttaaaatatcgattttaaaattgatattttatgattgctactattgataagaatactatttgacgtttgtatcaggattcatggccttcaaatcctttacatatatataacttcaattttatttcatctaagaattaattgctgtcaattaaggataaaataaaactttgactttatttggattgttaatgtagccaggctcttctatttaaagaatgaatgttacaattaaacaaataaagcatttatatgcaaagccccactctcacaaactgatgctgagctggacattaacagaaaaaagaaattagtttcacggataagaatgaacacttgtggacaatgatgccaccatgtagataggttttagggtttttttttttcatagaaaaacagagctgctttctaatgtgcccgaatattcagcagagagtgtgtgcatatggttaaaacaatacatgttttaggtaaatacacatgcacccgaagaagcagcactgtgatttgactaataaatcataatattcatttaattttttaatggaatttaaaactaggaatagttttagaggttatttagttcgattccctcattttacacataccatatgtttctatggtgtttatactattgaagttaaatataaacatgttcaaatctgtgcagaggtagattatgagaaataaaagcaatcatctattcatcagcaaggcacattcacttacaaagtatgaattatctattcatcaacaaatcataaccatactgatacgaattttaaataaaagcaaaacacatatttataaataaccatcctgaaacgataactagaagttcatagtatttctgaatatttcagtactcaccttatacaagaacaacatattcactgctaggggaaagggaccaatttattgaatggtgcatttataatttgaagctatagatattgaagctagtaattacattagaaatatagagtctggggtatgtattttgctaacatttgaaaaattactgggtattctggagtgatttatctatttctactcacattcattttccagcatgcgtttttttcaaagtaaaaaaaaaaaaaaggtatgatcaaggatcaggttttgcagacataaagatgacagagaaagctcatttcgtcactagaataatacatttcatatctttagcattatctccttatatgtaattcgcattgaagttgataataaatggaatatgtgctcagtgaaaaatgtttggaaatactgaaaagcagaaataagaaaatgacaattaactataaacgtattacacagaaaaacaatacaaaatacatttttgtaatttttttactctagatatccctccctgcctttccccaccaaatgtatgcacacgcatatctatatgctagatatccctccctgccattcctcagaacatatatatgcacacacatgtctatacctgtatgtttttcttatgcattctgactctgcagcttacatgatttgtgacttttggcaagtaacttaatttttctgtgctttagctttttaatctttacaatatggatagtattaatagccatgttatagaattgtaaagattaagtgaggtgataaatataaagttttagaaacatgtctgaaataatgtatattattattagaattatatttttaaacattttaaattaacaaatctttctcatttttaattgaaagattaacccactactagtattttgtaatattttcactaagccataatgaaatcttttcccctcatgataatggtggtaaacggaacatctaaaaaatatgttccatgcaaaatgcatcttcacacagacttattttgccattttagtttgatttttgaagacatgagttcagcacatctgccaaatccttttataagatgctacattcctgtttttattttagtttattttatttatgaaaagttcttttcttctccactccacccccagacagtcattcctctctgtcctaaaccataacactgctgtacattgcatttttaaaaataaaccaaaactgggaagaaaaactttttaaaaaagtaattctcctgttggcctagctagatgaaaaaacaaaaagcaaaacaaaaacaaaagcaaaaacaaaatcttgtattgaaaatatactatttgataatgggcttttatgttcgtttgccaaatgtagaatcacagagtttttgttgtattttttttagtgtgggaaggaggcaactggtttggggaggaaaaagatggagtaaaacagatgaagaagaatcagtttgcaaacatatgttaatatttagattctttttttaaaaaagtgaaaacttaactagtgaatgcttttctacaaactgtctttgatactgtgttttgtttattccatcccagaagaagttagcggtattcagcaagatgcaggactctctggaagtcacccttcccagcaaacaagaggaggaggatgaggaggaggaggaggaggagaaagaccagcctgccgagatggagtaccttaactctcgctgtgtccttttcacttatttccagggagacattgggtcagtagtggatgaacacttctcaagagctttgggccaagccatcaccctccatccagaatctgccatttcaaaaagcaagatggggctaacccccctatggcgaggtaagaattcaaaagcagatgttctccagggcactgtctttgtttcgcaactgcctgtaccaggttccagctggagacttgcccctgaggatggatatccacttgctttttaatatttaaggacagtgaggaatttctttcagacaaacagctggatcggttttgtcacatgtggaatgtagggttggaaaggatgcagtcacaccccttaaattcctcatggaaagtagtgatacaaccggcttgagtttatagtggctgcactgagctgcgaagtaccattcctaaagccccagtggcccaatttggatctctaaataataggcgtgtctaaatcagcttttaaaaaattagctcttgctcattccaataggtgctatgtggtgacataccagagacctgagtctgacccaggaatacagacattgaaagctgtctgtgttctttgaataggcttctttatcctgatttgttattgtattaactctttatagtatacactctaggcattttggcagcatccacatggcttaaactagtgtttttaccttgataaagaaagagcagcacattggactcctttatttctctctgtatcgagctcacagagatgtgtttgaaactgatttctgactcatagaaaattattggtgacatctaaatcagggtaattacagggttagataaaaacataatacgtcattccaatgacagcttcagagaaatttgctacagtggtgatttcttccaaattcacctggttataggaatgatctagtaaaatggttctcgaggtgtgattttcctgaccaggaacatcagtgccacatgggagcttgttagaagtgcgaattcttgggctccaccccagacctgcagaatcagaagctctggggtggggcaatctgtgttttaaccagccctcccagtgactccagtgcagagtttgataatcattgatctagtcctgttaaggacagtttgcaggacccccttatctcgaatctattgaactagaatcttcataggaaggtgtgggaatcacactttaacaagggctctgggtaattcctatcatgaggaaaagctggctacctgtgggcagggccaggtgagcagtgagcagtgactagtggtaccttctgggcagcacaggaatggttctgctctactgtagaagtcctggccacatggaattgctgggcctgatcttttcttacctacttgacctttcttttcttctctccctccctcccttcttaccctctctccttccttccctccctgtttgcctcttctcctctcctctccttcttttttttctttgcttctttacttttctttttagtaaatataaacaacactaaacagtgactataaaggggaaggtggaatacaaataaaatatccaaggccttgatggaaatgaactgaaaaacatactagttatttgattagtaaataatatgggcttactatgagaactgagacttagtccttggaagcctatgatgcttatgtaatagactaatgtcctatttaacaggacgtgatgaataattttaataatttgtagaggaagaaaataggaaaacattagtgagttagatggctttaataaataatttgatatatcaataatgaatcctattaagataatcagtgccaggagagtaataaatataatgtctacttcttttagcacatgggcatatgcaaccttgctatcatttaaactgaaaaatcagaattaatgtcccaaattatttcttggtgtgagagtgattgtctatagaatcatattcaaaataatttttagtgggatgttgtgaatgtgcagaaaccctacaacacatcagcattttctctgtaatttgcaaaacacattacacaagttcctttagcagatgttaaactgtagcatagaaagggttaataaaggcaatgttttcataactactactaaagttttcttggaactatcttaaatttgatcttcaaatatgtctcctgttttattcattgacatattcagcaaacatttattaacctcctgctatgtgttaggcaatgtgctaagtcctgagacagcccaaggctctaccctcatggagcttttagggtagaaacaggaaacaaacaattgttacaaaatatgttattttacataaggtgataacaaaagccctgtgtggcacagttatgtttgagcagatagctgaaggaaataagaatactcatcatgtggttacctaggggaaagtaattctacacagaagggacagatagtgcaaaggccctgaagatggactgagcttagaatattcaatgagaagcaaagatgctggtgtgaggtgaatgaaatgcaaagtaataggtggagaacagatgctttagaactttttttttttgagatggagtttcgctcttgtcacccaggctggagtgcagtggtgcgatctcggctcactgcaacctccgcctccccagttccagcgattctcctgcctcagcctcctgagtagctgggattacagggaccctccaccatgcccagctaatttttgtatttttttggtagagacggggtttcaccatgttggccaggctggtcttgaactcctgacctcaggtgatctgcccgcctcggcctcccaaagtgctcggagccacacttacagatgtgagccaccgcgccccactgttttagagctttttacatcagtttatcagcatataccaggagcacacagcatgcgcttcaattttcatctcctattatcccactaagtctacaaataccatatcttcttatggtgcctcattttttctgatgctcacaacaatgtgtttctatgtggaaaatctgaaatagatatgcattgaatgattaagtgactgaattaaatgaaccaatttcataccatgtatccggaattagaaaacaagagtctttaatagaaaatttcttggtaataagttatatgaactctttgggtacagttttttttaatttataaaataagggggttaaattaaataattggtaaaaatattttcttctgtaaagttctgtaatttcaaaggtattatttgcttttcttagatctttgtcataattgtcttaagttgtgaattagacagatttagataaatatataaaacttgtgtaggatttataggaaagccacaaacgataattaaaaatatagaaaatgtcttaaagaagaggttcaataaaatgagactcacatttttattctcataaaatgagagagttggtgacaatttaatattaattggcaaagctacacaggattggaaaatacagtctttggagtccatttgttttagattcatgttccagcctttaccttctggttgcaatgtgatcttggattactaaattgaaatctcttacatcaacttcctcaactgtaatatgtgtttattgatacccatctcatagagttattgtaaagatttttaaataatgtatatgaataatttagcatagagcttgactcaaggtgctaaatgaaagccagatgccttttctctcttccttaagtaagtttccactcatttgacacatagaaaacaaaccctgagcctttatccaggaacattgttttctggaactttgtgtttttggtacaaaacacacagtcttagataatagtagatactaaaggctaatgataatgttagtggccatggcaatgatgcttagaaaggaactgctgaccgagtattaaagggtctagtttacagcataaagttattacagtgccacagaagtgctaccatgctacaaacaaatttaataactgaatcgtgtttgactaagaatatatttacacggtaaatctttagacaaagaatagtgtgtcagctaataatgaaagaatggttatactttgaatgtatatctccttcatgaagctaggtaagtttttttaggtgtttttcagctgtaaggcaaacaatgataggaagtatatgtattttacttggcacaatgtcttatcagttacctctaatcctgctatatattctaacagggttgaaagaatttcatttctttccattaagaaaacctaactagctgggcgtggtggctcatgcctgtaatctcagcactttgggaggccgcggccgggcagttcacctgaggtcaggagttcgagaccagcctaggcaacattgtgaaaccccatctctactaaaaacacaaaaaattagccaggcaaggtgacagccacctgtaatctcagctacttaggagactgagacaggagaatcgcttgaacccgggaggtggaggttgcagtgagtcgagattatgccattgtactccagcctgtgtgacagagtgagactctatctaaaaaaaaaaaaaaataacaaacctaatgaatatgattggtcccttatctccatacaaatatatgtttcttgatacccttctcctagagttattataaagattttaaaaataatctatatgattaatttagcacagcgctaaacattggtttcaaatatgcctatgcactgatctttacagaaatgagtctgtgtgtatctgtagaaaagggcaggagctatgtcaagccatagcagagtaaatcactgacttaaaaccatacagaatgctaatcttactgatattgcagttgcaaagaaaatcatctgttggctcattgatgtacatagggtctgcttgggcaattcattctcatgggaaaaagctctcaaaataaatacgaaacctaaatagtcaaatggagaaaggaaaaggagggcctgtctgatgagctggctgatactggaaatgaacagaatgtccataggaccaagacatggggaaaaaagtgaggcgtgactaatctcaccctgctgcctccaaggagtatcggcctctgacatcatcccttgaaactctcattgtagagtcacaaggcccattttgagcaactctagaagaaagtaactagaaggcaatctttggacataatggtaatgcataattactgaatgacagaaaacactggaacacatgtcatttcacttctgacccagccatttatttttatgggaagaacaacaagagaatggcaatgaaattacagcaagaacactttagcttaagaattgagtagaattttgttttttaactgatattaataaaaaatgtaaaaatgttaccttttagcatttaataatcatattttaatcaatattgattctaatgtgttttctggaaatttttaagatgacttagagtttctataacacttcattgtcccattttccttttaatttagtttttgttattttcaaaattaataagctgtatcattctttaaattttgaatcttatctttcttaaattttttactcggagattttaaaaaatttttttggaggtaatgtgtgtgtgtgtgtgttttttttaagagacatttacaatcagtgtaaaaagtatcccactattgtgaaattgaaagaaatacctggtataccatgttgcagtctaaatcagatagtgagattactgggtttgcttttagtggattttattagacaatgtatcaatattatcattttcttttttgtctagaaataaactcgtgtgtatgtatgtgtgagtaatatttttaaccccaaatgaaaattgaaccaaaattacagttgggcattttgtatgtgttagactgtcagtgtcaacatcatccaaatattggttaacatcacctgtataccaggtaatattgaatccaaactcaccatatagtgttaatagcataaagtattgtattttcttcactcacctgaaatgtaatattgcatagaaatagcccatgcagtttttcatatgtcttcttcatccaacaaatgtggctgtgattaagtactcataagcaaagaatcatgtaatgaaaaaaatttacatacatatgaaataagcacactggttctcaggcatgaaacaaagcatatcatctcttcctttgcatcaagacttttttttcttaaacaagcaagacaccgaatagtgattttgaagtataaacttcttcataaacatattttcaactcaatattgtttcaattgtaaatgtaacaggttttttttaaagggctgcatagatctttgcaaactttatattcatctcaagagacatattgactgggaaaatattaagttccttttaattttatttttccctggagcattttaaaactttgttcaatctttatggagtgcattttcaaaaatagatttctactttcagtaataatgtcttcactaatcatggtacagtacttcataaatagaccaataatatttttgataaataattgattcattattcccatttgcgcatgcatattcaaactgcataagcatctataaaataagattggctccatgtacatataaatgagactaaaagcatacagagaaatggtatatactctccgtacttttgacatcttaatggtggattttaataaggggaattctatatctctggcacgtacttgtggttggggctcaacggttttcataataggattctagcccctcgggagatggaagttaggagcagaatgaaggctttggtcccaaagatgggagttgtgagagcaaagtggcagatgtgtggtagcaaggatgaactatgtagaataaggagcctctctaaactctctgtatgggttttaagctttaaacattgatggctttcattgtgggtatgacagaaatattttacaaatgaccatcacctaaggcaaattgaattttcttcttacaacttacacgactttccttcttgtcattaatagtatttttcatatgttgcaaagagacgattgttaattcaagaaaacatagttacctcaatgtcagtaaggctgattataggtggtatttttggatagattgtgattttaacaaagtcattcaattaaaagtttcctgaggttgtttgaagacttaaagtgtgcagttccattctttgccttttgaagaacaccatttcctagatttccccaagtgttttgagatcgatggagatgttgtgagagagggaattgactgtgaatagctgtgtgaccacaggatgaatgggatgaatggtcatgatcatagctctggtgcccagctgaaggggagagaatagaagagcttgcagtgctgctgccacagcctttaggggagaggaaatgttcacacaccacagtaatgccgaattatgttaaccaaatgatatatgtggtggttgactgaagttttttaagctttccctgaggcaagaaaactatggcctgatatttatagagagaacatagataatgtcagagttttgaatattcttattttaaaatacttcttaagatatcctccattcatacccttcattcaatggaaagatctagcaaggttcttttatgtggaactcagtataaaaatactctcttaaactcacatgactaacatctttagaaaatgtcttcttctgtaaataaaaataatccatagggcacttcacagactgttagcagtattaagccgtagataatttgaattaatgagttcaaatacttcattttcttagtgaaagaaagtaaaccatggaaagatcaatgggtccatattgggtgataaaatgagatagggtaagacctaggatcagagctgggctccttggtctcccagcccagtgcttgtttagttatacaacactgtaggcaacaggctacaggtggaggcactgatctttccacaaacggatttgactgtgtcacttactagattaaaacccttcaaagcccattgagaccctgccacctcagaatagaatttacattcagtaccatggccagcaagtctacacccatcttggtcctcatttcaatagtctcaatttttctgttgccaccttctgcctatggaactctttttgtctttcaaatgctgctgctgtcatatgtgtgtgtgtgtgtgtgtgtgtgtgtgtgtgtgtgtgcgtgtgtgtaatatatggccttttcttatgtgctgatccatttgcctaaagcttacttcccagggctagcccccactcagtctgtcagcttccacttatcactctctaagctgggtcggggctctctgtgcttcctgttgggagaatacctaccgtgtcaccttgcacatgtctgtttttacttatctatccttctgcagattgtgactaaaaatgatgtccatttggtcatccctgacgcctatgtttgatacatagtaggtcgtgtataaatgtgttattacgattgagtaggaaattgaactgatgaagagttaggggatcgttttctttcttattcgtctctaagtgctattctttgatatttccctctccccaaaatacttcctcaaacccatgacttctacttgaatttcctccactcatcatttccataggatcttcaccaaattcgagatgttgaggttcacagttacaattgcgccctcttgtggcactttatgaagaggcccagccattggccatttaggccacctggcttcaaagcctagtcccattcttgccatcttaagccttaggcttcttctctactgggattttctcatcatgggaataataacaataactaccccataggcctggaatgaaactcctatgagattatccatgaaaagcccctggaaaaatgttgggcatttgatactgtcattaaatattgaccatttttattctcggtctagagactcccagatctccacagaaaataaataaataaataaataaataaataaataaataaataaataaaatgaggttggaatacactcttcttaatggaaaatgagtgttagtgagtataagtaattgtaatcttacttccattgttaccttcggcattaaaatgtttcatttaaatgaaaattgtatttgcatttagaagttggtaaaaatgatcatgtccaacttatacaaacctcatttatggcataagatttctttaccagtgaagtgggtagatatgacctcctcttaggcctaatggctgcaaggtactcagaaggaaatgaaatttttcaatccccaaattgcaaaccttagcacagactgtgacggcataagccaagcaaagcaaatggagggaggctcatttaacactttggatcttgcacatggacccattggcttgcgagcccagaggccaacctggtatcaattcacccctgtttggggagaataagagtgcatgctaatttgactgcttgtaaaatattattggacaattagagtggacaattagaggcaagtctatcccaaaactgagtcttatgttaataatgttttttattttctgtcttctcagacagctcagctctctcaagccagcggaatagtttcccaacttccttttggaccagctcttaccagcccccacctgcaccttgtttggggggagttcatcctgacttccaggtcactggaccccctggcaccttttctgcagctgatcccagtccttggccgggacacaacctgcatcagactggcccagcccctccccctgctgtgtctgagtcctggccttatcctttgacatctcaggtgagcccatcctacagccatatgcatgacgtgtacatgcggcaccaccaccctcatgcccacatgcaccaccgccaccgccaccatcatcaccatcaccaccctcctgctggctctgccctggatccatcctatgggcctctgctgatgccttcagtgcatgcggccaggattcctgctccccagtgtgacatcacaaagacagaaccaactacagtcacctctgctacctcagcatgggctggagcctttcatggaacagtagacatagtgcccagcgtgggattcgatacaggtaagctgctggatttctttcttcctataacaagataaagttaatttaagaaagggtggaaatttgttttgaaattattttttcttatctgtaaagttaaactttaccaacatgtttatggaacctagccattttgcaataatttctgcattcctgcagaaactggtatgactagctcatgaaatccagcctgagaaaggtctcagagcttttctctcatatcttaggttagtagtctgttcctttgaaatggaatctctggtaccttctgtttaaaaagaaatgagcccattatttaaatctcccatgtctctgagcattataccatgtgtcaggcctaacagaattcagaaatggtgcacttcagtaatttttctttcctttctttttttgttaggccttatgtatgacttataaaaactggtttctgaaatatagtctatagtgtagccttttgaacaagaattagggaacatattttaaaagaatgatttttttcttcattttcttcctcctctcccctcctctgccctccgttccctgactttatcctcctttgcctttccttcttttctcttattcctcctcctttgttcctctcctctctccctgtctctgatttaaataatacaagacttaaaagactactataaaatttatattcaacagatttagaaactaatagtaaggaaatgatttcttcacagagcattcatctcctgtctggaattcaatagttctgaaggttctgtgtcaaatgtctgagcttgatttttggaccagactggtcatattaatagtattcatagttctgagctcatgaaatcataggcatcagagcccaaaacgacaaattgatcattgtatccctggagtccaaagtagtgggtcccaggttcttttgctagaacattttgtggcacattggaactctctttccaaaagcttaaagaaattctttccttccttagcttttctgtagtgtggagaacccttaatcatgtgctggttcacaacaaataattccccagagtcataaatgctcagctttattttacctctcccgtgacatgagtggaacgttcttattttggttaacttttctccactgagctttccattgttgatcattgccccatctaacacatttcagcttcctattgagactgggttcaagctgcttttctaaacaaagtatcaggggacttggtaatccctctgcagatgcgtgtgtgatggcacagcaggcacaggcttcccttctttctttgccacatactaacaaaataaagacaacttgggagtcatttgatgcctgaggccagatcttattagagttcccaatttggcagctgccttcatggacagcaggtctcaggaggctcttctctgttttatgtggtacttatgtggcaacagcaacaatgctcttagcaggcaaagggcgtgttcttccctctatgaattctaccaataaggggggaaatggatgtgattattgctctttcattttgagagcctacttttgtacttgttcactttggtgtgagcttgattcactcacttgttacagaatttcagcttgaaataatctcatcaagatgaaaagccattctcacaccttttggaaatagacaagagggtttttgttccctggaaattcttgagaggacccagttggatatcatttataataactcttcatacttacagagctatgaatgagcatttattactcacaatataaggcattacctggggtactatatatatatatatatatatatatatatatatatatatatatatatatatacacacacacactattactttaagttcttaaactaaatctgagatagaccttgttagtttcatttatgaataagaaacctgaggctcagaaaactacttgcttaaattacattgttatgtgtccaagctgaagtttgaactaagacgtgtccctctctgagagattgctgggataacatctccttgtataagtaaatcagataaaattaggtgaattcaactattaaaatggttaatagtgaaagatgaaggttttcctattgcatgtgtggcatgctgccctttgtcagcatgggtttaggacagtaatcaagattcgtttcataaattttgacccaattgagaaaacaaaggaatcatgaaaataaagataaaattattagcataatcattgatcaggcagaattggagattctaggttagacttaatgccacagttagacctcctactgccttcagctaaatttagattctggaacatgcagttctggggaaaatctagagttcagagaagattcccgtagacaccttccttgttatacagcttagagctccgttactgtgaagagactgatgattgctcagatttgtctctgaaaaacgtaatccaaggcctaagccttgtgtgtgtccctacaaaaggcacaagcaggaggacaatgcaccatcatgcatcgaggctggcccgaaaaagagacagtgggaggggctgagccatatgtggtcattttattctgctaaactcagatataatgacaaatattacatctctctatctttgggaggagttagagaggggtgttgtacgtcaatttttctaggaaacagactctgagactcagatttgcttgtagacaatttatggggtaatgttctcagggcaacatctttggagaatgagagatttgggcagaagtctcactgatgaagtcaatagaggcctggattctacaaggagctctggagtgagatggttcttcataactgttctgcctggggtcaagggggttgggcttttacattcctgaattgaccagttagaagttgtgatctgcctctggtaaggggacatgatattgggccaggtgggtttgttcagctgaaggcaattcccaaagagagaagcaactgagagtcaggaattgccggcaacaagagaataaatgcctcggtcctaaagggagagggatctggttgcacaccacactgtcctctaaagagggacagcaaaggggtagtagctactgtaccacttttccaactccttttaaatgaacagaagtttctgcatagtaggaccaagctaggaaggggtagcagagcagttgagaacagtgaaagttgggtccctctgtgtaacctgtgccacattggcctgaacatacagccagaaacggtgactcagctgaaaactcagcatcgatattgggtgactactgagcagccaagagaagaaccttcatacagtcataaaacttctcaaagtccaggtgaccgggaccattaaaatataggtcattttcacatccattagaagataaatacattaaaccaactattttgagaagaagttggtaaaaacatgaaatttgctttctttcctttttttttttttcttttgatggagtctggctctgttgcccaggctggagtgcagtggcgcaatttcagctcaccgcaaccttcacttcctgggttcaagtgattctcctgcctcagcctcccgagtagctgggactacaggtgcatgccactatgcccggctaattttgtatttttagtagagatggggtttcactatgttggccaggctggtctcgaactcctgacctcatcatctgcccaccttggcctcccaaagtgctgggattacaggcgtgagccacttgcgccggcctaaaaacatgaaattttcattagtagagaaatgatgtcttagtgctttcaagctgttataataaaataccatacactgtgtagcttataaacaacagaaatttactgtcatagttttgaaggctgggaaatccaagatcaaggttctaaaagatttgatgtctggtaagggcctgttttctagatgcccatcttttcattgtaacttcatgtggtgaaacgggcaaagtaatcttcaggatctcttttataagggcactaatgccattcatgaggcctccaccctcataacctaattaccttctaaggctcgctttcttataccatcaccttgggggttaggatttcaacatctgaatttatttggaggggagtcataaacattcaattcattgcaaataatttaataattttaggttcattttttcactgtatctacttgaagaaattaagaaaaccttgaaatctagaaggttgaacgtcatataatgtgtagtgacaaacgaaagttttataatatcatgtatggcataatccaggggttagcaaaatttttctgtaaagaaacagataaaaatattttatgctttgccatgccatacaggtctctgttaccactacctaattctactctgctcatgtggtacagaaacagctatagacaaaacttatatgaagatagttgtgttccaataaaactttattggttggtgctgaaatttgagttttatatatttctcacgtgtcatcaaatgctactctgctttttttcttcttttcttccaaccactgaaaaattcactcctgcattcttaattcatgggtatacataaacaggtgatgctgaatttggcctgtgggtagttgctgaccctcagtatcatccctgtgtataatttttatcttctacacacattcatgcaggtgggtgcatgcactccctcaatgaaaattatcttgaagtgtatatcccaacttttaattgtagttactcctggagagttagtggacggcatgagctttgaagccagactgcctgattttgtcagcccagctctgccacttacaaaagaagcagactttggaccaatgactttaccctcctgctacttcaacttctttatctgtaaacaatgcctaataggattgttttgagattaaattagttcatgcagtaaagcatttacaaatataccaggcatataacatgtactctgtaaattctagctatgtaagagaagatggacagacttacactttatttaacttctaaaaatttattatttagatatatttcacaatagcatatgcttcaccagtttaataagtataactgattggtcttataatatattcacaatattgtgcaaccttctaattagagaacattccatcactgtaacaagaactcctattcctcttaggaataactcccaattttccctatccgctatgcctggcaaatattagtctactttctacttctgtggattttcttattttggaaatttcatacaaatggaattatatgatatgtggctttttgtgtcttttttcactttgtgtaatgttttcaagtttcatgcgtgttgtagcatctatcataaagtcattcttttttggggctaggtacgatttcattgggtggataataccacattttgtttatgcatttgatgcataagcaaatgaatatggacatttgatttgtttctacttttcggctaataggaataatactgtgatgaacactcatgtgcaaggttttgttttgttttgttttgagacagagtttcactcttatctcccaggctggagtgcaatggcgagatcttgactcactgcaacctctgcctcccgagttcaaccaattgtcctgcctcagccacctgagtagctggaattacaggcatctgccaccacgcccggctaattttttgtatttttagtagatagtcactattttgaatagtgaaggctggcttccctattttgaatagtgaaggctggcttccctattttgaatagtgaaggctggcttccctattttggccaggctggtctcaaactcctgacctcgtgatccacctgcctcggactcccaaggtgctgggattacaggtgtgagccactgtgtccagccctcatgtacaaatttttaagtaaatgtgtgtttaattctcttggaaatatatctaggagtagaactgtggggttaagagaacctcactttttattttatgtatttctatattttttgaatttttttcaaagagcatatatatgcaatttttaaaatatttaaatttaaatttttgttttttaaatttttttttagtatttaaattgttaagattcattacaacatattatagtagagtttgaggtttggtaggcaaaactgccataggaatgaagtaaggtggtccattttttccgaagggctgagtggtggtgaggacagtgaggtgcctctggcacaaaatttaaaaggatccatactgtgagggctgtgcaagtgtatgccaccccatattttgcacccagggctccttattcctctaacctctgtcttggtgttgctttgctgtcatgcgagctcactcttactttttgctccctctgttgaacaggtattacatacaggtaccttgaaatgatcagtatggtatgatcataagtcatttgtatttgccctccacgtgaaaaatgctcatctttaccaagaggctgttatcacaaatctcacattaggctttttccctttcctttatcagtctttaaactgagtttcatgggttccataggaaaaatactcagaatgtgataataagggcttaattgaaaaaagaaaagatctattatcaaatgaatttatttacattgcctaccatatacctcttagagatcacagttccctatagcatataaaatgttttatatattcttcagtaaaaaagcattttaaattgtgtttagcaggagattgtttcactctgcttttctgatgaacacattttttgagggtgtacttattaacttctcatttagctttgtcacttctgcataatagaagccatagttttcaacttttgtgaatgactttcaccttacattaagctgcgtgtaacctaggttaacaagggtagttggggccagagataacacctagaatagtacaatgaataagggagggtcacaggatgtggaggactgatttcagctatctcagagtattatactgggcccctttgtgtataaggaaggagagagttaaatgtggaaatatttgtgatcgtgtacaacatattaccaggcattcacgtgtgaatgcaagaatatgtctcctcttatcttcctcagattttttagtgataacattaagtaaattctgacatagtagtcctcttttagtggtcataatcattccgggcattttagtgaaatgttgtcattcttacttcctgttgttgccaataatttacctaatgtaagacatacaatcttgtacattccagccaagtttaaattaatttttcaagtgaagatttgttaataagggctttttactgaaatttaaacttgactttcataatttccacttcatccactttatttaaatgtaccaaaaacaaaagtagtcatgctttgtggtgtgacttctttataaacacaagctgctcatggcatgagattgtattcatctgtagatccacagatttatttttcttgggatccctcatgttattttagctacaattttgttataaatatctatttttactttgatgaatgtcacaacaatgcaatatacagtatacataaacaacttagaattgaggtattcatatactttttactacaatatatttaggtaacctaatattaaacaaacaaaacaacatcatatgcatatatatatatatatatatatatatatatatatcacaattacttttgcataacctaatatttcgcaggtccatgaaatctagagcttagagggagtaaacatatgttgatgtaccttttgcctctcaaaaaaactaggcattaatttgcgtaagtagccacctaatagtggattttatgagtgagtcattatatgagctggccccaaactgtgattatatccagatattaaacactatctggttcatctcttacttagcaagatacctttagatacaagtgaaatcaagactgtgtgtcacagacggggacaatggttatttgccagacagagggaacaaaactacaatagctactagtccacaaattacttgcaaagtacagactgagaagtttgccataagcacaggaagttgtttctagtattctctctgaacagactttcatagcaataaactttactctctaatctgtgaatgaagtttatctgttaagaaaactgaaaaaaattgtttgagggtctccattttgatattagataggaagagctgggtactacagaggaagtcaggagtagataaatgtcctaatctatgcttttctcttcatggacagcttgtgcctgatgatatcataaaaacagaatcacattaagtggtattccgaattatttatggtttaaggccagtaaactatatttaaaaacaacattctgatttaatctgaatattctgtgaaagggacattattcacaagtgacaaaaattatattttaatgggtttaagttctcaaaattgttatatactattcactttggaacatactaattaaactaccttagtgtttaagattatgacggttggcactacaatgatgctttataatgaaatctattaattaaaaacataaatatcttggttttgttaggtacaggcaatacaaaaaaccgggtgagaatagcgaatatactagagaagcaaatggagaggcagtttctctccatgaaagagagatagatctatttaattcttacttttccattccacctgtaaatttgccaaaacttaactcacatctcaagacctatgatttcttttaggtggtctggtgctaacccacctgggtaaaaatcactagttgcaggaaagttctacaaataaccttgctaaataacacactttaaaagttagttacgatatgttaatttcattggggtactaatgttattaaaattatggagctttatacccagtaacatctacaatacccagttacatttacaaaaaggactaaaggaaacctagatttacaactcaagacccttgaatatttactaaatataataatgctccaattccaggctttacaatgaaatggagatgaatcattagcctcaataataaacagaatagtttgatttatgttaaaatattaaagcactgtgatatttttcaccctaaagatgagagggcatcaaaatatcatatattgtagatgctcaactaaaaatagtttacttccttctacttcacttcttctcagggagcatacattagccatctgaattctgagggctatggcattagggattcattgaagcctttcctgacaatattagtaatctgtataaatgattaggaagttatgaagatgtttaaaaatggtattaaaaatataataggcataaaagtttacttataatcatttgatctcagtatgtaggcaggtaaaatgacagttctatatggaagccagccctaggactatatgatttttttccatctcattattatgattcaagaaagatttatagaattttgtgtacctaccttgagggcattatctcagctaggatagttagaacatcataaagcaataggtgcagattgtttttaaaaataccaggcagaatgtttatgaataatggaaatactttttctggactttgttgtcattattgagtttatgatgatttggtaacaataaaaatttttctaatcaacacccgattgcttcacactttctacaaaactttttctttttctctggcatatgtcataagcctattttccactgaggaaaaaaacatcagagttatgttaaaatatttacaaactcttgattggtgttagttgtgtagggcacgtgtccagaatgacaatttcatgaccagaagggtaatggaaaccatctttgagatgcatgcaaaatgccaggagatcccagcctgtgagatctgcatgaaaagtaactggatgatgaataagaggggagaaatgcattccagagcattgctgtcagtttcaagtattcaagcctggatgctgcaggaccttaatgaaattcccctgctctctgagatccatgtagctatcatgcccatgggcttctgtgggctttcctccataaaatggtgccataatgtcacaatgcctaaagtatggggatttgcctcagattcttctcctacttggtggaacaggtgcaggagctttgtaaaggtgttatgttttaggatgtgcttgcataataatacaaatagttacgtggtgtaaatttgaatcattgtaaaagacgtcttggtaagagaaactgccatttctcatatattgctggtagaaaattagagttttagtattttaaagaagtagactggaaaatgtagtaacagtaataattttcataaactttggctgagcattcttactcctatgagtctacctcccataaatagaagcagcagcatatgatatgtgtacaaaaatgtttattgtgacaatgtttgcagtaacaaaaaaaaaatggaattgagcgattaccatcaagaggtgggatctatgagtgaattgtgttccatatggtattgctgactgaaaaagaaaagctcaagaaaagcacatatatgtcttttttggaaaataataacaaaaaagtgtgcatatttgtctgtatcgtatgtgcacgtacatatcattcaatgaaagcagagaagactagtttgtcaaaatgtgttttcttttggggctgcaggtattgaggtcactaataggagtttgaggaggaaagaaggagaaggactttagaagaagaatatatatacatgtttatttatgtacatatttgtatgtatgcattgaaagagagagagaggcagacagggaaaaaaagaaaagagatatattaattttattagtaatttattaccccctcccaaattcacttaggggctcataaaaatcctggtcaatgtaggcatctttaatatttgcagagatgtagaaattctgtccagatatatgtagggaaaaatgggactgaaacacagattctgcatacatatcaccacttattagctgcattacgttgagtaagcctgtaacccctcagctcctcctcttccttagatgcaaaatggagaggacacttcctcccctgacacagctgggagaacccaatgagcttgtgttttctagacggtgatacatgatacagaatgaaaactctcatggttctgaatctgagatatggttcattacgacaaaaaattaattcacattggaggtttgaggcatcctgaagaattgaggtgcaagctgtgaatgcatctgtcatttttattttgtctgtgtctgacttaattatttcctgttcttgaagattagctgtgatacttgttacagttaagtttcctgatagtagtgtttgctgatattggccgtgcagtgaaaactaggtgcttttgtattgattgggcagacaatggaaaagaagataaaaatattgcggggttaacatcttcaagacatttttatacatttgaacattttccctatctagaataccctgccacgtggaatgagagggtactaaaaataaaaacctatcccattatgcttacgtattgttgagatatttattcatccctggcactcatataaaacaaaaaaaattttaagtacaaaaaaggaagttagactatgaattaggctcaacaaaacttcaataataaatgctaatccttaaaagttgcaaatctaatcagtttcttttaatcttagcattaattttatgaaggagttttaaagctcctttgccatataaattactacgtaaattggagagcatccctcgttatcttaagtattttctttctttttttttttttttttttttgggacggtgggacggagtctcgctctgtcgcccaggctggagtgcagtggcgcgatctcggctcactgcaagctccgcttcccgggttcaggccattctcctgcctcagcctcctgagtagctgggactacaggcgccgccaacatgcccggctaattttttgtatttttagtaaagaccgggtttcaccgtgctagccaggatgatctcgatctcctgacctcgtgatccgcccgcctcggcctccaaaagtgctgggattacaggcgtgagccactgcgccaggccaagtattttcttaaaaactgcaagcaagattaggcaatgccatcatcttttgagagttttcttaaaggagttgtcatcaactagctgcggttggaaggtggagactttttcaaagtaaaacttgtcttcccaaaagaaactgatgtgctcactcactatagaaggaagccataactcgcaggttgtcctgatatgactctcaatagagaacgacacaaagcattggaaagcctgtttcagtggtcaggttcttatcagcaaataatactttcagctttgctgtttctcatctgtcatataggggtgcatctaaaggaacagctcaaatgaagaaatctgtttcagaacttgttccctgacaattttatatccgttttcgaacagtctgcaaagattatatagaaaaattctatatggcctgaggaatttacagatactgtttattccctttcaggctgcctaactattcttttcttgttctctttatcagtaatataaggtttcacaaacagttgtctgcaggcaacatgttctgaatttcttggcaaaaaggactgatgagaagcaaaatatgctaggtattttttatttttgggttacagtctgatatgctggggacttaattcataatttttttaacacaagtatgtgttatagtgtttattttcatgcctggtctacttgagcactattaggtgatgcttagcatcttcataatcattgaagccctatttatgtttacttgaattggacagtctcttttggaaaatgtcagagagcgagcttctgttcatgtcacataaaagtgagatgaggccaggcacggtggttcacacctgtaatcccaacactttgggaggccaaggtgggtggatcacctgaggtcaggagtttgagaccagcctggacaacatggtgaaactccgtctgtactaaaaatacaaaaaattagccaggcggggtggcacacacctgtaattccagctactggggaggctgaggcatgagaatcgcttgaacccaggaggcagaggttgcagtgagccgagatggtaccattgcactccagcctccagcctgggtgacagagtgagacttcgtctcaaaaaaaaaaaaaaaaaaaagagagagagagagagatgaaaagtttctgatgtcaatgcaagaattgatatatatgcaacatatctcattctaatggaatgctttccaatatatcttgcattaatagagagattgattacttatatcaaataggcattaaaatgcaagtatatttcagcagtttctaagcgtcttttgaaaattttggagtagtaaatgttataagtcatactcctaggtatcatgtttcctatgttggtgttatgtccttaattactttttttttgggtaggaaatggatccagattagctctttctttgattggattatctgttttctggactgtaaagctgtcactgcataacctagaaacctctttaaagatgcatgtttggctacatttgttatccaacagatgtctggatagttagaatctcttgagactattataacttgtggttttggttacaataagtgatccaagcttttttttttttggttttgctcctctccagttctgggagaaagcctgtagaagaaattacaaagagtattccatttcattttccccactcccttcttcctttcctttattctttgtctccggcttcaaagtttctttatatctgcttttgaaattgaagtcaccgaattggtaagcagtgtctaaattccatatcgttccatatagtccccagcttctatcacccaagaggttattggccaccttgacattcaaattttgagactggtaaattgccactatgataaaaaaaactacctaactctatgattcatgttttttatatatgtccacaaggtcagtttttaaacaactggttcagatttgtaactttatatcctgatgctttaagtacttgccaatttaccctccagctatgcattttaatatgcacatgtctgaggaagtggatgtcgctaaaggcaaaggctagagattctgtgcacaggagagtttgtggtttttggagggaggtgggtactgagagagcaaacagaataaagtggcttgctgtctgggtctgggaaacaccagcaagtagaaacacctgggtggctgaacttttctcacctgcaatgtttccctcaggtgagcaggtgctgtacttcttaaaataacatagtggattatggttttctagtaacatcagcttcagtgggttttacatttctgccctattttgaatctgagcttaaagacattttgacaagttcagacagtttttaacctcattgtttctgacaatactactacgtggagattttaagtgaattctaaatgtgcctggagaaaatacctctataaacagaaaacctcctttgccagaaaattattatgctgccatgctaggtatcttttgtaatgattttagtgtgcaagaattgtaattataagagaataattgcacttaaaatataataaatttaatctttggtctggtttaagaaaatacaccttatttgtgattactttaaaaagaattattgttcaaaatttgcatattaaatatggagagaagtcatcaaactagcaaaagtatttgtaatacatgggaagaaatgctagtatacctaaaagtatactaaatgctagtatacaaaaagcatttaaaaatcaactagaaaattactttttaaaaagcataaacatgtggccagagttaaaacacagaggaataaatgccataatcggacaatatccagcctcactaacagtgaaagaaactaacattgaaacaactagatacttttaatctataatattgatcataaataggaaaaatatataaatatgggtacaaacttcctaaacacatttagccaccacaattaaatatgtaaatgtaaatgttcatatgcttggattcagcaattatacacatgtatatttttctaagaaatgtaactcgtaaatattcacacaagtaacagcaactttgtacacccgtgtgtgtgtgtgtgtgtgtctatctaaaagatgtacatctatagagaattgggtaatagtatactatagaataaatattgtgcagccctccaaaaggatggggtcgagctacacatacagacctggaatggttttccaagataatactgctgatgaaataggcaagtggtatgtgtatatatgtagattgggtacacttagcaaattgtctgatgataggtgatattatgtaggctttttactttctaaacactatgtaacttgatttttaagcaagaattccatgatgttttaagagttttaaaaatgttttaaaatgtagcgcctatatattaatcttgatattcacctgaaatgaaatcacagttctcagattgagtagccttctctcttacatttttctcttgcaagtgttaaggtcctacccctacacagatcttatttagaaattcttcactagtatttaaagtgattgcctcagggctcagacaaacaaatgcaattgtatgatcattaacagtgataatttcataaagtaatagaaaatagtatgactgtctctcgcacctttttgtgatcatatgtcaatgtgtcagtgttagctgtcaatttgctggtgaagtttggatattttgatgtagcatctgacacagtgttgtatgtatttaactttgtaataagtatttcttatctttattaaaggatggatgaaaggggagatctattttttaaatatagaaatgttaccaggttcttatagtctaatagtaagcattctaatccacatggcttcttgacttttaatatgtatgaaatgaaaagtttacacttacccatacaaatgctatctttacttttaggtcttcaaagtttctacacacactttcaggctttatgttcctatttatgttctctttttttaatcaacagcatgtttcccattgtatggttacctcttttatctcccgcaataaaattaattgaaagcatattcaacttacttaaaagagccatgatcagtggtgttgttaaatgactatactttctcagaagtagagcatgtttatttagtgggttatgactctgacaaacaaacagtacctaaaactcagctgtatattagtgtaacgttttttgttacccaatgtttatttattatttctatctaatggtagaagacttaccctcatcaattatgtttattcttagttcaatccactggcagctccgttattctcagtttaaaacaaaatcccatttgagttgaaaggtcttctcagattctttcctcatttttttccttggggttgcctctgttcctagaaagttattcacgtccaagttaaaaactgtccagttgataagttgttgtctgctttttggttctgtcttttcattcttatcctggactgctgtttccaatataccctcctcctctaatctgtttctccaggcattctctatacaatattctttctaatgttctttctaataatggcctactcaacatggcctatttgaattcagttcccagtgtttgtgatccctgcaagacgctcatctggggtggcccatgctatttcttctgctgtgggatacccacatcacagctaatactgacaggaccccagaattctcactgaactgtctcctatatcaattatggggaacataggcgagctttaagattttttgggggggataaaacagggtttgaggtaaactaaagaggggggagtctctaggctgttcatgctcagacctaccatgttgccatttctattttcttatttctatagcattttacaagaggtagatctgtgaagctgctgcctccctgaatctcagttagaaaatgagtcataatgccttcttatgtacagtcagtgctatgatctgaatcactacatctctcccaaattcatatgttgaaatcttagcccccaggtactggtattagaaggctggccctttgggaggtgattaggtcatgagggcagagctttcatgaatgtaaatcaatgcccttataaaagagatctgagagagatctcaggtgatcacacagtagaaggcactctctgtgaaccagaaaacttgatcttagatttcccagccttcagaactctggtaaataagatttggttattgataagctatctagtttatgatattttggtatagcagcccaaacgaactaagactgtttagaatcttcaagtttttaaggaaaatcatattctcatcctcttccttgaccaagacttctcacttacccatatgcaaaggttttttgttgctgttgtttttctgttttgttgttgtggtgggtgtctttttttttatgtttttatttcctttactctcatcctggctctgaatattgtttttccttttcttttggtggtcaggcagtagtggtgttggcattgaagtaaggaaatgggtctaaggactctcagtttctttcaggcttttgtcctaactgaatttcaaactcaaactctggagtaaacaattgaaatctttgtttcttcgttcatttctgacaaccgcctcaagaggcaattgaccaccctatgtttttaaagttcacactggagaagtccggcagggggtgtggtggttaatttaaagatacatatagagagacacatcagttaaatatgacacatcctatcataccactgaagtggtcttcatcaaaagtgtaacctactactatgccatcatttatgtcatcttgggaaaaatgtgacaaatggagaatttttaaaaaatccctgagggctgttttgttaatcttcatatcagttctgttaaatcagggtgtttctaagcagtgcaaaaaggagtataataatctgttaagttttccttgaattgattttgtgataattttgacttaggctacagccagtataactcatataatgtgaacacgtatattgtggttaagaccattgactctgacatcagaccacctcttttaaaatcctagttctctcaatgattgcgtaaattctcttaacttaaattttttcatttgtaaaataagtattattttagcatgattaggagcatgaagtatgatgtttcatataaagcacttagcactgtgcttaatataatcattaaggccctaagaaaatgttaggtcacttcatttttatgattttttttcctttctactgaaaaatctcacagtctgaacaacagaactaaaagaaaatggctactataaagaaggcaagcagatgtgatttcagacagccagtggggaaatctcaggatatgttatgaattaatttcaagtaggtttgatttgggtaagtgaggaagcagaaaagtatgaataggagcagaacctgtagcagagtggattttgttctggcaagaaaagtcttgggaaatcccaaataaatgtagaccacataagattcatgggttaacaattttgcccccctccaccctcactgggaaaaactaaatgtacttgttgactcttaatttttccaatctaccattaccagttgtcttaataagaaaaaattgtagccctgcttttctttcttttcttttcttttcttttttttttttttttgagatggagtctcgctctgtcacccaggctggagtgcagtggcatgatctcggctcactgtgagctctgcctcccgggttcacgccattctcctgcctcagcctcccgagtagctgggactacagggcgcccgccatcacgcccggctaattttttgtgtttttagtggagacagggtttcaccgtgttagccaggatggtctcgatctcctgacctcgtgatccgcccgcctcggcttcccaaagtgctgagattacagacatgagccaccgcgcccagccagccctgcttttcttttgcaacttatttgtagggttttttgtttgtagttgctcattttcttgtgctttacatatgcctattttgagatttacaaatatgaatgcctggtaattaaagcaaaattttttatgttccatcaccaagaagaagtttaaccacaagggtccattagatatctgatacattttaggccacagaggaattgactttttaagattcgcattgtagaaatgcagagacatggaaacaagaaattgaatatatgaatttataacgagagaatgacttctgttattctgattggaaaatctggggcgatcttaagtaatgaaatacttgtctgcagcaaaagtctcacgtgattttgaaatagtcatatgtctttgcaaagcaaataagaaattgcctttgtttaaaagcaagaataagacaggcaaaccacttgatgattacaacagtattcatgacttgcagtgctgacattctgtagattgatgcagtcttcaagtgtggaaatcctgagtcatacagaggatgagatgttttaataattaaaaaaatatttatatagtcagcagattgtcagtaaaggtggtttagattacaagagttacccaacagagactatgtcaggttgcaaattattctaaccagaaaaccatttgaaaatgaataaagcaaacttagagtggattgacataccccagatccttttattttttttctccctctcattgtcctcttttatccttctcctcctcttctttcgaaatgggaaaggaaaactattgcttctttatcaagcataaaaccagtatgcttgtggtaaaaagaaaaaggtggagccaatcttttggcattcaggaagtgttgtttgttcccagtacacaaatgctacacagtacagagattgcgacttgtaattttatgagatgctgcttttttaaaattaattaatttattattattatacttaaagttttagggtacatgtgcacaatgtgcaggttagttacatatgtatatctccttctatttgttcttttgccctttgtgtagtccgttttgtagattgccttaatgtctccaaacactaattgtgtcctattttgtaatgaaatccatattttacaaaattctgtgactagttgagggataagaaatgttgtttaataatagaaaaactttgaaccaaattggctcatttagctattaaatttctgacatccatcctgggtttacaacagtttcagatcaaaggtcaagcagacaacttgagatccttgcacccacacaacagcaactttgctgcatttctacacacatgtttaaagagttttgcttcatgttttgttatttagttttaaacaacatagaagcacctattattctgtgtttttactcttccaaacaattatacttcaggtacaaaaacaaagagaactaaaacaggtgacagatgtattaactaactttatttaggtaatcatttcacaatatataagttcatcaaagtatctcgttatacaccttaaatatatacaattttaattttcgattatatttcaatgaagctggaaagaaaaaaaaaacaaaataaaagtaacttcgagtacgtgcaaattgaaggtgctatgtgaattgcccatatcagaaattattcaattaactgtattagacacagataaaagtcacatttcccgttttctgtttgataaacttcttactgattttagctttgagtttgaattaatctatgtcctattaatcaatgtataccttccttttgtcactattattaacttctaaattttaatttttgctgttatgattttttaaatccactttaaatactttttggaggaagataagataaaataagtaaattaataaatagaatataggtctggactgttagttatgaaccaactgtgtttattttactgactatagtagactcagtttttagccatctaattgctcacatagtttatagtaatcccattgtggagtacatttcaaaataacaacagaatttatttatcacattagtctaaaagaataattttgattgttactgaaagtattaattgaagcactgcataaatgctccaaagattatttatgtcttttttctcccaatatcatctccttttgaaattacaaatgtttcgtttttgctatttactattcactcatactccaagcaaataaaaaatatagcaaataatttgtattgtataaatagcactgtcctagtcttgtgtttttgtcacatactgtgttagttgattttttgaaaattgtgagctccagcacagaatttgcttagagatcatgatgtcttcaggtcagaactcacagttgcctggattatcattttggtttctatatccaatgtattgcagattatgcttatttttggtaccatatgtattaatgttctttattttttccccattgtcatttgttccaggtctacagcatcaagacaagagtaaggaatcaccgtggtactgaaacacacaatcttagtgagttaagttgcagcataaatccaagggcccactgggaaaagatactgtcgggtttttccattcagcaataggacacgaaaggcatagaaggagaagacaaagtgtcacgcagttgactggttttcggcctttcttgagaaagcaaagtgggtcccagacattgaagaaaagcatttttatttgtttatttcctcatctgagcctttgccaactgtgcaactctctccttttgttatcttgcttttatcaatatatagctaagtttttgtttcattttgatttttttttttagccaaccaccttgtcaggaaaggatgaaccacacattaaaatgttcattctttcaggaatacaagtttgtagctctatgtgcatctatttttgtagaaatacaaaaagtttggtttagcattgatgggctatttttgagggatgtattttttttaaaattgtaaaaattgttgagttctgtttaaagaacttgctctcagagaagcactggcaaaaatgtttaaaatgcttatctctaagatgtctattatatgctctgtctgtgctttctaggttacctcaaatgttttgtttttttccttcttacaaaagtagctataccgtagtcaaaccaatgcagtattgtttttacattgaatctcagtaaagatttaattccatgctagctcaattagttttgaattatatgtatagcttgaaaagtttttttttaatgactgtgctaaagaaatgatattttattgctttgatttctcccaaagaataacttggaggttgactaataagaaagttggcataaactttcaatcaaatgaagagtttgcctagaggagactaattctctttctagcccatccaaatttgataaatggaaccagaggttatatacaactacaaggaaaaaaatgcatttaaccatgccacctatgagtgccagtgacttattttacttgtttttaattattcattcatggcaatttaaaaagtcatattttaagtgggatttgtttttcctgaagggcatttgaaggaacaatatctgggaaggtactagagaaattacaaagcccgagctctttcttataatgccacctatccctgtaagctaaacaaacaaacaaacaaacaaacaaacagttctatatataatagtttcaacacagaacttaacaagtctctttttttgtttgtttaaatctggctttacttgatttaattcctttttagaaagaaatttagggcaaaataaagtgtatattaggatttaaatttatgccacaatttaaaaataaaaccagaggttatatacaatttaaattgggctaaaaattaaaaatttgaggatttaacttgatatagctctcaggatctaaataaagtttaaattatcattaagacactgctaggagaagattaagattatgaaagtaacagttattgatactgctggacttcaaaggcaaagttcatttcttccattaactgcttccagagatgtcatgtaaaaaagttagtgtattagagaagttttttagctttataaagaggttttttcaaatttctcccatttttctctccacccacataaaatagtatgttcagtgaaatgccactttctatctttaattgttcgtatcatatatgcgaactttttagacatgaacatgacatgttcagctaggcagagttctcatagataattttcaaatattttccttggctgtaatttatgtattcatttatatcctatccgtcttttgagcttcagatctatatactcttttgtactctcatcactccgcactttgctgtttcttacctagactctcttttacacaatatgcacatttttaccattgtggggtccaaatttaagataccttccactcactaataatatgaacttatatttcctgggagtagccaggttaaattttctatactttggtccataatttgatttgatatgattgtttcatttataatttgcccaaatacatggagcacaaaatttagtgaatttataaatctggatttgccttgtgtccttctgagttttcaaaggcaagtattcaacagtccctgtgtgatgactgacagggttatttgcctcatccacatccaccttcggaatacattaacttcctttgtaatttatttgaaagtagtgttaaactcattcagatcattcagttggattttcccaatgaagaggaaaaggaaagtagttattcctagctccatttcttattttccaccaaatttaattgaagggcattaattagatgtcttcaccctgaatttagactttgctctgtgttctcccggtaactgtcagacaaaaagtttattggctctgaggaactgagaaatgttgggaacctggtttctgctgtacacaggaaagatttgtaagtgagctctctctttgaaaacaggacccaggctgggcacagcagctcatgcctgtaatcctagtattataggaggcagaggctcgggaggattgcttgagcccaggagttcaagatcagcctaggcaacatagggagaccctatccctacaaaaaatttctgaaaaattacctgggcattgtggggcacacctgttgtcccagctactctggaggctgagtccggaggaacgtttgagcctgggagtttgagtttgcagcttgcagtgagctgtgattgcaccactgtactccagcttgggcaacagagcaagatcctgtctcaaaaggaaaaagaaaacaggacctaggtgtttggggtacactgccacccagggagtggatcaaaaatatacatagaaagagaatgagcatgtctctataattgtcttctaggaccatattgctgttagaagtcctaaaagaggatgggttgtaatttagcataatattctgaattcattccaagtttaaaatcctgtcattctctggctcttcttttttcacatcaaaatgatgctgttggacttagaggcttccgaactgttttattgagggctactatctgcctccacaattttattaaaaccactccacctttagacaaaggtgacttttgtctgattttacaaatcagattttattcaagctttctaaatatctgtgaagtagaccctagaaaattgtctcgtttattttaaatagaatctatgcttccaccaataaaccatcgggagctaagaaacaacataatgttgacaaatcaggaacctaacagattattttgtctctcattattaatttgaaagagcctctaaacttttgagaaatcaatgtgtcttcttaagaaagttaagcaccctctcttaactttcccctctatttgctctcctttttctttcttcttaagagtatttatattattttgttaagcaaaaatggctaagattgctctaaaatttgcaaaatgaggagtggattgcaaataattgagggatttatttctttaactttataagactttaaaaaaaaaacccaaattctaagcactgacatgaaagttgcctttgagaagcttgttattcattatacaaaaagtatttgcccattcctattctaagatttgcagaatatgtcaccctatctagcttttgagtttgctatctggtttaatgttgtatttataatttaaagtggaaatcagaaactgtttcaagaacctgtattctattccttactgagtgtcccttctttaaatagtgtttgctgaattaagccgatgggggcagtggcgttaagtggtggaaaaaggaaagtatatatgttagagttttgaatgagggataaatagaaagcagaatgaattaatggaaaagaactcggctgttaggccattctctaaattctagtttagccaaaagtttatgtgtggtttggggcttcatttatttatctcatgagtaaaatggaataatacctaacaggcaggctctggaagttggaaatcacatacacacacacacacacacagacacacacacacacgatcaatcatgtagctcatattagatgttcaataaataacagctactacagatgcctatcagttgagtaagtagttcattaaattgagctcccaaaggtctcttctcttcacatccatatccgtttctgcagcaatcaaatagatacatgattgtttttctgtaagaaattactgcaaagagaatctttttctcctactaactgttccttctacctggtataggagataaatgtacgtttcttaattagctgactttttagtatgtcatttctgaaggaaaaataaattaaccttaaagtggcatgtaggtccaattcagttttcctacatgttccaaaattttatttaaattactgtgtccaaaattatgaggacagtgtcattcattcaccatagtttatatttttagttatatatcaaacttccttggcacctaggataagaacatttcttttgaagttatccaatttttttttatttttacttgacttgaaggaaagttggaaaatatggtggaaaaaatcttccgcattaaaagggggaaaaacacaaccatttacgatctcagtcagcagatttactctactcaaggaaaaaaagaaacaatcttattggaagcagatgttgacactgtgtcagttattgaagacggaaggagttcacttgagccattgcagttacaaaggggtattgatggcagtttggattcctgattgatcacctttgcagccaagggaaagacagcagaaactgtatgggatcagaaatgaaatcagcctgccagtttaatggagaggctcctagaaactcattttttttctttcctgtaagataaaagacatctttcagaataagaaaggcttgtttgagagagaaattacagtttattctctgaaaatatttaaaggccaaagtgccctttaaatctattattaaagcattgaaactgttattaaaatcattatagaaaaattaggtaaaaattttagcctaactttcaacatccattcaaaaacgaatgttgaaaacaaacatataacctataaaaaagtgaatggctctggcaagtgggggcatgggtggagtccataaggaaacctcagtctcaataacttcaaaatgttacttttcatggtaacttggtcatggagattggtcacagcacagacatttagaattttttagcaggttttttttttcttttgaatcttgtagtgctctctgggaattgcaccatgtacacttttacaacctacagaaatcgtcattattgttaaagtatctcaacttttctatttcttttattgtctattgtgcttttttgtttaaaaatacttttatagttttaaagtattggtcaaagtagtattctcttgaagttctagtcaatttaatttgatccaataagtttttctgaatctcctttttaagttccaagaaattctattataaataagtgtacttttaccaattccattgtataagcaaacagacaccttttagaaaaggataagtaatcatcaatttgtttttttaaaaaaaaaaacaatttctagactactaaatttggcataagaataattcttttaaaatgcaacatactttaattagtttttttggtatatgcataagatgtgaactttcctattgatatcactttatattaatagagatgtacatttctttctatgccgtggctagagcaaaagttaataatgattatttacacaattgatttaatttcttaggatatgtataatattggatattatatctgatttaaaaatactattccatacattttttttttcaggagataaaacatagggaaaggttttcatgtgaattctttgtatcactttgaagtacatatatttaaagggaagatggatacaatttgtttttattatataaatctaggtaaggtgaaatgcttttgtcaacaaaaatacagtgtagtgaattttatatttgtcacttgattaggtaaactgaaaactaacaatagaaatattattttactgcattgaaataccatgaactttcagacttgttagttctacaagaagttgtgctaccttaattttgtgtttccagaaataaaaattaaccttagttatgctgtcatttttaactaataaaaaaagtataattcataaaacttttggctttataagataattataaaattatatatttttttctgtttttgtggggttgggaaaacattttcttatttctattcactcttcaaatgcaggtctcataatatgtgtcaatgatataagatgatggaagactttgtaataaaaacatatgtcattatcttcaatttgttcaataaataatttaatgtgaattgaatgtttgtattttaacatagcatttggatttggtctgcatttcttgagaatttaaagctctttttgtttcctccttattcaattaagcatcttataaatattttggaaattacaacatcttaggtgttattaattaagaagttaatttctagggccaagaagtctatatgttacagcaaggaatagattataaaatacatgtttataatggaaaagaaaatgaaatggggtatattaattacataacagcaagagtcttgagaattttataatacaatgcttctaaggatattggttgaccaaggtgtattttattgtttttacatttgttgacagggactctgccataagtagtatgaaaaaacaaacaaaaacttttctacgattcattaacattgaaaagagaattccaagaccttgtattctgaagaaagctagagtttctctaagtgggccttcaattttcttattacacgtatctttaatgtgaaagtactaaagtctgaaaatcagcatttaaataatagactttccagcattacagatgaaataatttggcgcaggctttttaactgtctaccatatttagaatgtggtgtcaaaatgagatttttagaactgctgtaaaatattactacattactacaacgataacggcctaaaacaacacaaatttattatcttacagctctgtcagtcagacattcagcaaagatcttagtcttggtgggctacagaatgtaggaggcatttcctggatgcttccaagagagaatcttgctgttccctgcttctagagtcctttgcttagtttccttccatcttcaaatccagcaacctggtcaagaccttctcacatgacatcactgacttcctcttcttcctctcccttacatatttaaggactcatgtgattacaatagctgcatctgtgtaatccagaataatctcttcatctcaaggtttttgttctgttttgtttttttgttttgttttgttttgttttgttttgatggagtcttgctctgtcgtcaggctggagtgcagtggcgcgatctcggctcactccaacctccacctcccgggttcaaaggattcccctgcctcagcctctcgagtagctgggactacagatgcgtgctaccacacaaggctaatattttgtattttagtagagacgggatttcaccatgttggccaggatggtctccgtctcctgacctcgtgatctgcctgccttggcctcccaaagtgttgggattacaggcataagccattgcgccatgctcaaggttcttaattacatctttaaaggccctttttccatgtacagtaacatattcaatggttctggggattaggacttggagccattattctacctacaacaattagtattggacttccatcattttctatcactcttgtaatcgagaaggactatttcactgggagtagcaagtcataatgtttgcgttggcatttgtgtgggggtttatcttcattcattaaataattgcatgtaaagaaaattcctgtcactatttcaaatgtttcatgtagttattatagtgcttcagaatccaaagggttatgtgttacttatgtaagatgagcagtctagggggtggagaacaggtcatctagtgcagattcttcctagctgaagtgtgttttctctggggacaaccaagtaggatttaattgttttgcttccttttttgggaacttagacccatcttgcgatgtcctaagtctccaagcatcttatttgacctgcttatacacatttgactaaatagctaaatatgaccacattgacgtggtaaagctttaacacttttgtccagattgaatcactccatctgctatcagttaagcagtggaaaactgttatggaaaagcaaacatgttttgatagatttaatgtgtaaagaaggtatccatactctggaatgctgctgatcaataaatgagctgcaagactttgttcgaaacaacactcaagcacaactgttttactttccataccaagtttggctgtgactgaatgaagaacatcagcattgatctttgctttgcacttgtacaagagactatttgcagagagccaaatatagcaacagaggatttaatatcttgccaaaaaatacaaaatctgttcccctttaagcatgacactctatcctttcttgtggatcttgctaaaaggaaaatatagctttaaactcccctattccttctgttgaaagcttaagaatctttttcaaatgagctatgtatggttttgtggtattttatgtttccaaaagaaaatggctacatgaaaaatctgtccagtgttatcatttttcttacaaaaaatacttctagttatggttgtattaattaatttgattgtgataatgattacacaatgtttacctatatcaaatcatcatatcgtataccttaaatatatataacttttatgtgtcaattataactcagtaagtctgggaaaatatcgttaagtcaaagattagagtcaacagaaataaagaaaaatcatactttgataacttcaggactaatcaaggatcaatgggtgacatgatatcatgctatgtgccattttgtgttaaacaaattacaccaacaataaaaaaaattggcttcaatcaa

SEQ ID NO: 48 - DNA, 26070 bp, Homo sapiens
taggcagcagccccggaacagatgaggcaggcagggttgggacgtttggtcaggacagcccaccgcaaaaagaggaggaaagaaatgaaagacagagacagctttggctatgggagaaggaggaggccgggggaaggaggagacaggaggaggagggaccacggggtggaggggagatagacccagcccagagctctgagtggtttcctgttgcctgtctctaaacccctccacattcccgcggtccttcagactgcccggagagcgcgctctgcctgccgcctgcctgcctgccactgaggtatgtgtgacccccgcccagcctttcccttctatagttgcaccaaccccgacacccccgttcacgccgtcagctcgtgtgcaagggagggaagctctgctgaggatgcgcctctcctcccggctccatcacggctccccttaagagcatggccctcggtcctgtctgcctgttgcttttcagaaggtggactcactgtgtaactttgtcttcccttacaggtttacagaaaataatctcactatgtcttcgggggagcattttctcactctctgtttttctctgtgtctgtctctggtttcagaggctgcctgcctgtcctctttgctccctttgcaaatgtggcagcctcctcctttcctgggaatctgatcccatcacagctgccacagggacctggccagcaaccggagtctgtcctccagatctcggtcaggggttctgttttccaaaagggactttgcacgaacaatcagttgatctctgaaaggcaaagggggaggcttcaccattaatccacacctctgggaagccttctgttttcctctaattctcctcactcccaaacaccaccttccgtccccccaatacacaaatttcagcaccattctgcctgaaatggcaccatcacaacctcagtcttgggttaggtgttgttcctgtcctgagttccttgggatggtaaacacaggcagtagcccttagtttatctagatctgaaaacccagacatcagatatcgtcaaccaagacatgggtgtaatgggaggtggagtgtgctgggggagatattctcagaagggggaaagggggaagggaagagggagagaattccagggtccccttccgtaatccacccaagactagtgtccagcctgtcagggtgtcagttcttcttcagacaaatccactacctttcttcgccgccactggctccgtgaactggctgtcaagtggacttccttagggaaagggactccaaggactccaagggaaggggggcactgggatgagttatgtcttccaggattcccagtctgcccaaaagggaacagagaggcatgcattttcctcaggaaaggacagcatttttttcattagagaaaatgttttctctagtaatgctttagagttaaatttctatacgccccaagtgctggtggtttagtgagaagcaaagcagaagtaggacacaggcttcgggcatgcattttatgtgtgatcttaggtaagtgtctcccctggatttagtgccccatctgtaatgaaagaaggctgaaactgaaggctctttggggtgctttgtgtcctctaaaatattcaaaggaagatttcttaaccagggtctatggagtggtctttgaatgggcctcaagccatctctaagcccctaaaaattgtatgcactgtgtgtgtgtgtgtgtgtgtgtgtgtgtgtgtgtgagagagagagggagagagagagagagagaggatgaatatgggtggtcacagctttcagctttaagatattctcaaatggattagagggcatgacgtggggatggagtgaggactggtaacaaatgtgtgtatttgctggaggatgaagccttctgaaaagggagtggttgaggaaagagagagttaactctcagctatcagctgccacatcgacatagcctagagcaaagagggggagggaggagaagaagggggttgcctggagaaggaatcaacttttgaaactttctccaagtcccacccaccagaaggctcttctctgcctgactcactctccgaggaatgcgagttgccacggtaacctttttttcagggtctctgcctgctggctggaggggacccttgaaaccctctaagaacatcagtctgaacgtaccccacccccaaattcaaggcctgcagcaaattctaggccctgcccttgtgatctctcaggattccggggaagccttgggccatgataatctccttgcaagggtgtttgaagacctgggttttagctctggctgtgccctgaaggtaccatttgaccttgaactaatacttctttctgggccccattccctctacagttaaagaacagtaacagcagccacctctagggggtagatagtgtgtagaagaaatgggataatgcacagggaagcactttgcgaattgtggcattccctcataatgcaaagggttttagaactgatggattaaaggcatccaaagacctagtgaaatcattctcagctttttttttttttttttttcctggcagctccatcatcttggggtttgtatagaactttcctttactagaagtactgacaggaaaaattttaaaatcataatattgtttatcttcattttgatttggggaacttcttgtgtatttcccaagactgttgtgccctctatgtaggaaaagcattggccaagggtgaaaaaaaaaaaaaaaagtgtgttctaactcccagtgcctgacattgggaaagacacttcctctcttgaggctgcagtttcccaaactgttaaatagagtttctaagctagatgatttcccaggcacccttctaactctgaagtcctataaacctaaatcccagataccgcttttattcaaaggaatagcttgcctgcatttttaacaccgccttactgcacccccagttgaaaagaaaacaagaaaagatgggctaggggatcttgagttgcataaccatcatgctgtaatccttatccatctgtagagatttgtcaatcaacagtgtggctggggtttgctattcatgagagcagctttccttgctgaaaacaagctataaataagaaagaatggtgaaggaaaggaaagagctgaggatgtgaggtaaacagtagaatatttggcttttgaagttgtttatgtaggtagataaatatgcagagataaacagggacaggtacaaacccatagggatgaagagtataaacatcgatttcatcaacaggcacccactggctcagctaaaaataagtgcctcattacaggagcagacacagaaagtcattcactcacacacctcttcctggatgacaatgatttacagacaagttccaggaatatatctcaatgaatgtgaaaattctgaccctcgcctattacaggctgaaacagacagatgctaagtcaggctgtatgtaacttacacagacatgccatcaggtatacaaacacacaccgccacttgcagccacacatggatggatgtgcacagtcaaacatatgcacagtcaaacataatatggatcatgacaatgagacagacgtgtaacctacatttatcaccaaccacctctatgtctcagagagagagaaactgaggctcaggaagagaaaataactcactggaggtcacatagcaagctggcgtctgagccaaacttccacgtgtttggagccattttgatattcaccttgccttcccccccaatccccatttgttcagtttggaaacacacttatgcacacaagccccatggatactaagtggtgagcagcactttgtctctcccgttggctggcctgcaatgcctattccagcccacgtggctttgtcattaggcccaaaggccctgcatgatgtgcctgtaggcggctgctcccttgcttctagctggctccctcccaaacgtcagtttcaaaggagagaagggaaaaccagccttgagctttcagcaaccctgaggaccttgtttctacagcacagaccctgatgcctccctccctccctccctccctcccaacctcaatcctgaacccagggacagctgggctgtgcagggccagggccagcaagtagtgacttgacggaattatttagagaaacagcctctcctcaactggcagcttagacaggaaatcatctctgctctcacccatcaagctatagaactttatgtctgcaaggaaaacatgaacatagacaacaattgttgtcagagctggtttctttcagaaacttggtattaacttctctcatctggggatcactctgggtcatcttgatgttagtcatggcattaggatttcagacctatcagataaaaaaagcaaagcaaacatctggatgtttttgaacatctggaaatttggcttagacaccagcttgccgtgtgacctccagtgaggtattttccttctctaagcctcaatttctctacctctacaataagaggcagcacacagaggtttcatgtggcctgacaacatcactaattcatcggtagtggctgtcagaagaactgtgttcaggattctgatgactctctaagctttaggagaagaggtcaagcgattgattagtaatgtctgccacatgtgcaggaggggtaggtggaggccacgtgtttgtcacatatgccacatatttgctatctttgggatctcggaggcttttccagatgcaatagcctggacactttgatgttatttctcatcctttcatttgtggtcaccacaatgcagcagcggtgccctagagggagccaaggatgaagcctgaagctccaccccagcctctgctagccacagtgaaatgtggcatctcagatgtctttatggaatctcgggctgattccagccccaaactctggagccacctctgagttgccccagaagctctccagtcctaagttttagctaccacaccttaaaagtttcctttagcgtctttccttccagcaggaaatagaagtggaagcagggagtcaaggggcaagtggagagaggtaaggctctaaaaagcttctgcccaagttgatccggaaaatcagagctgaaaagaacctaaaggaccaccttgcctaagggttccatattgtgttcctaggagaaagtacagatgttccaaggtatcttagggaatgtccctgtgtgtaggactcccactcctcagctccactccacttttatctgcttttcttttttgtggatttttttgagagggagtttcactcttgttgcccaggcgagagtgcaatggcacaatcttggctcactgcaacctctgcctcccaggttcaagtgactctcctgcctcagcctcccgagttgctgggattttaggcgcccgccaccatgcccggctaattttttgtatttttagtagagacggggtttcatcatgttggccaggctggtctcgaactgctgacctcaggtgatctaccctccttggcctcccaaagtgctgggattacaggcgtgagccattgcgcccagcctgctcttgttttttaatttcacacttattgattaactagataatactcattcacatggttcagtacatgctaaaagatttcagctgtttgaaatatcggactctgcagaagacttcattgaaataaaggattttctggcttacataattttgagcactgaccttatacagacaagctgggggtgttagttctggagagcagaggagactcccctgaattcgcacagtgagctgggagacatgctgacttgctctcagctctcctgacttccacgtcatgaggccacctctgagctgctgtgtctgctcccaggggtgtgagcaggagtgccattgtagctgcatgtggccacctctctggcctgcctggctcggtccccatgtcagcagaccccaggctccttccgagtcccaactccctggagggcctggctcttggcttcctttattagcctctaggcttgttttcctctctttgggcttgtttaccagcaacatgtgtttttggagcccttgtttccaagccaaatagtgagagtgagatgcttggctggtatcagctgcccaagtaagaggccagccctgggcctggtcttcgtcactgtatcctctggaggctggacttacccagaccaacaggggcaatatgtcctttgttccacccaaacacccctttctccctgggcttataaagcactggaattttgcactgaattctttcgggggatggagattctgggaacctcggactttataagatgctcttcccaacgacaacattgcttacctctttatttggattctcttgtgtaaatcacccatgagcctttaaagattggtatgttattgtttccattttacacattggggaacaaattgaggccccaagaggtaaagttgatttctaaaggtcatacaattactaagtggtgagccaggatttgaacctgtatattctggctccagagcctatgagcttacctttatgctatactgcctcatagtttattatcactctgtctaccatggtagccactagccacatgtggctatttagatttaagttgattaaaatagatgggcatggtggctcacgcctataatcccacctctttgggaggctgaggcgggcggatggcttgaggtcaggagttcgagaccagcctgggcaacataatgaagccccatctctacaaaaaagaaaagaaaagaaaaattcgctgggtgtagtcacaagtgcctgtgatctcagctactcgggaggctgagatgggagaatcacttgagcccaggaggcagaggttgcagtgagctgagattgcgccaaccacactccagtctgggtgacagagggagaccgtgtctcaaaaaaaaaaaaaaaaaaaaaaaaaaaagatgttttccactattctctattgcagtatttcaacaaggtatgggttaagtaagatattttggattggcctcagtccttttgcataaaatttttaaataaaaaaattggttaaaatgaaatacaatttaaaactcagttcttcatttgcactggcaacatttcaagcattcagtaaccacttgtaaccagtagctatcatagtggaccacgtagatatagaatgtgttcatcatcttgggaagtcctgttgggttgcattactccataagttctttccacccaaataagatttaatgatggcaactcagtttctttgcttcacatcctaagtctatcattctgagacccacagtccatgattctatgattctgaggtatcccccctgttctaacgttcagtggctttttaacgtccaaggagagcccaaaggaggccctttatgttttgagggacaaacctgggggctggctgtacttttccatcctcagagtctttccagagagagaagtgacctcagcttcaggtcctgctggcagccaaggacgggttttcagcagtctccagagcaaataaaggcaaaaggaagggactcgatgtacggaacaggaggcagtggcggctgggagggggctaaaactgtctgcatttgatggccaccatgccaagggaaatatgccttctcttcctcccctggccctgggcattttccttcccaggaactcaggccagttcaaggcccaactgagccccattcaggtgaccacctgggagcgggtagctgccaagggaaatagtgtgcagaggtagagacataccagtggtggggtagggttgcacgggttctcaccctagccctgccacccagtcactcactcactgctgttagccgttggcagttttctcctttcctctaggccttggtcttctcatctgtactattgggcagaaatatgtgacttgagcccccagtggggtgctggattatgaaaacaccctgaaaatgataaatgtatgcatcatcacagactaaagaaatacaaaggagggagtttttgtttaatattggtcatttatatgaagggaatttaaattttcgccaggcacgctacacctaggtttgattggcaaaggatcacagctgtgagttctgaatgctggggtttgatactgtgttctgaccttgctggggtgactgttatactccattagctttgcaggatggacacagggctctttggtcagtggtagtttagagagcctcagagaggtatctcgtggggaggcagggagatggctgtgcatctggaatagttcagccgcttcccttccctcccatctcatcatctgggggaaaagtgctcttggactggtggtgtagcaccgggtgctgggcaggacccagattttgtgtttgtgtttacagttttcttccaaaacttttaaggtgtattccaagattttgcgttctgttcttaacagtctctctgcatttctcccccactcccacttgtctgagcgtaattcctattaggctcaccccaactccatgagtgagaacgcttgcctatttggagagggcctgaattgttgcatgactttggacaagtgcttcctccctctcaacctcagattccccattaggacagtgggactaagaacccttccatgcctgtctgcctacttcccagcattgtcagaaggctctaggagacagtgttatgtgacagtgctttagaaactatgaagcagcactataagacttagagttatttttctcttctggctgcaacagcagggatgggggtggcagggagggtgagtgtgcagctggaaaaggaattcaggaagatgaggaggcaggacagacagaagagccgcccagcgaaaccttcccctggtcacagaggggagcgcggttactctgctcatatgaaggacgcagactcagggaaatgtctgtcttcctgtctttctaatctgaagcttactacatttccagtcctagctgggctatttcttcaataacatgacttccctgtcattatagctcagacagggtaactttttgttttgttttgttttagctgctatttcactttgatccttcaacctcaaactatctcagacaagtccttccttgatgttttcttttctgttccatttgtcccaagccacatgcaggagttatttatcttgcgtcttccaaaaggggaagcaagaagggagatttttccacttaagcctggggaacaagtgaacaactgtgtgaggggaggaacattccacaagctgcctcaaaagggaagactagactcctctggaagttggggttattgtgaagcaataccaaacccccaggtcctttacatttctgttagttttacttcattcactctgtgcaatagggggtgaggttttgtgtctctttaagcccaagaaaggaccattatgaagtgggctcttcctctgcctgtttctgcttcccaaatgctatagtacaagtgaagacatatgatcccagaggagaccatatgtgtcaagaccagaatgtgcttggggtgtcttaagagcattttaaggaccgaggctgccacttcaaagttcacctagtctacccatttcaattgatagatgggggaaccaaggtctagagagaccaaaagacttgatactactgtggtagaacaagaccccctggcatttaatttcaagctgagtatttttctccatgatgccgggttacctcccaccaccatttggtcagttgagaagtcttggaagaaataagggatgatgagcctgacagggaggttttgggagaagaaagagggaagacatggccactgttgctcctgatggaaggttatttgtgggtagagagagcaggtttgttctttgtggctgcaggggagatggggtagacagatcagaaagtttgagggaggcacatttagatcagtaaaagaaagaactttctaaagtcacttgagaatgaaaagccatttagttagtgcaagaaatgaaatgtctccaccacagagcctctgttaggaatagcattttagttttgaatcctcagaggagatactgctccaaaatcccttatagtcatgagagtattagagtctagagcttggcatttagagaatgaggccttaacagttaccagaacagaggtattttctagatctcagctaacatcccctctgcaacacatggaagcatctggatggtttccgtacaggacctaaagaagtgctgtctcttctgggtagaatggagaaaaatgtggccaccctcaagtttccatgggttacattccaagactattgttctttgttttagaatgtggatctcattgtcccaaactggcaagaagttcctgcctattaacttctcccattgcagagggagtaggaaggagggggaggaggcgacagaggaggaagaggagagattgggtttagggaaaaaaataattttagaatatcagggattgaagggaccttgaagatgatctggtttggcattgcccaaacttaactagttagcccatcaccttagttgaatcactttgcaaaaactttaataaatgtattacaaaagcagattttatatcactaccataaatggaaaaaactctgtgtacctttgtcataaatagaaggaaactgtaaaaacaaacacataaaaaaaacaaaacaacttgattcagttccagctggatataacttcctgtggaagctctgagctggaggcttattctctttttgttaaaaaaggagatagatgagtataaaggaggtgtttaagacatcttggcaccaaactgagactttcttctcatataagcagaattgaaagaatattaaatggaaccaacctcctcatgtttttcactatcatttaacttgtaccatctaacattatcttgcacatatcaggaattcagaaggaaatctccataaggaagtctcaccctcactgaactctcaatctctcctccccatagggttcccagcaccatgagggcctggatcttctttctcctttgcctggccgggagggccttggcagcccctgtaagtacctaaatatcatgtcttcttgttttcattcctaccgctagcaccaggggttctgagcctgccagccctggatgctgaaagggaacagggacttccccatttcaagttagtggtcttttttttttcttaagttaggaagctcgggataaaaactgggatgaggaccattgggtggaggtatcagagaagagagagttccatgtaatgttagataaacttcttagtagtcagagcctcccagcaatgaactaggattgctttagaaggaaatgacctctttgtcatatgaggaattcaagcaggcaggagacaggatgtgggggatttctggtaggggtggtattagaagagattcaagctatagagagaggaatgtgttggcttctgaaacagtgagggttgtttggttgtaagcaacagttcaatctgactaaattggggaaggaggggaagatacagaggtagattataatattaaaggccttggggaggactggaaaagggcagctctaggctttgggagttaagaactaatggacagtctctgagatattgctgtctgaatgaatcaactccagcaattttcacatcttgagagaatgtgccaagaaggtttttataaattcaaaaaatgagagccaatctggctgagcttgggtcctgagccagcttcttggccaggtgagagtggggccccttgattgacagacagttcctcgaagcattgcatgcagggacaggagtagttatccacagctcatctggaagccttcacaaggagaggaggaagaaacagggcaggcaaaaagtgcaatttctttcaacctgtgatcccctcatcctctgtttactaagaagtgggagtgatggcagaccctggcaatcttgatcaggctggtagatggaggcaaaagtttctcaaagttggcattaagttttgaagcagctccagccagctaagggcctcaaagttgtgtgttttcttgcttcctcctactccaagttgaaatggcaagaaaaattgcctaataatactactaataatatcacactgtgaggaagatgatgacatctgttaaaattcacagtgtcatcccctctggatgtcaattttcctatctgtaaagtgaaagaattggtctggatcagtgattttcagactttataagaattcaaagcagcagaaatacttttccaagctaaatcttaggtagacacctaggatataaaatatataaaatgggagctgcttgagtgttccacggtgctcacatgactggcttcttctttgttctgtccctcaccatggcagtccatgaggcacaactttggggatctccagtaagctgctctccaagctcccctagcctgtatccgaggccacaggcactttggaggtgaagctggccttattcctgacccctctgaacgctactttctctttccaacagcagcaagaagccctgcctgatgagacagaggtggtggaagaaactgtggcagaggtgactgaggtatgtgggcagtgaccgcagccccttagcccctctctacctgtatctgtgccctgagaaattagggcggatgctgtgggtctcaatgctagagtggggcattcgtctccctgtacacacatagcatagatgcaaaccctgagtatatcccacatcctgacacactcctgaatgcttcccaaaccttcaacggaaccctacgtttggggaccaggaccttaaaatttttgttttttaagctatgcaacagttgttcttccatgattacccacagtttttgcaaacgtaaaacagaggaggccgggtgcggtggctcatgcctgtaatccctgtaatcctttgggaggccgaggcaggcaattcacgaggtcaggagttcaagaccagtgtggccaacatggtgaaaccctgtctctactaaaaatacaaaaaattagctgggcgtggtggcgggtgcctgtaatcccagctactcgggaggctgaggtaggagaatcgcttgaacccgggaggtggaggttgcagttagccaagatctcgccactgtactctaccctgggcgacagcatgagactccatctcaaaaacaaacaaacaaacaagcacacacacacacacacacacacacacacacacacacacacagaggaaaggggagatgcttgggtgtggctggcaggggtggaggcttgacaccctcttgtgaacatagatctcagtcaatttagaaagtttactttgccaaggttaagaatgtgcctgtgacacagcctcaggaagttctgagacatgtgtccaaggtggtcgggagtacagtttgctttcatacattttagggagacacgagacttcaatcaacatgtctaaattgtgcattggttgagttcgctaaggcaagacaacttgagaagtgagggcttccaggttagaagtagataagagacaaatggttgcattcctttgagtccttgatcagccttcccctgaatacacaatttaatctggctcagtgaatctgcatttttacataaacaataggggagaggaagcaatcagataagcgtttgtctcaggtgagcctcagagggatgactgcatagaataggaggcaggtttgtcctatgcagttctcagcttgacttttccccttagcttagtgattttggggtccaaggtatattttcctttcacactctctttccctaacacccctggtgacctctaaggcagctcaacagaatcccaggcatactgcaaaacacagcaggcctatagattaaatctggattcccaaccctgcgtttgtgctttctgtgacctggaacccttcagctacccttatgggtctgggatgggagtggggccatttcacccattcttctccctcaattccaggtatctgtgggagctaatcctgtccaggtggaagtaggagaatttgatgatggtgcagaggaaaccgaagaggaggtggtggcggaaagtatgtcccttccctgtaacttggcacatccaagctgcccttggctgcctgggcctggggcacgaggacagcctacatgaggctccttccagcagaaatgcagggtggggtcctcagtgggctatgaaggaaacacggctttgacttaacaagtgggaaactgtggcactcagtcccctgggatctgggcaagatcggtttccaggccatccatgtgtgtggtaggaaggagagttctccagctggaaatgggcttctcccctcatagctctttgccctgagtccaaagctgagtttcccagtcccacggaggtcgctgatcacatctggtcaccgaaatctcccattgcttctgtatcagcccgtgccccacagagaagtagaactgagagaagagatcaggaacttgcacactcataagctcattctatttcacacagtccaaggaaacgaggtcctgaggaaatgcaacctgacataatccgtaccatgctatccatgcgttagtgccctgggagagaaatgacctaggggctctggctccagccctaggtgcaaagcatttgtactcaaggggttaagagcaaggactttggaagcggtccaaccaagctttgaacctaggcttctccacgccagcttgcttagcatctcggagcctcagtttctcatctctcatatggggctgatgaagatggcagacccttgtcccagggctgccgggaagttttcagacaagctgagtaggcatccgctaaaggattattaaaacacccaaaataaagcattgcgaggaaaaggccacattaagctctcatcctgaggggatagctaatggtatttgatctagctgggcacagggtttctgttgaacagagggacatctactgagtcatgttccttcccgcctccacgcccacctcatccggtgtttaccaggctctattgtccagcatggactttgaggctcttctcccttttcctttactgccacttaagtctgttttgttgggcctcagctccctggctcagtgtcaacagctgactttctaagccattctagaaagcttattctggaatccagaaatgccccactgtgattgttcaatggagacccaggaacacaatggttgcttcaatcttcaggaaagccatatggtatctagtgtttctgggtcccagactgagcctccagccccccagaagtgcctgacctctatctcaagctaaacctctaatccccaggctgaaccagctgctgccctaaatgttgactgtgaggctcagtgcaagagcaggcaggactcagggctgtccaaagcccagagtgggggccacagtcaaggactgtcagccctgagatctgtccaggtaggatgggggtggatgtgctagtccaggtgatgctaactcccttgtctttctgccctacagatccctgccagaaccaccactgcaaacacggcaaggtgtgcgagctggatgagaacaacacccccatgtgcgtgtgccaggaccccaccagctgcccagcccccattggcgagtttgagaaggtgagggctgagagacaggggcagggggaagggattgggcacttcggaatacaggatgtctgctcaggaaactgttggcttggtggttctatggggcagtgccagtctcagaagtccccttgctagacctagtcccagcaggaaagaggggatgagtcagagtgctctgcctggcactggatcttttcagcaaccagcaagactttaaacagcaccatcaggttccaagccctgtgccagactcttagagctaagagtataacagcatcagcaaagaatcaggtccaaaaatacgggttctggggccaaactgaaggttgacttcaaacctcatctccatcacttattaggtgtgagatttaagctaagttgccgaaccttttcaggtctcagttttctcacatccaaagagaggataaaaatagtccttaactcatagatctgttgtggagatgtgtcagaaatgtttggtacataacaagtatccaataaatgctacttaattttaaattatctctcaaatatgtcccttctctccaataggatccatccatccgtccaagtaaatattttttgagtgcctgctcctgcctaccatcatgctagtggcagtctagctcatggcagcaaatctagggccagcactattcctacagcctcccatctggcttctccatcttcagtttctccagagactacatagcctctgggctccacattttaatatcattgttaacattttcctcctcctcacccctccccactcccagtgcccagtcaccagtgcccatcagttctccctctgcagtgacatataagctatactaaataagtacggacaggatgttcaacacaggctcccctcctcctaacacagctacttacggccactgcatgtccagccctcaacatctctgcttggccacccctatgttcagagatcgactaggactccattggctcagcatacagttgtactcacacctaaggtttagtacagcgacatattcaggatatacagctggatcgtaagggaaaaagacactagcagagtctggaggaatctgggtggagactgactgactcccaagaggggtcatcagagtgcattcttaccccagctacaaagaggcagccacatgtgagtgatgtttctttccagggaagttcattagagactcagcacccaaagttttaattggaggctggtcacataggtaccctttgcctagcatgcaccagaatttcacacttccagaaggaaagcagatgttcagcataaaccagattgtttgtacaaacagtccaggcatagcgagccactcttatcagttagggaaagatttacaacagtgcagagaactgtttcccagctaagttcccagacaccagccacaggctgaccttacaagcaggccttttctaaggataacaattccaggcctgctatgttaactcttctttgaacactcttgtttctctcccattcctgtctttaactttctcttcaaatatcttccaggatttttttccctatatctcagaactgactcagtcatgcctctgctcagagaccatcgatggctctcagcctgggctgagcattgacctgggaacccaaaaagtggatttgtggcccagccctatcactaactcactatatgacctcaggctaatgacattccttgcttaaccctcagtgtccccatctctgaaatggacaaggatattggtatcagcgaagggctttgggaatgaaggagggggtactctgtgctttgccaacaggtgtgcagcaatgacaacaagaccttcgactcttcctgccacttctttgccacaaagtgcaccctggagggcaccaagaagggccacaagctccacctggactacatcgggccttgcaaatgtgagtgtccttgggcccttccagactcctgtcttggggagagagctctgagctggcactgatgctgtctctgccacccccatgctgggtgatcttgggcaaatctctctccctttctgagtctcggcatccccatttataaaatgaggtaattgtctatgagttggctcctctcaactctgagttcagggcactttctggggaaggactgagcgattatggaaggtcaacatcagggaagatttctggagtctctcactagcatctgagacaactgcatttcatttctctaatgaggaagaatttcttctctcaggctaagttgaatctttcttgcttcaacactgtaaagcaaaaatgatgtttgacctgggcctacaaaatattttgaaaatatctgattttgaatgctttaaaataagggcatgcctgtcggtttgctttgggccctgttacttggtactgtcatatcttcacccttttactccattacattcctatctgccctccgaagagagaggataagcaccctcttctggaaacctgggagtcagttgtctggggagggatgccagggtgtggtctgatctttggttagtgaccccagctgcaaactcagtggggccaagtgccttgttcagtatcctccctatcatgggagacccccaagaccacacctgctccccctccaaggcaacatccacactgtgggtcttgtgtattctggcacccgatggcaatgaggagagccactcacctacctcaggtgtacagggtgcagaaaagtatgtagggggtgggaaacaaagttctcctcgtgggaccccaggtatgaaattgagaaggtacagagtagaaaaggagggttgggggaagaagcatgggtaggaagtccctgggcagcaagactagagagcctgtcttaaggagtctttatgaagtggctttgctttccctgaggcatgttgcccactcacttcaactcctaaggtttttatcaccagatattctctcccagaccccagctgatgatgaaggtagcctcacagaggggactttccctggttcaatgatgagggaagaacagacccctaagcccccaggtgaccacactgccctggatgctggatgaggctctgacattgtggccttgagcaagtcccttctctccatgctgacctctaataagtccagtacaaagtgtgaacctgggtcaggcgcggtggctcacgcctgtaatcccagcactttgggaggccgagtagggaggatcacttgagctcaggagttcgagaccagtctgggcaacgtggcaaaaccttgtctctggaaaatatacaaaaattagctgggtatggtggcatgtgcctgtagtcccagctactcaggaggctgaggagggaggattggttgagtccaggaggctgaggctgcagtgagccgtgattgtgccactgcactccagcctgggcaacagagtgagaccctgtctaaaaaaaaaaaaaagaagaaaaaaagaaaaaagaaaagaaaaggaaaagaaaagtgtggacttggatgaaatcttcaggtccaacatttgggattctaagttccaaagaccaggttggaatcatttctaagaaggttctggtggttacacattcctgagtcctctactccccactccctgccaagctgggcctgtggatagatgtgatccctcagcctcccagcttcaaacacctgccagtggttgacgtgaacaacatgggctcagtctcagctaggatcacacccaaagcccagcacccagtaaggtgcaggagccatccatttccctgagcagagcagattaggctgaggaaagcagcagccatgcctttgcacaatgcatttctagggcattcttcccacacataatctcctctgctcattgtcctgtgaagaaactgtggcctggagaggttgagccactgtgccaaggccaccaatgcaggtggtatgtgggtgggtgggggcctggggtggggagcacggcccaggcagggtctgtgctgaccgcccttgtgtttggaacctagacatccccccttgcctggactctgagctgaccgaattccccctgcgcatgcgggactggctcaagaacgtcctggtcaccctgtatgagagggatgaggacaacaaccttctgactgagaagcagaagctgcgggtaagtggtctctctggccttgctggccccgtgctggtgaagatccagtcccattcctagaactgggcccccagctgcagggcggcatcctgctccggagcgtgcatttacccctgagcaccaggacacgtacttctcttcctgcctttggaggctgtggtgcacattaacatcttagaggctctgagaagtcctgcagcagagacctgctccctttgcttaacctaacgttaaacaaaagagacacaaacagccctattcctttttcctttggagtctgtggatcttaagctttaatgagcatattaactaccccaagaagctgataaaatgcagattccttggccccatctcaggccactgaaacagtgtctctagaaagcaaggcccaggaagctgcattctaaatactccccaggtgatttatgtttattttatttttttgaggcaaagtctcactctgttgccaggctggagtgcagtggtgcgatctcggttcactgcaacctccacctcctgggttcaagtgattcccctgcctcagcctcctgagtagctgggactgcaggcatgctaccacacctggctaatttttgtatttttagtagagatggagtttcactgtgttggccaggctggtctcaaaactcctggcctcaggtgatctgcctgcctcagcctcccaaagcgctgggattacaggtgtgagtgtgtgcccggccttcgccaggtgattttgatgtgggtagctatatggagaattctttgaggtcatcccaggcttctatttttgtgaatgagatgctagtacccatctatgacacctccctcccctcgctgtgagctttggtctggctagtctctgcctgctctggccttctgggaggggtgggagggcccgactggtccagacaatctccatggacctcttgtcacacacagtctctactccctcaggtgaagaagatccatgagaatgagaagcgcctggaggcaggagaccaccccgtggagctgctggcccgggacttcgagaagaactataacatgtacatcttccctgtacactggcagttcggccagctggaccagcaccccattgacgggtaagaccccagaccctagagtgaacagagctcaaggctggcaggtgcactagctatggccagaaagcctctcagcagcctatactgctccaagccctggcatccacagtttgcctggggattggagcagaaggatgaggcatctggagaaaagatgtggacctgggacaaagaaaccgataagacactctcatgctgaggtgaaagtcagtaggagctcaaaatagctccataatcctgcaagtactaggcgtggatatctggataatgaaggagtgtgaattaagaaggagtaccaggctccaaggggtggcaggggacaaggttgggtcagccacacgccccctgtccttcagcagaacatccaggggcagagcagccacctggcactgtctaagccccctcctaaggctcagccccaatagggcccaactgaccctggaagttatccaaaaaagcctgtctattttgcaagcccccagtttgagggctcttgtcccttgtccaaacgagttatgaggccctgtgcaactgcactgccgaacaggcaggcagctggccagttagcaaatgcttatggagtgtgcattttgtgccctgcactattctaggcaggggattgaacagcagtcagagctggcatggtccttgccctcatggacttatactctgttcataacctgtcactaccttctgaacttctcttgtggtgatgaagtgagagcccctgctcagcctcagatggagcaagctacacctgcaccttcccagagtggttttttcttcgtccttgggttgtggaagcagagcatcacacagaggggaaaggaagggctgccctactcacatactcagggaacttcctctctaggatgttcacccctcgctctttgtccagcctgtgtgcctggagtctgccaaccctgccagtgatcctgagggctggggtctcctgggctctgggaatctcccggccacttctctcccaggcttttgccatggctgggatccaactgagtcactcattatggcagggaggggaaaagtcaaaggggaacatctggagctcaggcaaagcaatttgatcccactgcaacagagggcctggagggaggctttcagatggggtgcaagaacagcacatctgggaaaggggtccagcttgggcaaggggacccgcttcctcctcctcccatcccagggctgtaggtgaccttgcctgcatccctgcccctccctgggcctcagttttccaccagtacaatgaaggggaggagaatgttcctatcagttcaaacattgtgtgatttctttggtgagctgggtggggctgcgaggtctagaggttaagaagacaactggagtcacattgttccctggagatcctttgtggatctttagggacaagtagttgggggctctgggaaacaaagaaaaaaattatacacatgctctggagtctaaggccagcagggagaatagggagggaggacagtgggagagacatccaaagggcctccctctcagacattacaggatacacaagcaaagctctatgaagatggttagagctcccgttgaccctcactgccaatcccagtccctttccacattcctccccagaaggcagcactgtcaccagattggtgtgtcatttttagaccctttactaggcatttatagatgtataaatgtgtgtccatagacaatatacagtgctgtgtcatgctagattttgatctacccatagcagaagtgctgaattttgattttaagtttctgtgtccccagttctcagccaattaggaaacaatcaaatacaccaaacagacctttgtttttgagaccctgaaaccttagagctggaagggccgttagtaattatggccatctcctcctctttgctggaaggagaaactgaggttccgaatggtgcactgctgttctctgagtctcagagcagtcagtggcagagctaggggtagacctgggattctggctttttgtcctgctttaaatatcctttcctccatgctctggggcaggctaactccccggttgcctcccaaggctgggtgtggagcttttccatgcctcaggccctcccctgcctccttccctgcaggtacctctcccacaccgagctggctccactgcgtgctcccctcatccccatggagcattgcaccacccgctttttcgagacctgtgacctggacaatgacaagtacatcgccctggatgagtgggccggctgcttcggcatcaagcagagtgagtgtctgaacaaagaagcaaggggcatgggcagaaacactgctcccagggtgctgggttgtcatccccccactctccgctctcttggtctgtctgttgtctgtcctctctgcctgtctctgctctctctgcctatttgactcctgtctcttgggcgtcttcctgatccttctctgtccatccaactgtccctctctctttcccttcctcaagcgttagcactcacccgtgctaaacactattttgggaactggcaggcacacagagaggaaacaggaagtgtaacttggcagcgtgtgtaagagacagggacaggccagagacagagagagcgagattcctccgtcactgacttcctgggtgaccttgcatggccacctagacccctgcccctggggatgggtgggagtccactgactccttgggaagtgcgttatcatcgacacagccttatttttaaccgtgctcttttcttgctttgcagaggatatcgacaaggatcttgtgatctaaatccactccttccacagtaccggattctctctttaaccctccccttcgtgtttcccccaatgtttaaaatgtttggatggtttgttgttctgcctggagacaaggtgctaacatagatttaagtgaatacattaacggtgctaaaaatgaaaattctaacccaagacatgacattcttagctgtaacttaactattaaggccttttccacacgcattaatagtcccatttttctcttgccatttgtagctttgcccattgtcttattggcacatgggtggacacggatctgctgggctctgccttaaacacacattgcagcttcaacttttctctttagtgttctgtttgaaactaatacttaccgagtcagactttgtgttcatttcatttcagggtcttggctgcctgtgggcttccccaggtggcctggaggtgggcaaagggaagtaacagacacacgatgttgtcaaggatggttttgggactagaggctcagtggtgggagagatccctgcagaacccaccaaccagaacgtggtttgcctgaggctgtaactgagagaaagattctggggctgtgttatgaaaatatagacattctcacataagcccagttcatcaccatttcctcctttacctttcagtgcagtttcttttcacattaggctgttggttcaaacttttgggagcacggactgtcagttctctgggaagtggtcagcgcatcctgcagggcttctcctcctctgtcttttggagaaccagggctcttctcaggggctctagggactgccaggctgtttcagccaggaaggccaaaatcaagagtgagatgtagaaagttgtaaaatagaaaaagtggagttggtgaatcggttgttctttcctcacatttggatgattgtcataaggtttttagcatgttcctccttttcttcaccctccccttttttcttctattaatcaagagaaacttcaaagttaatgggatggtcggatctcacaggctgagaactcgttcacctccaagcatttcatgaaaaagctgcttcttattaatcatacaaactctcaccatgatgtgaagagtttcacaaatccttcaaaataaaaagtaatgacttagaaactgccttcctgggtgatttgcatgtgtcttagtcttagtcaccttattatcctgacacaaaaacacatgagcatacatgtctacacatgactacacaaatgcaaacctttgcaaacacattatgcttttgcacacacacacctgtacacacacaccggcatgtttatacacagggagtgtatggttcctgtaagcactaagttagctgttttcatttaatgacctgtggtttaacccttttgatcactaccaccattatcagcaccagactgagcagctatatccttttattaatcatggtcattcattcattcattcattcacaaaatatttatgatgtatttactctgcaccaggtcccatgccaagcactggggacacagttatggcaaagtagacaaagcatttgttcatttggagcttagagtccaggaggaatacattagataatgacacaatcaaatataaattgcaagatgtcacaggtgtgatgaagggagagtaggagagaccatgagtatgtgtaacaggaggacacagcattattctagtgctgtactgttccgtacggcagccactacccacatgtaactttttaagatttaaatttaaattagttaacattcaaaacgcagctccccaatcacactagcaacatttcaagtgcttgagagccatgcatgattagtggttaccctattgaataggtcagaagtagaatcttttcatcatcacagaaagttctattggacagtgctcttctagatcatcataagactacagagcacttttcaaagctcatgcatgttcatcatgttagtgtcgtattttgagctggggttttgagactccccttagagatagagaaacagacccaagaaatgtgctcaattgcaatgggccacatacctagatctccagatgtcatttcccctctcttattttaagttatgttaagattactaaaacaataaaagctcctaaaaaatcaaactgtattctggtgttctcttctacacagtgggagggcgagcagtaggagagattggcccatttggtgctggccatttgaggaatgcaagcccagcactagtctcataatctctaggaatctgtagagagaggaattgaagtaaatttcagcattggctcattcagtcattcggcgacattcatcaggtacctgcaatgtgttaggggatcttatgagtaggcagcgtgcgtgatccttgctcccctggagctttctaacattctagcaggcagaccacacataaatttgcaatactgtttctgataaaaacgtgctgtaaaggaaataaagcagagaactatcatggaaaa
